United States Patent Application Publication US 2008/0039413 A1 - sequence listing, part 21

SEQ ID NO: 2740 - DNA, 96296 bp, Homo sapiens
  misc_feature (1)...(96296): n = A, C, G or T/U
tatattatatataatattataatatttatattatattatatataatattataatatttatattatatttatatattatataaattataatatattatatatttttattatatattatatatgctatatattttatataaaaatacatatatatattttagaaacatggagtggatggtggcctcaaaggatcctcctagaggcttcccaaagttgattgggctacaggtctcagccaccgtggctggctttaggttacacaatgccactttgtcattatggatttacagctttccttaactcatcttgtttcagttaactggaactcagtgctattactctctttttgatgcttgaatcgcagctgcttgttggtgggcgcccctttgccatggctctttgtcttttcagcattgtcctgagtatttgaaagcacccctgtttccaaattctgctttggcctgtctaaaattcctctaccctatgatgcaggagaatattcaggaagtttgagggggtttttttcagtgaagaataaaagagcccactccgggtgccaggacagtgcatggagtcaaaactcctggctccctcacttgcaggtgccctagagaaatagtttgaaggaggcgaactcacatccggggttctactgacttgcagctttgctagatctttgcttttttgttttgttttgttttgagacagagttttgctctgttgcccaggctggagtgcagtggcacagtcttggctcactgcaagctccgcctcctgggttcaagagattctcctgcctcagcctcccgcgcatctaggactacaggcacgcgccaccacacccagctaatttttgtttagcagggatggggtttcaccatattggccaggctggtctccaactcctgacctggtgatccacccacctggccgcccaaagtgctgggattacagtcgtgagtcaccgcgcccggccttttttttttttttttttttttttcaaataaactccaacatcatttccctaccaaattatctacttagatttttaacctctcactcaaaagcaattgtaggccagatatggtggctctcacctataatcccagcattttgggaggccaaggtgagtgggttgcttgagcctaggagtttgagaccagcctgggcaacatgagaaaacaaaaagtacaaaattattttctctctttttttctattttaaagtagaaaatacagaatattttctagaaaaattagcccggcgcctgtagttccagctattcaggaggctgaggtaggaggatggcttcagtttgggaggaggaggttgcagtgagccaagatagcaccactgcactccagcctgggcagcagagcatgaccttgtctcaaaatttagacagaaaggtgtaatgaaagtccaaatacacatctcccagcttcaacaactctcactctcccactattcctgttttatccgtctccgtccatctccaacccactggctcttttctttctaatcctcataaatttcatggacttctcttctgtagtctcatcactgaccgtctccctttcactgtggctgttctgatactctataaccttttgaagtttagggaatcatactaacagctacaaatctcattaattgaacccttattagggattaggcactgtccttttatttattttttttacattttctttgatgagtctagaggctccctatgttgctagggctgaccttgaattcttgggcttaagaaatccaatcctcctgcctcagccctcctgggattaaaggcacacaccaccgttctaggcattgtcctatgtgctagactcgcattgattcattgcatcctcgaaaccaacctgtggtgtgcactgttaaaatgacatctcatttatttattcatttatattgccgtaaaaagggatagatcaggtccctgcccgcctggagttcactttctgacaggtgatttaaataacaaacaacaggcagatacagaaaccacctcagagagtaaggactgtgacaaaattaaagagggcaacgtggcagagtggcaggtaaacagaagacggcattatagagaggggccaggaatgaggtggcagaacaggtgacactgagctgagccaggaaaagagagaggcagccttccaaagatctggagaacaggttcttgggagagaggaagcagaggaaggtcacatactatgaagtaggaatgagactggtgtgctcaagaaggaagaccttgggtgtggggaggtaaggagccacaggtctacttccttggatatgcattctcatgactccatccacaccagttgctgtttttgttttgcaaacagattgaaaaatgagtggaagacattggatctgctatcttactggacttccaggctaatgaggcacacagtaaggcctcagtgcaggactgtgaaagacagacaaattagtacatagctttattcagaagatttcaaatgaacaatactcccaggatttctgaaagtgctatgggttaggggttaaagcagggagtctgtaagagcagatgaaattcggataccagctctccactgccagctgtgacctaatgtctcagtctcctgtctccttgtccagccaatgagggttcataagcataaaattcataattgtaatttgaaatatataagaaaagattaccaattgcttagccgttcggaatgcctccgtttgatagccttagttaatgacggaaccattaactaaggaaagttaatgagggaactaacgaaagggattgttctggctgtttcaaaaaatgatagcttcatagaaaaacagcaatatctgtaagctgaatttaaagccttcagaaaaactaggccttaacatttgcaactctaataaattgaatattaatcacaaagcaagcatgtattcttttctatattcagaagcgccccccgccccgcacccttagatattatacatctcaaatgacagtgataagcagggacgtttcccagaatatcctatggctctactccagttggtcccaacacagaatggaagagcgggccattctgggtcatctttttggccactcttcctattgcaagcagtcctccagagttaggttgccctagttgacacttcagcttccttcttgctcaaaactcacattctccagaacaccagcatgtgactgaggcctgccttttacctgagggactcgcacctttaatccaatgtgatatgatataaacagcaacgaaacagtgaagtgagcatttgatggcagctgagccatcttccctgatgctaccacagagatcctagaagaaagacttcctcaagttcagtaaagagaaaccagtgattggtaaagaaagagatactggaatatttttagactagttagattagataacagccatgaatatactaaacctgaagataattttctgcttcaaatgaggcttttaaatgaaaacattcagaaatggttgattaataatttacatataaattatatgtaatcattcttgtagaccacttcaccaaacgcatctgtgctctaataatttatacatgccccaaaggacaccaagatcaaatggaaaatgacatataaattttatttcttatgtctggttggattcttcctgtccaaggaagaagatgtgcagagtaagaaataacagagcaggcctttctaatggtgtcctggctttgcaagtgaagagaacatgatagcttcttcagaaacaggcttgaaaagagaaaaaacgacgctgccatatagaattggattaagaaccgcaaatgaaagtgacactgtactcttcaaaatcttttatctgagtacattcctgtgtgatgtaaaggggcggggagggtccttctcccctccaggtggcaccctgcacgccctccagtgggtattatcctgcaggcaggcagtgagggactccagcaattttaagtgggggagtcacacgcttaaatttgttgtccaggcagcccgtttcccccaagaccttggagaaataggcaatctcattcatggctagtgggaggtaatatcagactgtaggttctacagtagggcaatttatctatttttacaaaattacttgcatataaacctggatgcaacaaatctcatttctggcaattacctccacagataaaaaagtgcaaaagtgcaaaatgacaattgctacatgcttaactgtagcattgatcgtaacaacaaaaaaattggaaacaatgtaaatgcccatccattaagtgatctgttaaataaaagatgattcatcgacagcggaatattgagcagctgtaaaaaaagatcgaggatatgttctatgtcttgaaatagaaaggtcttcaaaataggccgggcgcagtggctcatgcctgtaatcccagctctttgggacgcggaggctggcggatgacctgaggtcgggagttcgagaccagcctaaccaacacggagaaaccccgtctctactaaaaatacaaaattagctgggcgtggtggcaaatgcctgtaatcccagctacccagctacgagggaggctgaggcaggagaatcacttgaacctgggaggcggaggttgcgatgagccaagattgtgccattgcactccagcctgggcaacaagagcgaaactcctacttaaaaaaaaaaaaatcttcaaaatatagcacaatcataaaatacaaaattttgtataaaatacaggaaaataaaactccgcttgtatcagccaggcacagtgactcacacctgtaatcccagcactttgggaggctgaggcaggcaatcatttgagaccaagagttcaagaccagcctgatcaaaagggcaaaacctggtttctactaaaaatagaaaaaattaactgggtgtggtggcgcacgccagtagttccagctactcaggaggctgaggcaggagaatcgctttaacccgggaggcagaggtcacagcaagctgagattgcaccactgcactccaacctgggcaacaggctctgtcaaaaaacaaaataaacaaaaaggccgagcgctgtggctcacgcctgtaatcccagcactttaaggggccgaggcgggcggatcacctgagttcaggagttcgagaccagcctggacaaaatggtgaaaccctgtctctactaaaaatacaattagccaggcgtggtggcaggcacctatagtcccagctactcgggaggctgaggcagagaatcgcttcaacccgggaggtggaggttgcagtgagtcaagatctcgccactgcactccagtctgggcgacagatcaagagactctgttccccctccttacccagccccccccccaaaaaaaactacttgcatcaaaatttctggaagaatatgtacaaaaatataaaattgaaattttaagggggagttaaacacttttcactgaattctgttttatattttaatgttctttaatttttattttaaagatgagggtctggctaggttgctcccgaacccttggcctcaagcaatcctcctaaaagtgctgggatttacaggcatgagccaccgcgctcagccgaaagatttttgtttttgggtttttttgttgttgttgagacggagtctcgctctgtctcccaggctggagtgcagtggcgccatctctgctcactgcaagctccgcctcccgggttcacgccattctcctgcctcagcctcccgagtagctgggactacaggcgcccgccaccacgcccggctatatttttgtgtgtttttagtagagacggggtttcactgtgttagccaggatggtctcgatttcctgacctcgtgatccacccgcctcagcctcccaaagtgctgggattacaggcgtgagccaccgcgcccggctttttttttttttttgagacggaatctcgctctgtccgccaggctggagtgcagtggcgccatctcagctcactacaacctctgcctcctgggttcaagtgattctcctgcctcagactcccgagtagctgcgattataggcgtccaccacaaggcccgtttgtattttttaattttttttttttagacggaatcttgctctgtcgcccaggctggagtgcagtgacgcaatcgcgtctcactgcaacctccgcctcccgagtagccgggattacaggcgcgtgccaccacgcccggctaatgtttgtatttttagtagagacagggtttcaccatattggtcaggctaatctcgaactcctgacctcaggcgatccacccgcctcggcctcccaaagtgctgagattacaggcgtgagccactgggcccggccgaaagatgttttttttaaatttaatttaatttttgagacggagtctctctctgtcgcccaggctggagtgcagtggtgcgatcttggctcactgcaagttccgcctcccgggttcacgccattctcctgcctcagcctcctgagtagctgggactataggcgcccgccacccccggctaattttttgtatttttttttcagtagaaacggggtttcaccgtgttagccaggatggtctcgatctcatgacctcgtgatccgcccgcctcggcctcccaaagtgctgggattacaggcgtgagccaccgcgccaggtcgaaagatgttttttaaagctcatttgtgatgtagcctctgtggaaaatggtatgacacttccgcaaaaacagaaatgccgtatgacctagtaatttcactttgtgatgtatactctaaaaaaatagaaagcctaaactcaaacagatatctgtacactcatgttcatagctgcattatccacggtagccaaaaggaggaaggaaccaagtgtccattggcagatgaatggataatgtggtatatatgtgcaatggaatgctaatcagctttaaaaggaaggaaattttgacacatgctacaataaggatgaatcttgaagacattaagtgaaataagacaatttaaataaggaaatatttattgcacgattcatcttatatgaggtatctagaggagtcaaattcaaagacacagaaagtagaatggtggttgccagcgtctgtgggcagaggggaatggagagttaatgctgaatgggttcagagtttcatctgggaaacaggaaaaaggactggagactgatgcacaaccatttaaatgtatttaatgctacagaactgtacagttaaaaagtgttaaattttgttgggcatattttaccacagctttaaatcctaattgtatcgcaagataatgggtagataatgaacagtggagcgcccgcaagagtattacacacacagaaatgcaagacttcagagcagattattttcctaagagctggtctactataatatatttttaggtatggctagtagtcgtagatttaggactaaaacgaccagttgccgcccaacgtggggctcgaacccacgaccctgagattaagagtctcatgctctaccgactgagctagccgggcacccgataaccgtatctcaacaatttttcattctagatcagagtcggagtgtattcaactgcgggtttgaacttggatttatttggagtgtgataaaactactaaagtgcctcggctcctgggaaattcaaactctgccgtcagtgcctgaccgtccctcccacttacgtccgtttcctgccccttctaccctaccagcgaccaagccattttctacccgcgatgaagctcacggcacggagatggagaaacgtgcaccctgacgccactggagctctcaccgtgtggatttttttttttttttttttgacagagaagactctcaaaaaatgggcctacctttcaccacgaactgcggctctgtcgcccaggctggagtgtcgtggcgcaatctcggttcactgcaacctctgcctcctggattcaagcacttctcctgcctcagcctcctgagtagctgggattacaggcgtgtgccaccactcccggctaatttttgtatttttagtagagacggggcttctccatgttagtcaggctggcctcaaactcctgacctcgtgatccacccgcctcggcctcccaaagtgctgggattacagacgtgagctacctcacccggtcaagtaccgtgtggattttaaaacaggagggaaagacaatggggcccagaggagggcaggggccgccgcggtctttttctactccgcagactccaccctctgggttttttcttggagctcttcaaacatgctggatttcaaaatttgaaaggaaaatcgaaaacaataattgaatgtgcaaaactacactggagatgccggggatcgaacccggggcctcatacatgcaaagcatgcgctctaccactgagctacatccccacctactctcagcagctctcccagatggtccctattggtcgcttaactcaggacaccgggagtggaaggcaaccggtacgcgctgggtctcagccgctgcaaaaacccggcatcgcagggcaagagttgttccagcgtcctccgctgactccaaaccagcgggtcttgaccaagggattccaagagagaggattaggcccggctaagcacctgggagcagctgtggaaaaaggagagacaatcatcaggcacgatgccaaaaatgaactgtgacctgaaaaagagaagaaaggaaaattgtgcaggatgctacgttttgttttttaaaagtgggggttgaggcaataaaatacggaatatttgattaacgtaatccagaattgtaaagttgattgctcgggaggaagaaaggactgggacacaggcgatgggcctactttccaccgtgaactgcggctcctcttttgaatttcgaaccaagtttaatccaagaaaaccttactgagcttgccaagaactgctctaaaaacaggattcagccgtgaacaaacctagtacagtccatctgaaagctgacattccagaggagatagagtgcgggcacagagccggccctgagaagggagcgcgctaagagacgactttacacagtgtgcgcgttcggggcgggctttgtgggcagagacgtttgaaacaagacctgaatgaggtgggagggagcatgcaggtggtgggagaaaagaggtccacgcaaggggaacagccagcgcagaggccacggggttcaggaacagcaagaagatcggggacactgggtcctggaaggccctgagaagggaagtcgggaaggagggagcatccgggggcagatgaggtgaggcgaggtcttcgcctttgggtgagaattgctgaagttcccggtgacattggcaagggcggtttctgaggagggtgcgggcgaaagcttgatccaagtggcctccagagtgagcgaggagagagggtgtggaagcggataacacaggcagctctgctgcggggctgtggagacagctgggggacaagagagcgctgaggtttgtgtgtgtgtgtgtgtgtgtgtgtgtgtgcggtggggggggaataatactgaatacaatgggaaattataaatgtgttatctgttcaaatactaagtaaagagtaaagaagccggaggacagtcgcagaaaaggtaatggaatggatacaaggccaggcttgcgcgtgaggggacaggaccaggttccagtctctaaatttaactcagcacagggccggggcgaacctgcgctggcggaacctgacaccgtggcccgagcgccaggcccttgccccggcgatgctgggtcggcctcggtcggaaaccgggagtggcgctggcagcatttgtgcgcccacctgtcgcggcccgtttcccgcggctgactgggtcaggctggggcggcctggagagtctgagggacgggggcgagggggagaggccgctggccagggcgggggctggtggagcgcagatccggggcgcagggcgctgtcccgcacttgaatggcccgtagtcaacgtgcgcctcccctcccggctcccagccgggcgcgccccgggctcgagtctctgcctgcccagtggcagccccgcccttcctctcccagtgggccctcggcgcccagctccgcgtcctgtgaggtccagtggccgcccaggcgcgaccagatctgggtgcgcggagagcgcgcatggcggctgtgggaccgcggaccggccccggaaccggcgccgaggctctagcgctggcggcagagctgcagggcgaggcgacgtgctccatctgcctagagctctttcgtgagccggtgtccgtcgagtgcggccacagcttctgccgcgcctgcatagggcgctgctgggagcgcccgggcgcggggtctgttggggccgccacccgcgcgccccccttcccactgccctgtccgcagtgccgcgagcccgcgcgccccagtcagctgcggcccaaccggcagctggcggcggtggccacgctcctgcggcgcttcagcctgcccgcggctgccccgggagagcacgggtctcaggcggccgcggcccgggcagcggctgcccgctgcgggcagcatggcgaacccttcaagctctactgccaggacgacggacgcgccatctgcgtggtgtgcgaccgcgcccgcgagcaccgcgagcacgccgtgctgccgctggacgaggcggtgcaggaggccaaggtgagcgcagcccccacccaccccgtgggtccccgggaccccctgacttggtcccgcgctcccgcgcacggggtgcagagaacagcctgtcgatcaggaggcccgggtgagcccctcccttctttctccattccaggaagcccagcgctggttcccgggctgagcgcggttctctgtcacccccaacatcaccaatacccctaccccacccccactgcgtttccctctgggccagatactgggccgcctgcgcgacgtcccccacggacttggcgatgttcttcctgtctgttcggagcctctagcctggtctgcgtctccgcagctctctgcccgcgggaagtctccggcacagccacgcagccgctgcccccactcttatctctttccccgaagcgggctctgctcaaagtccccacctcgtggaactgagtgagaggacctcgccaagatgtccagggaggggggtcccgggttaagccgcgcacctagagccgtctgactgtgccaacgctgtcgattctgggggccctttctttgctattttctcgctgagcctcagcgagggtgtgtgcaggggtgagggcggggcggggaggctcgggcggcagtccccagtctctccttgctggcccatcctgctccaactctcccagccacggggcttcctggtgggggggcggagagtagaggagacgactaggggtagggctgccggagcttgtgtttcagtctggctggtccagcagatgcttttggggaagcaagatcccgagaccttcagagtcacctcgcagtgtaacctgtagcctgtagagatgacttctacccggcctccccctcagtgagcagggccttccctttctcctggctggctccaggaaggcagaggtgggggtttccagaagcccctcacccccaccttacattgtttcccttcatctacaggagctcttggagtccaggctgagggtcttgaagaaggaactggaggactgtgaggtgttccggtccacggaaaagaaggagagcaaggagctgctggtgagccaggcacccgcaggccccccgtgggacattacagaggcctgagaactcagcaccagggctcggtgtgtgtggtgttggagtgtgtgctatggaaccgcagaatcgatttcagaaagataatagagtccatattatatagggtgtccacataattgttgtacaaaccagagctttttaaagtgaaaagcagtgctaaaataattattgcaaaacaactggcttaaactggagctgtcccagcgaatcaggacgctcagtcactctgatattacgtaacataccagttagggcctgcggaagcatcttgtaatggaacacattactatttctgcagagaaacatggatattcaataagtgggaatattaatacaataaagagcctcatggcatgttttgtcaacaaaacagtagtgaaaaaaatttcatgttcacagtgtttttatttgaaatcgaggctaacggagaaggggctagagggcgtcagagctgctccctggctctggcagagggaggaagtttagggtcttgggtttacagtagcccctgctgcacagcccagggtcttgggtactggcacctgcctctaccccaagttggaatgatattttatcttccttagggtagaacaggaaagtgaaacgagggctcattttggttaagataagcaaacatgaggcctggcagggtggctcacgcctgtaatcccagcactttgggaggccgagttgggcggatcacgaggtcaggagatcaagaccgtcctggcaaacacggtgaaacccctgtctctactaaaaatacaaaatagccgggcgtggtggcgggcgcctgtagtcccagctactccggaggctgaggcaggagaatggtgtgaacccgggaggcagagcttgcagtgagccgagatcgcgccactgcactccagcctgggagacagagcgagactccaccttaaaaaaaaaaaaaaagataagcaaacatgaatcaccatcggtcattttctaccttgcaaattcagttcctagctcagtaaataggtgttgaaagaataaaaggattggctgggtgcggtggcttacgcccgtaatcccagcactttgggaggtcgaggtgggcggatcacctgaggttgggaattccagaccagcctgaccaacatggagcaaccccatctctacttaaaatacaaaattagcctgccgtggtggcacatgcctgtaatcccagctactcgggaggctgaggcaggagaatcacttgaacccgggaggtagaggttgcggtcagccaagatcatgccactgcactccagcctgggcaacgagagtgaaactccatctcaaaaaaaaaaaaaaaaaagaatgaaaggatctactaggacctgtcaaggcagggaattgaaggaaggtgaactagaggaccctcccatcctcaatgtcaggaggggtggaggaggagcctggagttcagacaccctagggtcctttccagaccctcaactatatctgttatgcctgcacccagtgtgcatcccagaccttcctacctcatcactcactttcctccatgaggaagagctcaccctctagaccttcatccctcctccactggagaaatgactcccaatgcagctcttcccccactggttgacatccaggaaccagagggccttccctggcaccggcggcagcttcacagtctctgaccggagtccccaggccttgcttaacaccttccacctctgtcctctcccaacatccatccatccacccccacattcgtttttgttgttgttttgttttgctttgcttttagacagagtctcactttgtcacaaaggctggagtcgttcaagcgatccccccacttcagcctcctgagtagctgggactacaggtgtgcactactacacccggctaatttttaatttattttttgtagagctggggttgggggtagtctcctgtgttgcccaggctggtctggaactcgtgggctcaagcaaccttctcccctgactttgcccccctcagcctcccaaagtgctgagatgacaggtgtgagctctacctgttctttgcagcaataaaatacttctggatttatgacacttgtctcatttacaataccctgcttaatgaaacatcagaggtagagcccaactattgctgcaacacaaaagggagaaggaatgctcttatttgaaaatgctcctaccccaggggacatctggcaaagtctggagatactatatttttggttgtcaacaatgggatagggatgctattggcatttcgtggtagaggccagaggggcggctaaatgtcctacaaggcacagggcagccccctacaaccaagaagtatctggcccaaaatgtcaactgtgttaaggttgggaaaccctggcttagagtattttggcaaatactgtttcacttgtgctacctccttgtgaggcaactggccgagaagcctggcttaacacttcctggtgatgtgtctgtcttttgtctcctcacctgtaagacttgaagggaagtgcaccctccccactgggctgccgtcagggttgagggagttaatatccataaggcgctccaggctactgcagcctgcctggaagctgaaggaaaggtgggggcattgtaggacaccttgaacccaggtctcccaacttcacaggactcccttcctccgcccaggagttttaaggaagaggaacttcctggtgggacatattgagtgccaaacgtgtgttcacataaaaaatcaagagatcagggcatgagtctgcatctgaaaactcgagtaaaaaatccggtgtatgctgttaatggaaagaacagaatatgacacttgcatgccgcatattctcacttcgttccttgggggtgtgctgctacctctggtcactggcatcggacttttcttccttctttctactttcctacatctcccaagttttgtattttgagcatgtgttagcattataactgctaaacaggaaagatggcctttaaaaagaaagtgaagtgtaaaagtttgagggtgatgaaataaatgtgcttgaggaagaaaaagcaatctcagtttaatcctatggttgccccaggaggcactaatttatcccttctgcttttcaagtgaggaagctgcagcttggcgtagttctggggggagtatgaagctgccttggtttaggtgatggagcacaggtccacagacatgtgtgggtgcatctgtggcaggggagaaaagagcatgtgtccagactacagcttgttcagagctgggacactgacaatagagcacgcactgcgtgcgtaggtgggtgtgtctccgatcctccagcagtgacagggacgaagccttgccctgtgggatgactcaggccactggccaaatgttatgtctccatgttcaagtccctctccaacttctcctcctgggacagaaacagatggcagcggagcaggagaaggtgggggcagagttccaggcactgagggctttcctggtggagcaggagggtcggctgctaggccgcctggaggaactgtcccgggaggtggcacagaagcagaatgagaacctggcccagctcggggttgagatcacccagctgtccaagctcagcagccagatccaggagacagctcaaaagcctgaccttgactttctccaggtaagtctggctcagccaggggctcgagtcatttatcctaaggcatcaggaccagcagctagagaacagtgtcagtcctggggggtctaggagaatcacatgatctggagctgaaggggactggagagaagtgccctgattttcctggggttggaggtctagagggatgtgaaaactttcttgactatgagccacaataatatatatcgtatttcagaatcacaagcttgagacaaaagtctcagaaaataatactcacctttgctacacgtatgcactttgatgttttctattctatttcgctaaaaaaaaagttataaacaactagataaacttcacaatccacagatgggttaagaacagtcattatggggctgagtgagcagtaggtgcataagggctgtgacctccctcaggtggtttccaggacacacgcagcactgggtcccatgggatagctccagtgatgattctgtaactaagaaagcagcaaagatagaaagaaagcacgtgaagagttgtggcaaagggtgagaggtccactgcgtgggtgagacaccctgcagccagcagccactggaagctgctgcccctgaggcccacgcaggcagtgaggcgtggcacacttgcttatgcttacatctgggaggcacagcaaggggcaagctttgtttctcagaggtgaatggaggttacctgatgctgatttggtttcctctatctttccttccaggaattcaaaagcacgctgagcaggtgagtgacctcacagctcctggggcctctctaagttgcttcttcccttttcactgagccttgtctttattccctgtcccctgacctctcacctcctgatcccccgacttgcttgcctggggaccttccgagacaaacgcccacctgcctggccatgggtttttctgcatgaggtctggctctcccttttctacctctttctgccaagaggacctcgccatcctaattgtcacagcctgtgggagcaaaatggtgcacacaggcccttctcagagcccttgtcctgcaggtgtagcaatgtgcctggccccaagccaaccacagtctcttctgagatgaagaataaagtctggaatgtttctctcaagacctttgtcttaaaagggatgctgaagaagttcaaaggtaggggcctgggcgccaagctgggccacatagtgcggtggtggtggagggttcctggtagctcaggggtccctgggtgtgctttccagaagctgtgtgtgaaaataggagctggctgtgccatggccagattggtgtaggggctgtggtggcaaatctagtcaggcccccgcagggcatgccgcttctcatgggcacagatggggtagaggggtactgctgggggactggggttaggaagagagctgtgcaggggagctcagctcagagccacttgggtagagctagaatgcttgggtatgggccccctgccccccgctccccatgcttggccctgtgcctgcacgttcactcttggccttaggagtctctggggaatgaatgagtcagttgggatataaagagctggtgaccttgccatataatctcccgtgtcgctcatgcacgccttgctttgtttctcctcctcagaggaccttcggggagagctggagaaagaggagaaaggtagggatggtgctgtgatggcgagtatggactgtctgccacacagagatcctactccctgctcgtgaccatctcagggttttgcatatggtcggttccttcagcccacccacctcagcaaccctgttcctctgtcccctcccccacaccaccccctccccatcctgggagctctgacaccctcagatgttggcccaaatgctgcaggttggttaggagcaggaatgccctgtacctcgagatactcagactgggaaaggcttctcggccacctgggtgagcctctacccggtccccactccaagatggatggaaacctctcctgggaatggggtgtatacaggggaccaggaaagcaaggggaagctaaagactggaaggaatatcgtttttactcttgcaaagctctggaatgtgtggcatccaacacccagaggaggggaggggagggcacatattcctgatgctgatgtctgagctaagtcagagtgtgtctgggtgccacctaaaacacctgagtgagaccaggccctcctctgctcagagccctgccacagcccctctgacttggtaaaggtcagagtccccatggaggtctcaagggcccacgggctctagcctcactgcacaccccttctactccacgcagctacacatcctccctgctgttccttcagtgtaccaagcacacacccatcccggggcctttgcactgccaggctcccccaccccaggcccctacctggagcatgctttccccagccagtcctgtggcctgcttctttgccttctttatatctgtctgctcgatgccccttttcagtgagggtcttccctggccactctggttgaagttacagcctgctcttctggtccctctcatcttctgtttataatctatcctcaatcctctccctgtgggaaggaagctgcaggcaggcaggactactctgatactctgtggtacccccagggcctcaatcgtagtagtgctcacagtaagtgtacatattttaacttttttttttttttttggagacaaggtatcgctttgttgcccagggtggagtgcagtggaactgcagcctccaccccgcaagctcaagcgatcctctctcctgggcgtcctcgagtagctgggactacaggagcacactaccatgcctggctaaattttctatgttttgtggagacggatgtctcgctatattgcccaggctggtctccaacacctgggctcaagctgtcttcccacctctgcttcccaaagtgctaggattacaagcatgagcctctacacctggccttaactttttattatgaaaaatttcaaacatactcaaaagtagagagaagagtgtaaagaatgttacatacccatctctcaccgtccgcagtgatcaattagtggccacagttttcatagacactgctatccacttcctgtgggattattttgttttctgagacagggtcttactctggagtgagatcatggagtacagtggcctgatctctgctcactgcaacctctgcctcctgggttcaagcgattctcatgcctcagcctcccaaacagctggaattacaggcacaggacaccatgccgggctaatttttgtatttttagtagagaaaatacaaaacaagttttccgccatgttgcccaagctggtcccaaacttctgacctcatgtgacccattggccttggcctcccaaagtgctggtatcgcagctgtgcaccatctcacccggcctccactgtattattgttattattatttttatttttgagacagagtcttgctctgtcgcccaggctggagtgcagtggcgtgatctcagctcactgcaatctccacctcccgggttcatgccattctcctgcctcagcctcccgagtagctgggactacaggcgcccgccaccacgcccggctaatttattttatttttttatttttagtagagacggggtttcaccatgttagccaggatgttcttgatttcccgacctcgtgatccacacaccttggcctcccaaagtgctggaattactggcgtgagccactgcgcctggcctactgtattattttaaagcatcagagacaacatatcattgccataaatacctcagtgtgttatctctaaagaaacagactttgtaaaacataaccacaaagcagtcctcacacctggacagattaatgattctttccaatgtctagcattcaaatatccccatctgttgaattggggttcaaaccaggcccacacattgcatttgtttgatttcagtaagtacttgttgagtggtcggggcggggggaagcaaaatctctgggaggcagagcgtgggggttggttgggccttggcgctgggtgctggggggattctagagggaaaggcaggcaggttgcaaagcaaggtcgggcgcggccctgcaaagactgtgccaggggcctggctgcgtggggacatttctccctgtctctgtctgcagtggagctcaccttggatcccgacacggccaacccgcgcctcatcctctctctggatcttaagggcgtgcgcctcggcgagcgggcccaggacctgcccaaccacccctgccgcttcgacaccaacacccgcgtcctggcgtcctgcggcttctcctcgggccggcatcactgggaggtggaggtgggctctaaggacggctgggcctttggcgtggcccgcgagagcgtgcgccgaaagggcctgacgcccttcactcccgaggagggcgtctgggccctgcagctcaacggcggccagtactgggccgtgaccagccccgagcggtcgcccctcagctgcgggcacctgtcgcgcgtgcgggtggccctggacctggaggtgggagccgtgtccttctacgctgtggaggacatgcgccacctctacaccttccgcgtcaacttccaggagcgcgtgttcccgcttttctctgtttgctccacgggcacctacttgcgaatctggccttgaggggcactgctggggagctcctgtctctgggctgccggtgggaggggatgtcgcctccccagagatgcctggtccgtcttgggtctgccctccgtgctcctgacccctgctgcccaagagagcctgctacagacacaaccccgaggcaggagagtgactgtggccaaccgagcaggggaacaggggctttggactcctgagggtgttcccttcctgaggtcacatgtggatttggccagagccttcaggaggtggaggccggtgaggtcaggagcccagctctccagggggcttctgccctgactgggaagggtgcctggctccctaaaacaatgtcaaagccagtcctgctgttctctgttgccagggggcaggtctgggcctgggccaaccacgtttgttatcatggctgctgccttctggacagctgccagctctgccttgagaggttgtgggacctctggatccagctgacctgacaggtcatctactcagggaggagccctgtgctcccagctcagaggacagtctgggccagaactggaaggagacatctgtcccgtctttgagtgacaagcccgggacaacagccagtgggcatcacggctctccagcactccttagccggaggatacagagtgatgggtgcatcctgaccaatgcgacaaccaacacgtgctctcacaaacccctgactcccgcactttccagtgccaaagtacaaacgctgcttggataaggagagcaaagcttctggaactttatttactctttctttttaattttcttttaagagactgggtcttgctatgttgcccaggctggtcttgaactcctggcctcaagtgatcctccagtttccatctccctaagagctgggattacaggtgtgagccgctgtacccgaactttttttgtttttgcttctggaactttgaaacacaaaacacaagttggcacttacaattttaaagatgcagccagctctaaacaacacacagagcacaaatatgctcctgacggactcaggaaaatgccaacagcagagcaccctggtgccaaggccttctcagcccatgccctggagggcattcccctggccagcctcagccccttgtctacttgttctccagcttctgggtagctgggcttctggaagggtggcagtgggctactccctgctcagcgctcccctgggaagggggtgaggagatgaaaatgaaactatgagctgtctttggagttggcttggcccattttctactccctagatctgagtgcaggagcgtaagtgtgatcagggtttctgccagagtgaatgagcatgcatgtttctgtgtgggaggagtgtgtatttgtatctcacctttcttgggggtgtgtgtgtgtattttggagagggcatttatgagcatgtgcataaggttcaggtgttgcaaacagacccaagtcagtctggtcataccctattgttgatttgttgttaaatactgaccacctcatatttagacaagggccacaggtttcttctctcactacctggctaccaggctagatgaacagaataccagactcggacctaattctgtcccacacaagttatttagacagaggtgctggcaaacaggggcaatgatagctgaatagccctgtgtcatggagcttcagtgctctgtctctgaggtgcttcaagctcacctggcatatagggttctcgtggggcagccacaacactatcccagaggcaggcccagttgacacagcaccagacaatcagaataccgcatcctccaggctgaggacagggtcatttcaaagtcctgcctacagaagcattccagagagtgaatcctatgtcctgctcatacatggagagcagctctaaaaccgggtagccaattcaggcatttgaataccactgatttccacaaggaaaaccgatctctaacattaatttcctaactgaatcacctattgttaccgttaagccttaatgttatctggcttgtatggctttttgattaagtatcataattccctttgtaccatccaacaaatgtgctgggcatcacaacacacattacaggtcccagaaagtaccatgtctggtgaaggtgtcacatgagggtcaggtctggggactgggagtagctgtccgcatgtttattttccgtttttgtgtccatgagtgcaatcgtgtgtctatcagagtgtgtgtgtttgcagagtgactacatatatagctatgtatcttaagaaatgtaacaacagttactgtaacaattgcatagagaagggaacagatgttctttcttgctaaccagggcagtacagtaacttggatgtcaggatgctggtgtcctcgagggcatgtgtgtgcatttccctctcctagactctgggcatcataaactctagggacctctgggtctgtgagaacaactggcctaacttgggcccttcttattcaacccatcagtcctagctgctgagccataagcgcaggcctctgccgccagaccctcacagggaccctcagcatccagaatggggggcacctagaggcccacctctggcctggccgcccagtgacccaagtcacccggcattgcagggagcacagggcaggctaggccaccagaccaaggtccacctcctacacccaccactttctgtcctttgccaggctgagccctcatccttttcccctctcctccggcccgtgggccctttaagggccctgacagaacatgtcagggtgtaccctaaaagctgccttttcctacttcatccaaatgtgagacggggctggcacccacccgcaacctcgcctggacccttcccaccccagcgcctccaaacacctggccctcctgattccccgcctcccccgccacactcccgctgggcctccacctcctgatgaccccactgttcccccaccgcccagctcgccccaggtcccgccctaacctctcggatctggactccctgcaggacgggcgcactgacacccttccctgacctttccatagccttgacctggatccccgcttcctcacgcacagcaagacgcaaaacgtgctccccaatcctgcgcacgcccttccctggcccccgccccgcccaaggcccggggcggtcctcacagctcggagctcggcggtgccgccccgccccgacagctcccgcccgcgcgcgcgcccaacgacggcactgtcttcgcggagccctctgccgggactaacggccgttccgtgccacggacgcacgggcaagatggctgcggccgtgggaggagcttgggtccagcagccacagaactcggccgagggttcagcggactgcggctgcgcggcgccggcgacagcgtcaactgcttttgtgtcaaaaggaaaccaacagccggctccatagctcaggggttagagcactggtcttgtaaaccaggggtcgcgagttcaaatctcgctggggcctgcttccgtcttttcctattctttccttaaagatagaaaagtggaagataggcaagcctacttccgccttcctgggaggccagagcctggcggagtcactttctttttgcctctaagatacccaccgcgcaaggctactttcctaccacttccttatctcttgaagagtcagacccactgcgggcttccttttccatcacgggttccctgggccccgcgcgccctctccccacgaccccgctcacttccttctgcgcgctccccgggagcgtctttccgcttctctccggtcttcccactccagctagggactcgccctcgtgtctccttccctctctccagggggagacgatggcactaccgcgccccttcccgccatgcgtttgtttgcggcgttccccgacgcgcgcgctgaggctctggtctgcggctctgcgcttggcggctgcgcgccctcggccttcgggtccccgccgcctccgtgctgcaaggtctgatttcttcctgtggagttaacacggaaaagcgcagacggccacattcatgacccgggagtaacggctctacctgtcacattcgctttcagcctaaaacaaaattttagtttattttagacaaaatatataactaaggtatgctggccttctgactgatttattcttgctgttaacggaagtgtagaaagtgagcccaagtcctcagtgaacagtgggggcgctgcccaggtgcaggactggccccctgggggtctcgggacggctcccgcctccgtcttccccgcaccgcgcactttggaggcctgggcacaggtggaggcggcgctgggtcccgccgtacactcccctgtcgcaggcgccctctctccagccggagggaacctcaaaaaagctctgagcgagtccccgtcccaggtggggccgcggcttataccgggaccactccagggtagctcaaggttcgaaaacggaatccctgtccggtgaaccagagaagagaaaatcgctcggggccacctgggtagagaccggaggggtgactgccttgactgggaggcgtggaggagcgagcggggtctgcggctccggccgggaggtatgcgcttccctctctcacccatgcctgctccggtccaaagagccgagaccgtgggtcaagaccgggatggattcgctcgggagaggccaggagcctgccagcacgttcgggcactagcgctcccggggctcctcggactcgtggaccccgaaacgcctgccccacaggaagatcaccccactgtagaagtcgggtcacggggaccagtggcgagctacctgacggcttaactacagataccctcccgacgaaagccgtggactcccagggtgcgtgcgtctgcttgtgtgtgggggtgttggcaggcggtccccataatcatcgaagagacaggtggatgaacctcaggcctcgcactcgggggctctcagagtctgggcgttacagccgctcccgtacactcacgggtcacctggctgaatcaggtgggatctgggtgaggtgccgggaggtctcccaggctggcgctcctgtccagctgctgggggaggcgtgggtgcgaggcttgggacaagggagagctatgccgggtggggaggacccttggggcgggtccgttcacctgaaatgttcactgctggaagagccgaaagccagccacggcacccaggggagtccagcgtggagaggcagagaggaggggcgaggacagtggcggtcgcagacggcggagcaagatcgccgagcgtgcgaatggaaaaatgagcattgtttcctcggagtagcttaaccaccatcccacgctgttttacagcagtgtaggaaatgtctctgctggtgacacaaaaataaacctgtgcatcagctctgagtagattatcgcgaattttacagcaggaaaccgcatcactatttttactactaaataaaccagtgcaattaaagtgcgcagggcgagagtaggtctgaggcgagaaaagaggagcgcgcccgcccagctcgagcctcaggcttgccctgtgctggaggcggcccgggggcaatcccgggagaatgctgcgagggctgtgagccaggaccccgactctgcaccgcgggagcgcgcgcgcgtgggtcccagcctccgagctgtgcaacaaccccgtggctagagtctccacgagaagacagagttcctggtcatcggtcgtttccgccttacactttcctacatttcctgaagattttgcaaatgggtatgcactgtttattatcttttcataaaacggtaagagcggcttctgggggctcctcacccagccggtccggcgttccttccctctcagcactgcgctctctcccgagccctccggctctaccaacctctgtgtcctgcccctgggcctcaagatttgcgcctttcttggactcccttgggaaggggcgcccaggctgcagaacggatggacgctcctgcctgctactcgagtggatcgagcagggaggcgctcattcggattccaggagaccagaggacacaggacatagggagcgtttaccctgtgtggagctacctgcggctgagaattagtggcagacgcggagatgggcagcggggacaagttgggcttgggagactataagaccttgagaatgggttcaagctgccagacggaaatccgccttttcggtgaatcgagccatgaagaacacaatcatgaaaagattcagcgagcaactggacagccggctcgttggtctaggggtatgattctcgctttgggtgcgagaggtcccgggttcaaatcccggacgagcccactttttcatttttttttttttccatttcaactgaagttcttcttgttcaaatcctggatgagccagctttttaaatttcaactaaattttgtgttaccttgacagttttgatcccgaaagatgtccagcggaggcatcaccaagatttccgggagtgctggggattggaaagaatcgtggataggagactaagcgagccgtcccggaagcaacagttgctgtgaagactttgggcacagacctgcacgtgagagtatgctcttgagggttgtgggggctctccttttacagctagggatcacttgtcgaacgtacccggagagtagctgctagcagacaatattatggcgacagaggtaggtgtgggtttccgtagtgtagtggtcatcacgttcgcctaacacgcgaaaggtccccggttcgaaaccgggcggaaacatgccacagtgttgtttgtttttttttcccccccctttcttttgagatggggtttcgctcttgttgcccaggctggagtgcaatggagtgatctcggctcacagcaacctccgcctcccaggttcaagccattctcctgcctcaggctccggagtagctgggattacaggcatgcgccaccacgcccggctaattttgtatttttagtagagacggagtttctccatgttggtcaggctggtctcgaactccggacctcaggtgatccgcccacctcggcctcccaaagcgctgggattacaggcgtgagccaccgcgcgcggccccgaagcggttattatctcattacacgctcttattacactggagactaacctagaagatcccactagtatgtccacctggtggtcacagcggcacaaagagaagagggcatctacgcttttgctttccattcccaaccacccgcacctgtgaactcaatccagttttacttgctgtggacaagctcggcacagagctcatccactggacagcggcacgctgccaaatggaaccccgcatctcgagtatgtgtggggcccattactccttttgtaacccataggggacaaaagtgacaaaactaccacaaactggcagcggtgggattcgaacccacgcccccgaagagactggagccttaatccagcgccttagaccgctcggccacgctacctctttgccgctgggtatttacatattttccttcagctatgaagcgtgcgaaggggctctgggccaacagggagttggggcgaatccacagggcaggaccatggcaggatccgctccgccaaagccactggctgggaaacggctccaccagtgccctgacacaggattctcaatgcccaggcctcaggatctgctttaggaaggccagtcataaagccaccctctttggggaatgcactccagagcaggggaagacttcgacactctcacttcaaaaaatcaaaaacaaatacaatgaaaaataaaataaaataaaaacctaaagaaaaacaagcaaaaaaccccagcctgggcaacatggcgaaaccctgtctctacaaaagatgtaaacattagccgggcgtgatggtgtgtgaccatagtcctagctactcaggaagctgagcccaggaggtcgaggctgcagtgagccgagatcgccccactgcactccagcctaggtgacagagcaagaccctgtaccaaaaccaatcaaacaaaaacaaaacaaaacaaacaaaaagccccaacaacaacaaagcagacaacaaactgagagtatgtattgactttatgagtcatgagcagaaacgttcttagcaacttcattcataataactcacttatggaaacagtccaaatgcccaccatcttcacattggataaataaaattgtgtacagtcttattttattttatttttttattatatatatagtcttatatgggattattataacactgataatgagcttactgctgcaaacagcatggacggatttcaccgtcatcaatgttgagcaaatgcagccagacaccaacgatctgcattctattgattccacatatgacattcacacacgagccaaactaatctatggtgacagaagttaaaaatcctgtcacttgggagaaggaggtgcaggtactgacttgcaagggacatgaggaattttttgtaatgctggaaatgttccttttcgatctggatgataggtacacacgtgtattcaattccatgcgcacttaagatctctgtacatatgaaatctttacacagtacagatatatctgtatgaaaattgtttcttaaaacatgactttcttagttggaaaggctattgttttagattttactggtgtgtaacaaattaccacacacttagtgtcttaagacagcacagatttattatctcgctttttgtggggtacaagttagcaaggtcttctactgataccgcagcaggtgacatcacaatgttggccattgctgcagcctcatctgaggcaggggggttctcttccagcctccctggttgttgacaaaatgcatttctttgtggctgtgggactgaaatctcctgtttgcttgttggctgtcagctgagggccactcttggcaaccagaggcccctttccttgaggccagcggtgcacggtgtttctggaactccaccttcgtttaaagggctcacctgattaagtcaggcccacccaggataatctcccttttgatttatcaaaatcaactgaccaggaacctcaatcacagctgcgcaatcctttgttccgtaaaatgtggcatggttgtgggagtgacatgccatcacgttcactcataggcaggtggtctacagggcgtgtgcgccgggtgggaatcttaggggccaccttcgagttctctctatgacagtttcaggccagagaaccaaatacggtagagcctcccagcagaaacgcctttccaagttccttacctgtctttgtatttgtaacttgttgaaagaagcccctgggaggggatgaggggtcctgtgcttcctcattgctgtgtggccacgctggcttcctgtgtccacttggcatcctcaggctaggtgggcatcccgttgtgttgcagagtgatcgggagacagaggccgcctctaccagcgctcagcccccgaggcgctcctggagcacgtgccaggctctgttcggtcccctccagcctgttctttcagttccggaggatttcctatttctacgtttagacactaaacctttttcattaacatgtgctcactgtggaataattagacacacctaagaagaaaaagtagagtaaatgagcttaaagaacataaaaagcgtcctcaaccatgccacacatattgctattattttgttttagagcttttaagactattttcatggatactttaacttatttgtcttatatttatatatatatatttttgaggcaggggttgggggtggtttacgcagtttagcccaacctgggctcaacctcctgtgctcgatccatcctcccgcctcagcctcctgagtagctgggattacaggcgtgtgccaccctactcagctcgacaagctatgttatttacttatttacatttacatatttatttatttttcaaacggggtcttgctctgtcacccaggttggactgtagtggcacaaacacagctcactgcagtctcgacctcctgggctccagcgattctcccacctcaggctccggagcagctagaaccacgggtgcgtaccaccacgcctggctaattttggtattttttgtagagacgagtttcgccatattgcccaggttgatctcgagctcctcttgcctaggcctcacaaactgctgggattgcaggagtgagccaccgcgcctggccgagctctttttttgttgttttttggtttttttgttttgttttgttttgtttttgtttttgtttttgagacggagtctcgctctgttgatcaggctggagtgcagtgatgcgatctcagctcactgcaagctccgcctcccgggttcacgccattctcctgcctcagcctcccgagtagctgggactagaggcgcccgccaccacgcccggctcatttttttgtgtttttagtagagacggggttgcaccgtgttagccaggatcgtctcgatcttctggcgtcatgatccacccgcctcagcctcccaaagtgctgggattacaggcgtgagccaccgcgcccggccccgagctatgttttaataagaatactttgcattgtgttttgtaacttgccttttaaaaagtacttaacttcgctggaaagattccatagtaaaaagaaaaagaaaaaaatactcaacaaaggtactgtgatgccactcattcctacattttatttttcgcctttatgaaattgtaaacaaagagccacaggccgcgctggggtaggggaggggtcgcccttcaaaacgccaccaggggaccccatggccgtgttttttgttaaccgttcacagctccctctaggaaccttcagatgctctatgatgagtgcagttttccgcgactctttcaaattcttgggtcgccgccgcacacgtgaccgctcgggggcgctcaggactccaccgcggcgcggctctggtcctggcgggggcgcgatgcaggctcggcgctgtgcagatcgcgccgcccagggtccctcgccccgggatctcggcgcgcaggtcttgcagcgccagacgcagcggagcccgggcccagggctgcaggaggagaggggacctgggcccgccggaactccctgtataccacaaccagaccgcagcaggattggtatcagcgggaagaagaaaacagcccacaacaccattttcattgttccagtgtttggaagaactctagatatctaagcagccactgttgttgaacatttagactcagattttttttttccccccattgcaagattatccttgtggctcaatctctgtataacatcataatgattatatagagaaataaatatctagtgtagttaatgggccaaaattctatatatttttttctttttttgagatggagtctcgctctgtcgccaggctggagtgcaatggcgtgatctccgctcactgcaagctccgcctcccaggttcaagcgattctcctgcctcagcctcccgaggagctgggactacaggcgcccgccaccgcgcctgtggtgtgtttttacgcctggtgtttttcacgcctggctaatttttgtatttttagtagagacggggtttcaccgtgttggtcaggctggtctcgatctcctgacctcgtgatccgcccgcctcggcctcccaaagtgctgggattacaggcgtgagcccccgcgcccggccgggattatcgtgttcttgcggctgagtggtgctctgctgcgcatccacctcggtgcctccgcccactcctgcaccgacggccgctgcctttgctcgcagatctgggctattgtgaacagcgctgcggtaaacgtggcggcacagacatctctcgggcaaaccgaggatgcgatacggatacttcctccgtcatttccactcccctttctccaggccctgaagctccgtctccacgcccgaactcgtggcctcccattccccaggcagcttctcccgaatgtcccctctcagaaaccggtgccagcgcgtccccgctgtgccacccccaagcccactgccaaccccgcacagttccgcgtccgccgtctcctctccctgcggtcgctgccacaccctctcgtccggtctcccatgcccccttatgctaccgcgtcgggcatgaaaacttccttttctttcttttcttctttttgttcaagacgtttccctctgtcacctaggccggagcgcagtgctgcgatcacggctcactgcagcctccacctcctaggctcaaatgagtctcttacctcagcctcccaagtagctgggactacaggcatatgccaccacacctggctgatttttattcttctatgtttcagtagaaatggggtctccgtacgttgtacaggctggtctgcaactgctgggttccggcgatcctcctgcctcagcgttccaagtctggtagttccttttcttatgtgctcagccccattagccaagcttaaagggacacatggacaaagctcaggattataatcagaaatagaacagggctgggtgcgtcggctcacacctgaagtcccagaacttttgggagggagaggtgggtggattgattgagtccaggtgtttgagaccagcctgggcaacataatgagaccttgtttctatttataaaaacgacaacaacaggagagacacttgccacgggtgacaggagaccaggagaaaaccagaaggagaatgtggagtcccagcatccgctgtcctgagagcctgagggcctcctccaggaactgcaccttcgcagggacccggcacttcgcactctctccccggacaccgcgggcggatgtgtgcacagacttaaggcccccaaaccctcttttagtggatgctgtggatgatttctcatcttagtgcacactctcataaaacacccgctcactaagatgaagacgttcttagttatgctcgtagcacagtcatgcccacctcatgcaagtcacatctgcagacttagtccctgattgcacgtctacctatgctgccacttgacctaattataggccacagtcagaaggaacctcttgctgttggcgccatctcctgcctgtaggcggaggtgaaggcctggccccgagaaggccgaaagattccctttcctaggaggcggggataacaggggatctgtgaatctgggtgggaacaatagcagaactcatgtttttcctaatcacgaactgaaagagggttttccattcagaaaggaggctgcaatccacagtagaattaacacgacctttattgctaatggaaatcacagatgcggctgaggcgggaggatcgcaggagccccagaggtggaggctgcagcgagccaaggttgtgccactgcactccagcctgggcagcagaggcagactctgtctcatacaccagcaaaacacaaagaaatcacaggtcctttcatatcacatgtcaaatcatagttcttgtaggcactttgaaatatcacttatgctcattagtacttaaaaattatggtaattgtcctggcagtgtgactcacagctgtaattccagctatttgggaggccaaggtatttgaatcgcttgaggccaggagtttgagaccagcaagggcaacatagggagaccccatctctacaaaaaatgcaaaatattagccagaaatggtggcatgcacctgtagccccaagtacttgagaggctgaggtgggaggatcccttcagcccaggaggtcatggctgcagtgagctaggttcttcccactgctctccagccttagcaacagagcaagaccctgtctcaaaaaaccaaaaccaaaaacaaacagaaagaaagcattattctgagaaggagtccataactttcaccagactggtagtccatggccacccatctttaaaagggctcagactcggctgggcgtggtggctcacacctgtaatctcagcactttgggaggctgaggcaggtggatcactggaggttaggagttcaagaccagcctgaccaacatggtgaaaccccgtctctactaaaaatacaaaaaattagccaggcatggtgatgggtgcctgtaatcccagctactcaggaggctgaggcaggagaatcacttgaacctgggagacagaggttgcagtgagctgagatgatgccactgcactccagcctgggcaaaaagagtgaaaccctgtctcaaaaaaaaaaaaaaaaaagcctcagagtcttgcaaatagtacaaaagagttgtgggtcaaaggtggaacatgaagtccccctttgataaatgagtgagtgactttcggagaaccaaaagccccacagatccaagagtagtcaagtagggctgctagaagagccccatgcttgtgagtcaggagggaggtgctggtggcctcatccagggcactgtcaggggacaggttggtgacagctgaggtgccacctgggactggccagggccagaggtgattgaacttttgcaacggatgtccccagctgagagtgaggactgtgcagggttggcttgttgaatcaatgaaggattattaccaatcatatattttctttccattcattcattcatttatttatgtgcctaactcctgtcccacatcctgtctaggtgctaaggggacaaaggttcctggcctcagcacactctcagattcacagggagacagaactgagactgagagctggttcctctccctctctcgtggggatacagtgagaaggcagctgggcagaaatcaggaagaggatccttaccaagaactgcagtgtgctgcaccctgatctagacttccagcctgcgaaactgtgagaaatcaatgtcattgtttgagcagcctggcatatggtattgtgttacagcaacccgaaccaagacaaaggttctcagctggggagacagaaactcatctggagcctgcactccccctggggaggggaagatgcctgtcgacctggacagagggcctggacagaggcagccctgggctgagttggcccttgcttgccgcttctccttgggagcactgggacaggatcccagaaggttccagaatgcatgtcaagcaagcagcagtccctgtggagtttggggtaacatgcacagaggaagaaatggcggaaaagcagcatcaggatggctttagggcagggagctgctggaaggtggcagacagagtgagcaggggcaggagatgggccagcgaggcacccgctgacatggaagtgccgtcatgcactgcacagcaaccttccaggcaaggagggacacgtgcatgacagtggtcccatgactatgatggagctgaagaattcctatggcctagggatgtcatagccgtggtactgtcgtagcacagacgtcactcgtgggagcgatgggctatgccacccagcctaggggtaaatgaggtgcaccttccaagagccacctaatcaccatttcccagaatgcatccttgttgttaaggggcccgtgactgtatgtcttgggaagcaacacgtgactgttgtcccgccctgcactgactgcccagcgagcgctcagaatgcattagatatggggtggacagaggaggaggacagcaccagcacccagacagcaacttcccttggaatcaccatttcctgaaccaggggatctccccagccacccacaccaaagcctaaactctcatacctcctctctctaaagcaggggtctgcaagctttctctgcaagggccacgtacagaatcttttcagttttgtcggaagtacccacgtctgcccttttggtgccaaagccagtaaaggtgacacataatgagagggaggcgccgtgtgccaatgggacgtgtgtgccaatgggacttgactcacagacaccaacatttgaatttcatctaatttttacatgtcatgaaatattattctttttatttttttaaccagtaaaaaatgttcttagctcgctgggctggagagaaataggttgcaggctggatttggcctgagggtagtttgctgaccaagggaaagggaaaaaaacaaacttgctctaacccacctctctccctccagtcccatgcagtcccactttccttatttttttattttttatttttattttattttatttttttgagacagggtcttgctctgtcgtccaggctggagtgcagtggcacgatctcagctcactgcaattctcctgcctcagcctcccaagtagctgggactacaggcgcccgccaccatgcccggctaattttttgtatttttagtagagatggggtttcaccatgttggccgggatggtcttgaactcctgacctcaggtgatccgcccacctcagcctcccaaagtgctgggattacaggcatgagacaccgtgcccggcttttattttttatttttgggtaaaaacaaaattatctccaccattaatttttcttccttttgacttggttttctattacacaggtaactctgttctctccactgaaacgccgccattaccatgtgctcaattcccaaacacattcgagtctctttattgattcagttccactccattgatcttcttggttcttcctgcaccaggaccaaagttattacagttaataatacatggaggcttatctttgtgcagatttctttgtaccgggattttcagaagactttcctagccctggaaggctggtgtaaaagaaaggtttctttcggccgggcacggcggctcacgcctgtaattccagcactttgggaggccgaggcgggcggatcacgaggtcaggagatcgagaccatcccggccaacatggtgaaaccccgtctctactaaaaatacaaaaaattagccgggcgtggtggcgggcgcctgtagtcccagctactcgggaggctgaggcaggagaatggcgtgaacccgggaggcggagcttgcagtgagctgagatcgcaccactgcactccagcctgggagacagagcaagactccgtctcaaaagaaaaaaaaaaaaataaataaataaataaataaataaataaagacaggcataagaaattataaaagtattattttggaactgataaatgtccatgaaatcttcacaatttatgttcagagattgcagtaaagaccggcgtaagaaattataaaagtattaattttgggaactgataaatgtccatgaaatcttcacaatttatgttcctctgctgcagctccagctgttccctccattcagggtccctgacttcctgccaccacgcccagctaatttgttgtgtttttagtagagacggggtttcactatgttggccaggctggtcttgaactcctgacctcaggtgatccgcccaccttcgcctcccaaagtgctgggattacaggcgtgagccaccgtgactggcaggagcggctttttaaagctgtcattggtgaagaagtaacagccactggttttgtctgggtgggatgtctggtgctttgtggctggtgcagtgagcttgcttccacccctgcttcggtgcagtgacgaagtggcctcgcgtggtctaatttaatctcggcctccgagtagccctgtccagggctgtattctgcggggctgcttatgtccagcaggctgtgagtgcccgttagcttccaaatggcaggggcttctctttaaaaacttatttttctcagaagttgtcatggtccttggttgctccccgtggccttgtgtccttgctttcctgggatagcctcaatgcaaaatattttcctctcatcgaccagaatgaactgctggcatttggatctgaaaatctacatcctataagaatattcctgatgctttttaaatgttatctgctctttgtttaagcaccttctacatgccaggtattcattcaaaatgaacttacgaactccatttttttttttttttttttttttgagaaggagtcttactctgtcacccaggctggagtgcagtggcgcgatcgcggctcactgaaacctccacctcccgggttgaagcgattctcctgccttagcaatcctgagtagctgagattacaggcaggcgcctgactcttttcattgagaatacaacacagtattattacctgtagtcactatgctatacaatagctctttagaacttttccatccagtctacctgaaacttcatagcctttgcccaacgtctccccatttctccgccatccctacaacccagcccacaagatcattgtaatagacacagaaacgcatttggcaaagtcatgttttttatgacaaaaaagaaattaaaaaactaagaatagaaggaaaattcctcaatttgataaagtacatttacagcagacttatagtgaacattattcttattgtcagaggcatttaaaccagagtgactccatcttgtataagggctgtgtaaaataaaaaaaggctgagacctactaggctgcattcctagtaagtctggtattctaagttacaggataagataggtcagcccaagatacaggtcataaagaccttggtgataagacagcatgcagtgcagaagccggccaaatcccatcaaaaccaagatggggataaaagctacctctggtcatcctcactgctcattacatgctaattataatgtattagcatgctaaagacactcccaccagcaccatgacagtttacagatgccatggcaatgccaggaagttaccctatatggtctaaaacaagaaggaacccccagttctaagaattgcccacccctttcctggaaaactgatgaataatccacccccttgtttagcatataatcaagnnnnnnnnnnnnnnnnnnnnnnnnnnnnnnnnnnnnnnnnnnnnnnnnnnnnnnnnnnnnnnnnnnnnnnnnnnnnnnnnnnnnnnnnnnnnnnnnnnnnnnnnnnnnnnnnnnnnnnnnnnnnnnnnnnnnnnnnnnnnnnnnnnnnnnnnnnnnnnnnnnnnnnnnnnnnnnnnnnnnnnnnnnnnnnnnnnnnnnnnnnnnnnnnnnnnnnnnnnnnnnnnnnnnnnnnnnnnnnnnnnnnnnnnnnnnnnnnnnnnnnnnnnnnnnnnnnnnnnnnnnnnnnnnnnnnnnnnnnnnnnnnnnnnnnnnnnnnnnnnnnnnnnnnnnnnnnnnnnnnnnnnnnnnnnnnnnnnnnnnnnnnnnnnnnnnnnnnnnnnnnnnnnnnnnnnnnnnnnnnnnnnnnnnnnnnnnnnnnnnnnnnnnnnnnnnnnnnnnnnnnnnnnnnnnnnnnatccaccccttgtttagcatataatcaagaaacagctataaaaatggacaacagcagccgttgggggctgttctccctgtggtagtagccattcttttattcctttattttctttctttcttttttcttttctttttttttttttttttttttggaaaggagtctcgctctgtcgcccgggctggagtgcagtggcgcgatctcggctcactgcaacctccgcctcccaggttcaagggattctcctgcctcagcctcccgagtagctgggactacaggtgcctgtcaccacgtccggctaatttttttgtattcttagtagagacggggtttcaccatgttagccaggatggtctcgatctcctgacctcatgatccacctgcctcggtctcccaaagtgctgggattacaggcgtgagcccccgcgcccggcctcctttattttcttaataaccttgctttcactttatgaacttcccgaattctttttttcggggggagatggagttttgctcttgtcacccaggttggagggcaatggtgtgatctcggctcactgcaacctccgccttcccgggttcaagcgattctccggcctcagcctcccaagtagtggggattacaggcatgcaccaccatgaccggatgacttttgtattattagtagagatggggtttcaccatgttgattaggctggtctcgaactcctgacttcaggtgatccacccacctcagcctctcaaagtgctgggattacaggcctccaaattctttcttgctcgagattcaagaatcctttcttggaatctggaatgggacctctttccagtaacattatggtgaaaaagcctccttaagctttggaagatgacaaggatatcaccctcaccatttgtatttcacggagtactggaggtgagaaaaggaagctaaaggcacaagacaggaaaagcagaagtaagacagtcattattagcagagaaaaatgatcctgtatgtagaaaaatcttgagtaatcttaaacaacaaaacagactgggcacagtagctcatgcctgtaatcccagcactttgggaggctgaggcaggaggatcacttgagcccaggagtttcttttcttttttctttttctttctttcttttttttatttatttattttttttgagacgcagtctctctctgtcgcccaggctggagtgcagtggcgccatctctgctcaccgcaagctccaactccccgggttcacgccattctcctgcctcagcctccggagtagctgggactacaggcgcccgccaccacgcccggccaattttgtttttgnnnnnnnnnnnnnnnnnnnntttgtttttgatttttagtagagacgggtattctggtaaccaggcaggagaatggcgtgaacccgggaggcggagcttgcagtgagccaagatcgcgccactgcactccagcctgggcgacagagcgagactccgtctcaaaaaataaataaataaataaataaataaataaaataaagctacagtaatcaagatgaatgttattggcatacagataggcatatagaccagtggaacagaactgagaatgcagaaacagaccttacgtttctggcctgttgatttttttctcttgatagtttaatatactttttattggccgggcacggtggctcacgcctgtaatcccagcactttgggaggccgagacgggtggatcatgaggtcaggagttcgagaccagcctaaccaacatggtgaaaccccgtctctactaaaaatacaaaaattagccgggcgtggtggtgtgcgcctgtgatctcagctacttgggaggctgaggcgggagcattgcttgaacccgggaggcggaggttgcagtgagccaagatcgtgtcattgcagcctggggcacagagtgagactttgcaggactacgcggcccggaactgacggggtctgccctggtttatttttttatctttctttaaagtaaagagtgcagaaggcttcccctcctctcacgccgcctccccaaagagggccaatgtgggtgactttctgactttcagagtggcccccaaagcaaattccgaggcctgcgcgtcgcgaatcttctctgctggggcgctggtggagccgtttcccagctggtgcctctggcccgcgaatcctgctggaaggcggtggttctgcgatgccctgtggattcgccccaacgccttgttggcccgggaaccctggggatgttttataaggaaggaaaagatgcaggtgaacccccggaggaaggtagcgtggccgagcggtctaaggcgctggattaaggctccagtctcttcggaggcgtgggttcgaatcccaccgctgccagcttgttgtggtttgcccattttgtcccccagttccttggaactctccctgggccgcacccttgctcgggatctggattccatttggcagcgcgcagctgtccagtggacgggctttgtgcgaagttcgtcggcgctggtgtccacagcaagtgaagtgggttcagttagtcccaggttccaatggttgaggcggaaaggcaaaggtataaatacccttgatagccttttttccttaaccaggtggagatagcggtggagtgttgtaggcaagtcctcagtgtaacaaatctgagataatgaggtaaaaagcagaaggaggtgtttccgcccggtttcgaaccggggacctttcgcgtgtgaggcgaacgtgataaccactacactacggaaacctgcatgggatgcctgtgccatcacaatgagccaccacacagggcggtattttatttctcatcataattcagagcttcctccatgcgtccctttgagctttgttaatgagcatgaacacacaaaaaaagcacgtttcagcacctggaaggctgaggcgggaggacggctggagcccgggaggtccacactgcactgagctatgattgcagcactgcactccagcctgggcgacagagcaagatcttgtctcgaaagagagaaaagaaagaaacaagaaaaggaagttttcatgtgcaatgtggtggcataagtggacacgggagtcttgagagaggatgtggcagcaacagtgggcacgggggttgaacagcaggggcgcgctggcaccattttcaaagagaagagacatttagaagaagctgcttggggaatatgaggacacgcgttcgtgagtagagctgaagttcgtgggtctggagaaattggagtggaatgaaagaggaagtagcctaaaacaccattgttattgttccattgtttggtagaactctagattttcctagcagccactgctgtcggacatttagggtaatttcctcccaccaacaatgtgcaagcgttatgaaggctacacccttggcaacatttggcacttttcattgattattacttttttaacttctagccatttatgggtatgtagtattccttatggtttaagtttgcattcagctgatgagaaaagatgggcactctttcatgggtttatggctcatgtgtttatcttactgtgtgaagtgtctctttaaatatcttgtccgttaaaaacgagcaaagaaaaaaacacataaacaaacagaaaaccccaagaaacaaaaaacaaagaactggtctggcgtggtggctcacacctgtaattccagaactctgggagggcgaggtgtgcgaattgtttgagctcatgagttgagaccagtctgggcaacactgggacatcatctctacagaacattcaaaaattagctgggagtggtggcgttcacctgcggtttctgtaggtactcgggaggctgaggtgagagtattgattgagcctgagagatggaggctgcagtgagcagagatctcggtgctgcactccagtctgggtaacagagcaagaccctgttccaagaaaaaaaaaaaaaaaaaaaaagactctcctatgtcttttttaattctggaaactcctaaatttcagcttgtctgtttaagtgtaaattctgtttcatataatttttctgttatggtatgagtttggaattaaggttaatttctttcccctatggatatccagctgctcctgaacccatttgttgcaaagacgctatttccacattgaattgctttggtgcctttggtgaaaatcaaataactgcatatatgtgggcccaaattctttttgttcattttttgctttttaattaaacatttcaaataggccaggcatggtggctcacccctgcaatcctagcgttttggtaggctgaggcaggaggattgtttgaggccaggagttggaaaccagccagtgcaacatagcaagaccacgtctctacaaaaaaaaaaaaaaaaaaaaaaagtttgctgggcatcaaggctgcagtgagctgtaatcacaccagggcactgctactggatgctactggatgacagagtgaatccctgtctccaaataaataaacaaataagtaaattaatacatctttgcattagatgaatatgccgttttgtttatccattcatcaaagaatgaacatttatgttgtttccaatttttttttttttttttttgagagagattctcactcttgtcactcaggctggagtacagaggtgccatcatagctcactacaatctccacctccttggttcaagtgatccttccacctcagcctcacaagcagctgggaccataggtgcacaccaccacacctggctaatttttgtattttttgtagagacttggtccctatgttgcccaggctggtctggaactcctggcctcaaagcagtccacccaccttggcctcccaaagtgttgggattgcaggcatgggacaccttgcctagcctttgtttccactttttcgctataatgaaaaatgataccatatatattttgtgtacattttttatgtgaaccaaggttttcaactcacttttatatatacctaggagtggaattgatggattgtatagtaaccctatgtttaactttttggtatagaaagtgaaacttgaaactagcaattccactaccaccatttatttatatgacatttccagaaaaggcagatgaaaacagagagaaagcagatcacttcttctgtaccactgaggccgagagccaggactggctgcagatgggcatgtcggaaatctttgtggtaacggaactgttttaagactggattgtggtgatggttgcagaatcctatgcggtgactaaaaatcattgagctgtaaacttacagtgagtggactttattgtattgaactgtgccccaataaagctgttatggaatgctaaaccataaaaacagacccccaaacacagcagcgaggcagttagtgttccccagggatcagctgagtgaccgttgcagtgtgcaaaatgattcctgtggcccagagcataattaatgtttacagaatgctttaatgcagccttggagagcaggtaacttgcaccttgaaacttgaagttcttgcttagtgttgcttgtaattaagctaaagtagttgtataaataatcaagatgtgagtaaatttacggagatgccaagtaaatgaagatgagcgaccaccgcgagactgaagctgggagggacgtgatggaagtcatccaatccaaaactgccggaatggagaccttgccaatggatgggtttaaaaaacgaaaagtgcatgttacagaaacgaaatgaggatccgtcataggatcgtttacggccaacactcaacaccggcacgtccacccagtaatgtgcgtctgcaggaggggccagtgtgtgctgctgtgttttgtgtgtcatgtgcaaagtcctggtccttgaggagatgggggcactggcttttattttccacagctgtctttttaaatctaggagagaaaagctgctgtcggcgagcgctcggggccgcaggagggtcgcggtgttgagtgtgctgggcctctgcaggggccgcctgggcgggtcagctcctgcgctggctgtcaaggtgcgagttacacaaccccgggaggggcggttcctcgtctgtagaatggggtgagagcagcgcctttcttacgggcgggtgaccagggtcagagcaattaacacccgcactagcactgggtacgactgaagaaacactcacggaatctacagctgtgccaaggcagctcagttccaggcccaggggacacagcacgaaggaaacaaaacgcacggatcctgctccccagaggggaagggtgggggtgaggaacaagggaagaccgaggccacacaggcggacaacggtggacggcactgcgcgatggagcggggcctccgcccagggagatgtggaagaggcggcgcgagggcgcacggggctgcaggggaaaggcgggtgcggggcctgcaggggccgagcaggaggctgggggaggattcattggaactcgccttgggccccacgcttgctcgggatctggattcccttggcagcgcgcagccgtccagtggacgggcttcgtgcgaagttcgtcggcgccgctgtccagggcaagtgaggtgggttcagttcttcccaggtgcctcagccgttgaggaaaggccacggtataaatacccttgatggccttttctccgtaaccaggtggagatagtggtggggtgttccaggctagttttcttgtaataaatttgaagtaatgagatgaaaagcataagagtctgtttccgcccggtttcgaaccggggacctttcgcgtgttaggcgaacgtgataaccactacactacggaaacttgcacgcgtttcctggcccaccacaatgagccaccacacaaggccgcattttatttctcatggtaattctgagcttcctccatgcgtcccttcgagcttggctaatgggcatgagcacacaagaaaaggacgtttcagcacttggaaggctgagatggatggacggctagattatccaagcagccactgctgttggacatgtaggttattttcctcccatcaaccatgtgaaagcgttatgaggctacctccttggccgcatttggtacttttcacctattacgatgattattttttaacttctagccattcttctgggtatgtagtatttcctcatggtttaagtttgcatttagctaatgaggaaagacgataagcactttttcatatgtatgactcattttttaaatcttcccttgtgaggtgtctcttaaatatctcttccattaaaagcaaagaaacaaaaaacaaacaaccaaaaaatccccaaaaaccaaaaacgaggaactgccctcgcgtgccaatttagaatctggcatcttaaaaaaaagaaagaaagaaagagaaaaaaccacgccaggcacggtagctcccgcctgtaatcccagcacagtggaaggcggaggtgggtacattgcttgagctcaggagtttgagactagcctgggcaatgtggcaaaaccccaggtctattttaaaaaaaagaagaagaaagaaagaaaaaggaaaacataaaacctaaagcaaaccaatttttcattttgaaacaattatagtttcacagaaagtggcaaagaaaactaaagggaggtctcaggcactggtctttcccagtgatgacgtcttacataattgtagcacggtaacaaaaccaggaaaacggcattggtacaatccacagagcttactgggacccctccagttatacatggattcgtgtgtgtgtgtgtgcgtgtatgtttctctacacagcaattttatcacgtgtagctccctgtgactatcaccgcaatcaggatacagaactgttccattatcacagccagcaccacactcttagagccacacacacccctacagcgtcccttgtcctccagttcctaactcctgacagccacgaatctgtttaatgtctctaaaaatttgttatgtcaagaatgttatacaaatgtaataatacagcccgtggcctctagcaactggcttttttcatttagcataattcccttgagatccactctaattgtatcaatacagtaattcatttatttttattgatgagtagcatttcaagctataaatattccacagtttgtttaatcatccaccaggtgaaagtttgcattgttttcagtttggctattatattgcttttctctgagataaatggttgaatgcaattgctaggtcatatgctcagtgcatttttagtttctgaagaaatgaccaatctattttcagagtggctgtgtcttttcacatttctacgagccttctatgagatttggtttctttgcgctcttgctggcattgatgttatctcatttttttgagacaccggcagggggcagtagaggtggggagtagggggactgcccgggcaggggtaaggggagggtcgcactgtgcttcccaggctgctcttgaactcccgggctcaagtgatcctcccgcctcagcttctgggatggctgagatcacagcttgcacaactacgcctggctgttttttaattttagccgttccaataggtgtatagtgatagctccctttcgtcttaatttgcatttcctgaatggctagtgctgttggacaccttatgtacttatttggtaccttcatttccctttctatataatgtctcctcatgtttttgcccattttctaaatggatttttttctctttttagaaattgtaataaaatatacacaacataaattgccatttcaacagtttgaaatgtacatgtcaatagcattaagtacattcacattcttatgtaatcatcaccactagcctcaatgttttaatcatcccatatagaaacagtatagtcattaaacaacaactccctgttccttcctcacccagccccagtaactcctgctcttctatccctgtgaatctgaccacactattcctcataagtggaatcacaccatatttgctgttttgtgtctggcttacttcagtctgtgtaagattaaaggttcatccatgttgtagcatatgtccggacttcattcctttttaaggctgagtcatagcccatcatgtgtatacactacattttctttatccactcaattattcgatggacattttggttgttttcaccttttggctgttgtgaataatgctgctatgaacactgctgtacaaatatcttttccactccctgcttttaattcttttgtgtttatacccagaagtagaatttctggatcatatggtaattctgtttaaagttttgagggaccgtaaaactattttctacagtggctgtatcattttacaatcctgtcattaactcacaagggttccaattcgttcacgttctcaccaacatttggttatttcctgtttttctgaaaatagccatgttaatgactgtgaggtggtatcttcttgtggttttgatttgcatttccctgatgattaatgatgctgagcatctttccatgtgcttatccccatttctatatcttctttgaagaactgtctattctactcttttgtcctctattttattgtttgtttgtttgttttgagatggagtctcgctttgtgacccaggctggagttcagcggtgcaatctcgggtcattgcaacctccgcctcccgggttcaagcaattctcctgcctcagcctcccgggtagctgggactacaggcacgtgccaccacgaccagctaatttctgtacttttagtagagacagggtttcaccatattggccaggctggtctcgaactcctggcctcaagtgatccacccactttggcctcccaaaatgctgggattacaggcgtcagccacagtgcatattttaattgggttatttattttttgttgttgagttgtgggagtttttcacatattctagatattcatcagttatcagtcacgtaatttgctagcagtttctcccattatgtgggttgcctttttgctccgttaatagtatgctttcatgtaccagttggttgaatgttttttgttttttggggtttttttgagatgaaatctcaaagtgagctgcccacctaggcctcccaaagtgctgggatgacaggcgtgagccaccgcgcctggcctgttgagtgtttagtcacgagagggtgttgaattttgtccaatactttttccgcgtcaattgcatttatcgtgttctttccttctttcactcttttaatatgtaggattttttctcagtgctgagttttgattattctttatatagcccagctacaagtcctttgtcaaatatgtcctttgcaaatattttcttttcaagtagtttttgttttgtgttgtttttgtgttttgagacatagtctcactccgtcgcccaggctggagtgcagtggtgccgtctcagctcactgcaacctacaccacccgcgttcaagcaattctcctgcctcagcctcccaaatggctgggattacaagcctgcaccaccacacccggctaatttttgtatatttagtagagaccgggtttcgccatgttggtcaggctggtctggaactcctgacctcaagggatctgcccacctcagcctcccaaagtgctgggattacaagcgtcagccacgcaccatgcttcaagtagtttttgataaaagtgcaaaagcaatacaatggagaaaggatcgtgttttcaacaaacagtgctggagcagccataggccaaactaatgaaccttagccaagcctcacagctgagacaaaaatgaacccaaaggagatcatgggctttaatgtcagatttaaaactatacaacttcaaaaagacataggagaaaatctagacctagagctgggtgaagagttctttgacttgacaccaaacaggaaaaaaaaaaaggtgagttggacctcaccacaaacaaacacttctctgtgaagactctgtcaggattagaagatgtttttgaagtaaaacaaaagatctggagaatcatgggtacttttgcaagagcaatgctctttagccgtacacctgaaaattctggtgtcagagcttaaccaacctctactcaggaacacagttcacagcaaaaaaaaaaaaaaaaaaaaaagggaatggatgtacagggttttctctctgctctttttttgagacggagtctcgctctgtcgcccaggctggagtgcagtggtgcgatctcggctcactgcaagctccgcctcccgggttcatgccattctcctgcctcagcctcccgagtagctgggactacaggcgccgccacctcgcccggctaattttttgtatttttagtagagacggggtttcaccatgttagccaggatggtctcgatctcctgacctcgtgatccgcccgcctcggcctcccaaagtgctgggattacaggcgtgagccaccgctcttggccggccctggtttgtttatctttctttaaagtgagagggtagaaggcttccccagcactcacgccggctccccaaagagggccgatgtgggtgactttgagtgaccccccaaagcagatcccgaggcctgcgcttctcgaatcttctccgccagggcgctggtggagccgtttcccagccggtgcctctggcccagcgaatcgtactgcaaggcggtggttctgcaatgccctgtggattcgccccaacgccttgttggcccggggaccctagcgatgttgtataaagaaaggaaatatgtaagtatacggccaggagaaagatagcaaggccgagcggtctaaggctccggattaaggcgccggtgtcttcggaggcatgggttcgaattccacctctgccaacttgttgtgatttctccattttgtccccccatgggttgcaaaaggaggattcattggaactcgccttgggccccacgcatgctcgggatctggattccacttggcagcgcgcagccgtccagtggacgggctttgtgcgaagttcgtcggcgccgctgtccagggcaagtgaggtgggttcagttcttcccaggtgcctcaaccgttgaggaaaggcaacggtataaatacccttgatggccttttctccgtaaccaggtggagatagtggtggggtgttccaggctagttttcttgtaataaatttgaagtaatgagatgaaaagcataagattctgtttccgcccggtttcgaaccggggacctttcgcgtgttaggcgaacgtgataaccactacactacggaaacttgcacgcgttttctggcccaccacaataagccaccacacaaggccgcattttatttctcatggtaattctgagcttcctccatgcgtcccttcgagcttggctaatgggcatgagcacacaagaaaaggacgtttcagcacttggaaggctgagatggatggacggctggagcccaggaggtcgaggctgcagtaagctatgattgcgccactgcactccagcctggaagacagagcaagactcagtctcgaaagagagaaaagaaagaaaaagggagagagagagagagaagcaagaaaaggaagttttcatgcccgatgtggtggcataagcgggcatgggagtcctgacagaaggtgtggtggcgacctcagagagacgtgaggcagtcgagctgtctggggttgacagtgggcctgggggttgaacagcaggggcgcgctggcagcgttttctaagagaagagactttcagaagaagctgcttggggaatatgaggccatgcgttcgtgagtggagctggagcttgtgtgcctggagaaactggagtggaatgaaagaggaagtagcccacaacaccatttttattgttccattgtttggtagagctctagattatccaagcagccactgctgttggacatgtaggttattttcctcccatcaaccatgtgaaagcgttatgaggctacctccttggcagcatttggtacttttcacctattacgatgattattttttaacttctagccattcttctgggtatgtagtatttcctcatggtttaagtttgcatttagctgatgaggaaagacgataagcactttttcatgtgtatgactcatttttttaatcttcctttgtgaggtgtctcttaaatatctcttccattaaaaacaaagaaacagaaaacaaacatccaaaaaatcccccaaaacaaaaaacagaggaactggcctcgcctggtggctgacacctgtaattccatcactttgggaggccgaggcagatgggttatttgaaccgatgagttcaaggccagtctgggcaacatattgggacatcatctctacagaaaatcccaaaattagccaggagtggtggcacacacctgaagtttctgtagctactcgggaggctaaggtgggagtatgggttgagcctgggagtttgaggctggagtaagcagagatgtcactgctgcactgctgccaggacaacagagcaagaccctgttccaaacacacacacacacacacacacacacacacacacaccccaaacatgtgtccgcacatggtctttcgtctgtgcacatgtacccgtgatggccctgtgtgtccacatttcctcctcttataaggacacctgtcagattggattggggtccaccctagtgacctcattttagtgtgaccacctctttaaaagccctatgtccaatacagtcacattctgagggaaagagggttggagtgctaagatggattttgagggaaacataattccaccacagtaagacctttcaggcctgagatctccaggtgaacagaacggcagggtccaaactgcaaagggaggctacggggggtttcaaaagtgtcacctttaggctagaggtgggaggaagtgatcttctggggctgcttggctggttgttccaatgcgtccaggaggagaaaccgggttggcgctgcctttgccgctttggaaggccattcggattcatttccagtgttacacatttctggaagtgatgcatacccaggccctgggcacagtttggggacccactctgtgaccacaggccagccactcccatctctgagcctgttttcacatcaacaagatgagagggtgaatgagatgatctctaaggttcctgctggctctaaactctcagctttcctgtcactgagtttcgccctgtttctaagatttctgctgaatatcctgcccttcagcagagtgagtgaaagccaagataaagagccagttttctgggatgtccttcttacaggtggagaaggtggcccatgtgacagagatggggcactcacccccaaacgcctcccagcatcccccccggcatagctcttcttcctacctctttgaccccctagagccttgggcctggggcacagcaggagctcacagctgtctgtcatcagagtcattccaccgctggctcagctgctctgggctggggcaaagctggccactgtctcagaaggacccacatggtgtcccagaagacagggagggccttgggaagactgggccctgcttactcgtctcaggacagagtctgggtaagttggccagaaaagccattgtcatcatttgagctgccccaaagataagagctcaaggagcaaaagtgcagattggtataaactgtcacagtgtcctggagggggcctctgaggtcagttggacaaatgcccacagtgtcttctggggaaaccaggagttgaaggctgtgctgcctgtgggcctccccctctgctgtagtctctggagggaggagtgggtgaggaggttcctaatctgggtcctatctggaacctctttcctcctgactctaggtcctgagtttaagacaccggttttcccctctcagcaggggccaactggactcctgcattcatttccgctcaggattggtctgcacaaggcccttctttagcctttaaacttatccatgcctttaggctcatttatctgttccctgctatgcacacactcagtcatccccacccccatgtctgctgtgtgagcagggctgtgcttgccagggcacctgggtctgtgaggctgcgggcgcctctagatcatcaatctcggcctcgtctcctttttccccactggaatctctcggctcatccacatggctgcccatccccaatgacgatgctcgtcctggccccatccccaatgacgatgctcgtcctggccccacccccagtgacgatgctcgtcctggccccacccccagtgacgatgctcgtcctggccccacccccaacgacgatgctcgtcctggccccacccccaacgacgatgctcgtcctggccccacccccaacgacgatgctcgtcctggccccacccccaacgacgatgctcgtcctggcccaccccaacgacgatgctcgtcctggccccacccccaacgacgatgctcgtcctggccccacccccaacgacgatgctcgtcctggccccacccccaacgacgatgctcgtcctggcccacccccaacgacgatgctcgtcctggccccacccccagtgacgatgctcgtcctggcccacccccaacgacgatgctcgtcctggccccacccccaacgacgatgctcgtcctggccccacccccaacgacgatgctcgtcctggccccacccccaacgacgatgctcgtcctggccccacccccagtgacgatgctcgtcctggccccacccccagtgacgatgctcgtcctggccccacccccagtgacgatgctcgtcctggccccacccccagtgacgatgctcgtcctggccccacccccagtgacgatgctcgtcctggccccacccccaatgacgatgcacgacctggccccagccctgggggtttcttggggacatcctaggtgtgatctcactgggtctgggctgcctctcctcactgcctcctaggaagccccaccgcctgctcactcttcagtcatcaggctctggctgcgtcgcccacactttcggaaccagcctctcccctcaccgcccggggcccttccttcgccttctgaaacagcctccccggccctgcacctagtgtgggtttgggcaaagcccctgcatccttctgagctcagggcctgccacaggccaaagccttggccacccccgacgctgccccctgctccctgcatttctgtgctggaggggctgtgagcgtgcgctaccatggccagggtgctattatttcactctgccatgtgtggagtgtggggtgtcaccctcgggtgtcagctcaggaccacacaggccctgggacagggatgatgggagcacggttgccagctccagggaggcccagacctgcctgcctgggtcaccctcatgtacgtcccagtctgttagtgaccacagtgggtcttcgggagacaggcagacctcccacacccctgaaagttgggcctgggggatggctgtgggttagagaggagggcctcgcccacagggacctcgggccatgggcacttccccgctgcagcctctgccctgcagcaccccctggctctgggtgtggcttttgaggtccccacaatcacacccatcctctgcctgcaggtgttccccaccaccctcccatgagccccttccctgcacctcccccaggccgtcctcagcggggcctctgctgatcttctccgcagtcagtaggagctcccacggggtcctcctgggccgacctgtgctgccgccacgcacctcactctctttactgttgccagccccctgcagtccatactgttattatccccatgtgacagatgaggacaccgaggcacagagaggctggcagccttgccaagggcagcaggagggaggctggaatagtctggaccccactccgctctctttttcacctacactagatctgtctgtatggccacatccctggctatttcagcccaatacgatggcacaggtcacttaaataaaaaagaaaacaaaccaataaacaaacataagcgcctgcacctgccccatgctgtctgtgctttctcctctggttgggatcgtggctctctgctgccctcctgtggccgttggttttcctgggtggggaagggtgctggcctcattcacaacagcagatcctcattcctccagggtcaggctatggggctcaacgtgatcaggacagatctgagccccgtggttatggagatgccagcttagctttcatacgtgacacaaacacatacacagtctttccaaatggaggtgtagagcaatttttaaatttaaaattcatgttttatttttaattgttctagagatggggtttcgctatgttgcccaggctggtctcaaactcctgggctcaagtgatcctcctgccttggcttcccaaagtgctgggattacagacatgagaaaccctgtccagctgaaatggaacatttctaatctgtagagataggatctctctgagttgccctggctggggtgcagtgacactgcagcgtcagactcccgggctcaagtgatcctcccaccttggcctccccattatcagctgggattataggaatgagccaccatgcctggcttcaagcaattttttatattcacacacacacacaaaacattgacctaactgattgcaatgaagatttgtcacatctatgccccaaaatcacccaataaaatgaacagacaacttgatgggaaaggatttggtaaggtagttggcaaaaaaaaaaactggccttgagcattttaaactgttaattataaaaaatgtcaggcatacacaaaagtgaagcaagtaacaaaaactcccatgtcccctggcaagattcttgcttcttttactctcctgtgctttcacatgttttctttttattttttgtttatttatttatttacttatttattttcgagacaggcttctgctctgtggcccaggctggagtgcagtggcatgatcatgggtcattgcagcctcagcctcctaagctcaagcaatccttccgcctcagcctccctaggaactcagcctcccaagtaaccacgcccggctgatttttgtattttttgtagagatggggtttcaccatgttgcccaggttggtctccaactgctgagctcaagcaatcctcccaccttggccttggcctcccaaagtgcttggattacagatgtgagccaccgcacctgccccccccacatgtatttcctctctatattattttcttacaaatctctaacaattacacatctctaagtttgcagttgctcacactgagactagttatgcaactcttgtttcataaggagcattgattagtgaactgaagtgtgtgcctggacataagaggaccctgtggaacctttttgtgacatggaacttaccacatttctgggtgctagtggcgttcagtagataattttcaatggaattccctggtccttgtgcgggaaatgaattaaggacatcaagcctatgccaatgaaatgcaattaaaatgaaataggaatttccccatcatgggactagataaggtaaaggctggtgaaacttttgcttgggtgattatgatccaaaattctgcatcacggaagggggctggattaagtttgctctaaattttcttccagtctaggggttcagtggctatagataaagagttgtggttgaaacactcaaggtacttacgggttgaagggtgcaaaatcccagagaaatctgagtgggcatgaggttaatcagggatgcttcctggaagagaagaatttggggcaaatagaaatgtgtacaaggcaaaaagatatgatgaaaatgaggagaatacacagaaagatatttgatattatagagcttaaattaatttggtaggttgggcattacctaagtgatatcagcaagtggtcacagaatacactaagatccatctacacagtggaaaatcttgcagccccgtgactaaggaaagttacttctattttcaccagtccttggagacaccttttcaggcaattaaacccccaagggaaggagcctcctccgaagttgtttgctcatctcagctgcgctgacaaaccagtctttcccatggggaggtgaagaagaaaactggacgatgaggcagggacttaccgatttgagccctagcttcctctcctgtaaaatgggcataatattttcaccacagaatgtttcctgtgagaattaagctgagtggacaatctaaagtcaaccacggtaggccctgggtgccacttccctccacctctccaaagcctgaagcccagcaaacacctccctggggtttagtctaatcctcaggaccagttctggcctcttttctctccgccttcaatggagataatttttttccatgaaaagagaattttactgcaaataggacaggtacagagcttggaaggatggatacaagtcctgcaaatagttcacactgaaattctgaaaataggttttcaaatagcagatgaaattctgtcaccatgctccagtcttcattccccgaaggggaaggagttcagccagttttctccttacagaagctgagctgacacagagcagcacacactgctaggacgtggtgaggagacagcaggcttgggggatttccactgaatacacaagcaagcatgtctctaccctgtccctcattatctcaaagacaacttgtatgcttttaatacgtctttatgaagtttccagtgtgaggagtagacattctctaaagagaactataaaggcttattttctgtcatctgtaagttgttcatttaagaccctagggttgggctacaactgttgtgagacatcatataaacatcatgcaggtgggatctacgtctacacatagatcacagagcgaagtctcccacagagtaagcacagaataaaacattagcaaggagagttaggaggctcagctcaacgtcttcttctagtagaagtaattccaattttaaataatgagtgacagcaatcccaatgtcttatttctgcacagtgctgatttacaatgtcctatattcattttcaatgtatagtgtaaaataattagtacacaaaagattgggaggaaaagttgtttcttcatcagataaaaagtactgatgttggctgtgcgtggtggctcacgcctgtaatctcagcactctggaaggtggattgcttgagtccaggagttcgagaccagcctgggcaacatagtaaaacattgtctctacaacaatagtggatcccttactaaaaaattagtcaggtgtggggcacgcacctgtaatcccagctactcaggaggctgagttggagactcacctgagcccaggagatcaaggctgctataagccgagattgtgtcactgcactctagcctgggtgacagagtaagaactgaaagaaaaagaaagaaagagaaagaggaagagaaagaaagaacgaaagaaagaacagaaagaaagaaagaaagaaagaaagaaagaaagaactgatgtagtgtttaaaaagaccttccaagtctgagggtgtcacaatcatcataattcatgaggaaaccaagactgaaaatgagagaattattaacccgacatccctggagctaagagatggcagagccaggcactggatgccctgggttcagtgctggctgccgatcctgcagcggtccagccccttcctcagtgcccccatcacctccctgttcctcaagctgtaaatgagggggttgagcatgggagtaaggaccgtgtagaagatagaggccaccttgtcatggctgggggcccggtagtgcctaggcctcaggtagatgaacatggctgccccatagaagagggtgacagctgtcaggtgggaggagcaggtggccagggcctttttccaggcctgagcagagtgcatttgcagcacagtccctagaatgcgagcataggaggccacgatgatggagaatgggaagagaagcatgaagacacagcaagcaaatatcaccttctcaaacagggatgtgtctacacaggccagcttcaacaaggatagcatctcacagaagaaatggttcaccttcctcaagccacagtaggggaaattcattactaccaccatctggatcaagccatcgattatcccaaaggcccaggagctcccagtaatctggagacagaccctctgattcatgaggatgggatagtgaagtgggtggctaatggccacatagcggtcataagccatgagtcccagcaagagcccctcagatcccacaagacagacaaagaggccaatttgtatgccacagcccacaaaggagatggacttcctgccagacaggaagttggctgccatctttggcacattggtacagaccaacatgaggtccatgagggagagctggctgaggaagaagtacatgggggtgtgaaggtgagggtccatgtagatgaggaagatgaggaggacattcccacagagggccactgtgaagaccgccataaccacggagaagaggacaaggtcagcagtactgtgggagaagatgcctaagaggaagaagccatctgtgtaggactggttcacccacgtctccatggctcggttgttgctcctggtcacctgagaatatggacaagatgtgttacattgactgacatctctttatagacctctgctgctatgtcttcagtcagctgtgttgtgtgcaactcattagatctcaacaactgaagctttgggacataataggggacactccatatctccctaacacagcggtgggggccctcctggctcctagaattggactgtgtttatgtgctgtatgtatccttaccacaaagagaagaactgagttgtttcatgtgtcagagaccttcggacaacccccttcagcaggcaaagtcttggctgtaccatatgacaccgagtcttttttttttttttttgagatggagtcttgctcagtcgcccaggctggagtgcagtggcgagatctctgctcactgcaacctcccgctccagggttcacgccattctcctgcctcagcctcccgagtagctgggactacaggcgcccgccaccacgcccagctaatttttttgtatttttagtagagacggggtttcaccgtgttaggcaggatgctctcgatctcctgaccttgtgatccacccgcctcggcctcccaaagtgctgggattacaggtgtgagccaccgcgcccggccgataccgaatcttttacctgggatcacatggacttgggaaacaatgtttaacggggccgggaccatttcattcccaggagataattcatgtgtgctgtagaaaggaagggaagaaacaggagttgctcctcagtctggagtctctctctatgttctgagagttttctcatgcttaccactctattatgttcagactacagggaaaggatgttctcctgttgtgccccacatgagaaaggaagagttgcgatggacggtgtcattgtcagtcataccgcgagtgacaggaagtcacagggccaatgaggtgaagcaatgacttggtgcccaagagtcttaagaacagtgaggtttcagttatgctggggcttagaaaataatcccttagtcagggcttcagtagaagaggctggcacatcagtataggtaatacctgcttcctaagttatctttagtagaaatcaaagtgccttctttatgagatccttgtaactgatatacttcactgggatttctgagtcatttcctcactgcttcatcaaagtttcaatggatttatttggagcctgctaataaagaggggtttcccttgatatttagccaagaattattttgtgtttttgtgtttttgagacagggtctccctctgtcacccaggctggggtgcagtggtgtgatctcggctcattgcaacctccgcctcctgggatcaagccatcctgtcacctcagcctcccataggtgcctgccaccatgccaggctaactttttttttctatttttattagagatggggtgttgccatcttgcccgagctggtctcgagctcctgagcccaagcgatccgcctgacgtggcctcccaaagtgctgggattacaggtgtgagccaccatgtcctgccaaacaatttgtcctaaacaccttagtatcgagaggcaccagagacatgatatgattttacacggacaaagccaagtcaggaaatcacatcatgtatattaaaaaagacaaagcatccttgacggtagaatatctgaagccaaggcaaataacagaacagatcattataaacaacaagcggaaaacatcaccgtattccgactctgagtctgttatcactggcgtcacgctctcacccggctgagccttgtcttcgccctccaaggagttcccagttttccttaggccttttcatgttctatttctcatttgcctccttccgatttgtttgtccctttagccatccgggcctgcaccgtcaggcaccatcactgtaagtagcgcagcactgcagtgcttccccgcttttcctcccttaactttgtatgagtttcctactgctttgtaacaaatagctccaacactgagcagcttaaaacagaataacacatatttgttatctcatggttcctgtgggccagggatccagtgaagctcatctgggtgcctccggcctgaggcctctcctgaggctctggttcagctgttggcaccttgttccctcctcgcaggtgcctcaccacgtggccattgcctcctgccagggcaagtgatcctccagagagtggaaggaaatcgccctagagaggagtggggtattttgtgacctcacatcagaagtcacatcccttcagctctgcgtattctgtttttagacgtgagtcactaatcatcaccgaggttgtccctggaattcagcatgtccggaaatgcaatgctgattttcctctagggttggggaattgcgtttacactaaccaactcacaagtcaggaacttactaaccacaggagagtgtgcgtccacctgtaacgagagctgcatctcacaggacaccaatgccgctcttcagcaaaagcatctccagttgttcagagttcagacaagaaggctgtttggtgagccaagagtcagagaaaaaggaactggaagctcctaactgagaaattttacaagataaggcggcttaccccctcaggatattttccccaggaacagcctgatctaaagttaagtttccagaacggacattcaaagactctttgtcaatcttggttctgcatttactaaacatgggctgtgcagccagcttctcagagcctccgtttcctcctttgtaagggggtccattttaataaccactgtacctttattgcaggatcactatgaggccaaaaggaaaatggatgtgagtactgtggctgggacactgaatgtgatttttctgagtgtgtgctgcctgtcactagagccccgcctcttctcagcagatcggagatagacggataaacccaaagcctttgatttttttttttttttttttgagacagggcctcgctctgtctcccagactggagcacagtggcatgatcagctcaccgcagtcttgagctctttgactcaagagatcctcctcactcagcctcctgagtggctggtactacaggcgcacaccaccacacctagctaattttttatttttcatagagacagggttttgaacgccttgcatcagctgatctttccgcgtcagcctcccggtaatgccaaagccgtcatgggatcccagacgcccctcccagccccagcttcaactgcaaatttcctacagaacatatacagctgcgtgtcttgctgacacctcagacagaaaacaaccaagcagtatttttcagctgcgcgccctacaaaagtcatgtcccctcctctcatcttattaatgctgatgtccttaagggctcagctcaagtccacttttgccacgaagggcccccacctgaccccaccagacgatcccttcccatgcacgtggcacctctttggcacaatgcatgtgctgctgagggctgcagctggggtcagtacagcctcctgattggtccctggcttcacccagcagactgagggcgaaggcatcgcctgcaacttaagccagatggtgtcagtcttgtgctcaggatatgccactggctcccaacacactcccagcaagggccaacgcccttccaggatccccccacttcccctcccgcagctgtctgccctcacccctgactctggatgtctcatctgccaggcccttttattattattttcttcctggagcacgccagatgcatctgaccttagggcctttcctgctccctctgcacggagcatcttccccacttgtctacaccctccttcaggtctcccccacgtgtcttctgctcattgagaactttgctgcaaagcgccccaggctgccctccttccctgcttgctttcactccacagctctcatcactgcctgatactctgcatgcttacttatctgtggggcttttttcctgttgtcgagacagggtggtccagggtggggtgcggtggtgcagtcaaggctctcactgtaagtcgcacctcctgggctcaagtaatcctcccacctcagctgcccgagtagctgggaccacaagtgcgcaccatcgtgctcggctaattttttaattttttgtggcgatgggggtctccttatgtttcccaggctggtcttgaactcctgatctcaagcaatcctcccacctcggcctcccaaagtgctgggattccaggcgtgagccactgcacctggccctgtgggttctgaatcatctgctctattccactggctgagtgtcctgagaacagcagctcctggtctggtttgctctctgctctgtctctaagatggtcccactgtgatactcagttgcgtgctgagtaaaacaataccatgaagtgaaatgcagctgcagtttccatgttccgaaagcagaggatttcccctttactgaggggagctttctcctgacctgagcgtagcagaggccagtgctagcttccttcccatgcagaactgtgactgccagcgcatgtcttcagtttacaaaagacaagggtgagaggctcaaataccagacagttgcatgcaggtgtattcaggtacttttctcgctgcaaagacaaaatgaggccattccacaggacatgttctttgtgcaaagagctggagtaatgtcctcaactcttatgcgcctgcccaggtgcagagccttggatttagccacttgagctgtgttccacagagcggagcacgtcctgacttgtgccctagaagatgtgcccaggggtccttgccagcaacaacacctacgtatgatgtggtgggggttttctatagaagcaaactgctgttctcacagtcttcaaacaccatcttggtcataggggcccgaggcccaaccaaccagcaaaacaaaccaggtcccccagaaattcacagcagaagttccccttcctgtctgcacatgcccagccctactaccgtgttcagaggcacaggccacctgcaccttcaaagacatgcattgtctctatttctgattctctctctctttctctgtccatctctctcttcctttcactccgtgtttacatttccatgtttcttcagaaatgcttatagcacatttacgtaacaagtgactctctctatttctttgcaaaaactgaaaatagacagaaaactggaaagggcatctgaagccatgggcccaagacccagccctgctgccagttactgtgggccgtgtccatctctctgtgaccctgcagacatagctgtgtcctccgcggaaggaagataattgtggtatacctgtgagcctctgacgagggaggttctgtggggcttccaggacaggttctgcagaggtaacttgtgcaatgctatgtgagtcactaaagacatttgtctccctatccgggatggcttctttgaactcagattcttacacccgctgtgtactcagcatccccccagatggccagtggggctgttctgcctgaagtggccaaacagagctgttggtctgccctggagaaacacttgtcctgtcctccttcccagcttggttgaagacaggtctgtccagctgcccaggtcacagcactcaggttattctggagtcctctcctctcacacacacatcccaaccattggaaacccctgctggctcttcttccaaaacatatccaccccacatatccacccctgaccctcactcacccctgccagcccccgcctggccacatgatctttgcagcctccctggaggatggcattgatccccaagtggacttgcctcctaagtcctctctagtcccccaccccaggctactgtcacatagcactggggtggacccacccctgcaaaaataaagccaaacaacttccagaggaaatgcaagacctcatccgcaggccatccgtcatcacccagacctcctttccttctgctctccccagagctctgtggactcctggatccctggcctccctgcgggattccctcacacagcaggacaaggccaaggccaatccaagggcctcggtccttgccctcacctccgtgcagaaggctcttcccagacaggccctgccttgttccctcacctcctcctcgccttcttggcaaggcctcccttcagcacccatttagagttgaaatccttcctcctccctccccttcccatcttggctcccacagcacacaaagccaggaggcgggctccatgctctccacgaagacactttctcctgctttcccaactaggacccatgttccccggcacgtctggtgctcgtggggggatccctggctcctggaccagtgcctggcatctattgtgctctcagtaaccacgtgattaatgaataatgattgttttatgaaatacaactgaatttattcttgcatctcactggctcattttcctgctctctaacttcagacctttctgctgggtgtttagctaatggctttactttttttcctagaaaccacaacatggaagaagaaactgtctctgcaatattctcctggggatgagaggaccccgtcccacatcagccccctccttcctatcccttcaccttcgcactccccacacatccatccttgtcttcctgcggtggaccactctccaccccagggacctagagcccagtctccaacccagacagagggagggggacaggaaaaggggagtaagacaccaaggatcgagagagggaagtgggtcaaaggaacaagacgagaagagtgaggagagacatcacaccagaaggcggatgcccccccaaaaatccaaacaattacaccctgatggaggcagacagtaggaggaagaacaagtgctgatgaacaagacaaatggggacgtgaaccagcaacgggagcaggagctgcagggaagagagaggggacgacaggacaagaccctcactcacctgtgggtgggtccctgcaggggaacaaactcagcagagtcacctgtggaggagttcctagcatcagagccatgcactcatcctcctgtttttgctcccactgggtcaggggacaggaggagccgcagccccaacctccttcctcagcccgcaccgactactcatcgggctgtggagcccacggcaccctcagcctccagtggcccctcaggctcagagagcgaggctcacacagaccacagcctcctctcagagggagaaacaggctcagggaaggagctggtgctggcaggagaggtggagccaggagcagtgccctgagcccacccaggattcccacctgcctccaggacaccctggctctggccaggttccagaaccgcctcccactgcccacataggtactgaacccagacacggggtgaggaggggaagctgacttcagacctcagctcccaggggaccccacagactccagccctggaagaggtgctcccaagattacaattaaaaagacccacagagggacctggggacaggaacaggagcagggccagtggggacagcgtgaggaaacccagctgggggaggaaggatgcagggcacaggaatacatgcctgaaacctgaatatctgagacaggtctcagttaatttagaaagtttattttgcgaagattgaagacatgcacccatgacacagcctcaggaggtcctgacaacatgtgcccaaggtggtcagaacacagtctggttttatgcattttagggggacatgagccctcaatcaacatttgtaagatgaacatctgtttggtctggaaaggctggacgactctaagtgaggacgcagcttccaggtcacaggtagataagagacaaatggctgcatgcttttgagattctgatgagcctctccaaaggaggcaaccatatatgcatttatctcagtgagcagaggggcgactttgaatagaatgggaggctggtttgccctaagcagttctcagcttgacttttccctttagctttgtgattttagggccccaggagaaagcattttagaagaaaacgagtctctggtctcaggttttgtcttatctctcatggctgggatggtttattcttagataggtaggtcctgagttattaggaaagctcattttgagcaggttgtgaagtctcatgttctatgaagagaaaatagggggaggaaggggggaaaacaacaagaaatgaaagaatagccctggaaaattaatataggccacattaccctgaagtccatacatcagtaggcaggtatgagagtggtttatgtatgtaaataagttgctgttattttcttctgaagtttacgttgtctggcttcagtttgcagggctttatgaaggcacagcttagttttcagtgactccaaattaggaaaaatgagacaaaaaagaaaaaaaaatagaaaacattattttgaaaacttgtagccaagaaaaattaaaattcattccaaactgtagagaataataaaaattgaaaaacattagacatgactggaagctaacgagtgtactatagtttttgaaacgtaatttgttttctccccagtttcccatttttactaaagacaaatcgtggcaggattgatttgctttaatatacttggccggattatttgtatacagcatagcaataataataataataataataataataataataataataataattttattattacttttgagacagagtctcactctgttgcccaggctggagtgaagtggcatgcttttggctcactgcaacctccgcctcccgggttcaagcgattctcctgcttcagcctcctgagtagctgggattacaggtgtgtgccacatacctggctaatttttgtatttttagtagagacgagatttcaccatgttggccaggctggtctcaaactcctgacctgaagtgatcatccaccttggcctcccaaagtgctggaattataggcttgactcactgtgcttggcctgaataattatgttttacataggtttataaattgactttgatggaactttgttccatagaaggaatctcagataagactttttaaagccaagcccagtcatagatttgtatcatcaaatacctatgagttgggtgaattcctctcctcttgaggtcccaagataaaacttggggctcctgggaatgtcagaaagtgacattctttacttaccacagatcaggaaccctgtacagggactgtgtagacaaggtatgagggcggttttcccagaaggcttttattggctctataagtcaagtttgattccttaaaggaaaacacaccattccagtcaaacctttgggaaaataaccagtttcttcaattgcatcctgttacaaatgaaaacaggatcttactacatgtatgcaaataactgtattgacataagttaataatactcacaaatagtttccaaattctggagaattcaggtagagagaaacaaacatgctccaaattttatttataggagtatactaacttgttaaaagctgccaacagctcaaaagaaaagtttccttgattctgaaaaaaaccaaacaaaggatcagcaacgttttaagcaaaaagtcagaaagattacttcagtctcttattagttcagtccatgcagttaattctggttctgcttgatattcatctcagccctccatgagtcctgaaagttttccctctattctgatgtcacactcccaaagttatcagacacctgcatttaagagcacctgttagagttttatagctgattataaaaccaccttctagagaggatcaaaacaagacaagagttgtctgtggatgacaaaaagtttcagagcagtcatagtcaaagacacaatcgacatggaaatttattacctctgtggcacgttaacataacaattgtaactattactgataatgcacaccaagtcatatcataattataggagtttcccataattttggaacacatactaataacatatttatacaaatacagcccaaagaaaaccaaacaccatttcatatttgataatgcttcttgtataatttttataccaaataagccaaataatgtcatctttggacttagggaacctaatacattagaggattacttaggtcacaaatatacataattaataatttaatttagaaaagtttgtcaactatcaaaggtttaaaacacttgatatcacaggtcatttaaaataggatccttaagcaacaacttcccaggagaggctcttgaaactccacaaagtaaacagaacaccccaaaaggggtgagcggtgcctttgctctgcatcctttaaaggggttcaagtcatgagaagccttctttagattttttggtactgcagaaggcaaagggggtaggaggtatagggtgaagaaaagtaaattaaagaacatttattttatttctgtttatttctattttttattttttattttttttgagatggagtctcactctgtcacccaggctggagtgcagtagcacgatctcagctcactgcaacctccgcctccctggttcaagcgattctcctgcctcagcctcctgagtagctgggattacaggtgcgcatcaccacgcctggccaatttttgtacttttagtagagacgtagtttcatcatgttggtcaagctggtctcgaactcctgaccttgtgatccgcccacctcagcctcccaaagtgctgggattacaggcgtgagccactgcacccagccaagaacatttatttttttaagacggaaagcaaacacagaaaccaagctcatttgtgttttgttttgttttgttttgtttttgctttgctttttcctcttttgcagctgcaaggagttttagcctaattagagaggctttgttaccaaccataatttggaattctcactcggatttgatgaagtcaggtagagttggtcaaatctgatgggagaaagaccagaacaaacaacaacaacaacaaatcccaacaataagatcactcagtgctgtaatgggaagaagaaattcagaccagctggtcattaaacattagccaagacaaaactattcagctacttacctagggatgggtctgaggctgtagactgctttctaccatcctagaagcaggaaaaacaactggaactcatcttcccttctgggagtgagctcaaactccataaaggagttacgtgccttccatcttcagggaagcaggagatcttgccttccttgttggaagcaagtgaaattccaaaaaaggggagttgttcaggaaaataaactttagatcttgacctttagatcaggaaaaaaactttagattttgggagatcagggattctctggaggaggtactctcagacctcagcaagttgtcctattggtttgagccataaagttggctcatgctggtcccaagcaccgataggagatctgtcaaaggtcaggggcatctccactcagaatcccactgtggttaccaaaacgtgaaccccaaatatctgagacaatcttggttaatttagaaagtttattttgccaagattcaggacgtgcacccgtgatacagcctcaggaggtcctgagaagtggccaaggtggtcagggcacagtttgattttatgcattttagaagacatgagacgtcaatcagcatatgtaaaaaatgaacattggcttggtctggagaggcagggcaactcaaagcaaaggcaggacaactcgaagtggggagggggcttccagctcatgggtaaataagagaaaaatggttgcatttttttgagttcctgatgagcctctccaaaggaggcactcagaagatgcatcagagggctgactttgaatagaatgggaggcaggtttgccctaagcagttcctagcttgacttttccgtttagcttagtgatcttagggccccaggatttattttcctttcacacaggaatgcagaggatattcttggtgttctacaggatccccacattcagcacttcccagtgagccccagcgccctcatggggtctccatctcatacctcatgggagggaaagaacagcaccacatccagaggagtcgggtggaggcatgtgggcctcggtcatcacaaaccctgacaggcatttctgcagggccagtgccttcgtgggttgctggggagagggctgaggtgcacggttccgatgctgccacccgtgcaggcacaggctgcactgcctttcactctcaagagtgaccgtaaaggtcactctgtgcttggctttatgtctcctggaaatagatctcttttcaaaatggcaaattcattggaaactcaatggcggaatcaccaactcatcagttccttttaactgtttggttttattttactggtttccttttattttcacaacagcaataaagcgtgtttcacctgccattcaaagctactgggggcttcagctggagacaaaaccacagagaacctcagtcagatcagagggctgaggggagacggattgtggggagaggggccagtgtagggagtggacgctgaggacctaggaaaacaggccttggtcatgctggttccagggacagcaaagcgggctttacagaatctccctacaatgccagcctccctctgtccgagcctccctctgggccatccctccacagccagctgctctgcccttggtctgtgcaggggcctggtgtttcccctccacactttcgatcaagctgttctcccccgggaacttactttgcctctctgtctcctcctactgaaacttaaccaatctacagagaaacatctaaagctcccctttactcttccgaccttccaaagactccatccacagcccctcctctgctgtgagctcctccatgacaacacagatgagcctggaggactctacactcagtgaaataagccaggcccagaaggataaattccacacatctcactcgtatctagaatctaaaacacactcatgaaggcagagcatacaaaggcggatcacaggctggggctcgggggcctggggagattttggtgaaagagtatacacagtttcagttaggagggatacatttttgagatctatctcacagcacggtgactatagttaataatatgtattgtatgctttgaaattgctaagaaagtagattcctgatgttctcatcattagatgtggatgttgaccttagtgtacacagaccccagttcagtttggtacgaataattttaaaatatcctcccaaaagaaagtccaagaccaaatggcttcagtgatacattctaccataaatttagggaggaaacaataacagtcttccagggatgttttaaaaagggagtggagactcttcccacgactcttcccgctcattctgtgaggacagcataactttctagccaacacatggcaaggatgttacaagaagggaaagttacaggccattttctctcatgaatatagatacaaaaatcttaagcagcaaaatattagctaatcgacgacagtgatatataaaaagaatattacacaacaaaagttgtattaattccatgaatgttatggtggtttaacatgaaaaaaccaatccgtgtaaatgttgtaagcacagccaggatttgtgtgaatcaggtgtggttagacgcacagacacataagtgcctgtcgtgggggaagacgtttgcacactcacagattccccagaaacaggagtaaggcaccccaggcatggccacatggggatgtagcagggtcctttaggaggcagagggagctgggaaacatgggctgagcctgtgttgtggtttctgtggggaggaatgggcaaggcagggcaagaagggttaggacctgccagtctgagtaatttctgtgggctctgggacataggggcagttcctcgctgttggtacctgccctggggtgagtagggcaggtgcacagggtccagaatatgagagcccagtaaggaggcagctggggcctgggctctgggttggttggtctgcagaggaaaggtgagctcgagagcatctgtgactgtgtctgagaatgagccagcctgggaggggcggtccttccaggatcagtaaggccccagtgtgtccaggcaccaaatgcagaaaacaaaaaagcatgattaacacagtaaatcaaaatatgagcagtagaaaaggggaaaacatgatcttctcaaaggatgcagaaatgccatttagtgacgttcaacacccattcacaatcaagcttatagtaagctagggatggaaaacaacttctattttccactgcctatacttttgtgtacacttgagattttccttaataaatgtttaaagttgcttatgcatctagaataagactaataaagatgtgcaaagagcccatgccacaaaacattgctgagggaaatcacagaagctcaatggagggatagatcatattcatgggtttcgacactccacgttgtaagaatgtccgttctcaccaaaacggtctgtaggtccaacgcagctgcaatcaaaatccctgcagaacttttgtagaaattgcttattctgaaaactgtataaacatgtaaatagccaggtagagtcaagatgatcttaaagaaaatagaagttaccagatagtaagatttatttttaaaacacagcatttaagagagttggtattgccacaaagataggcagtagacaaaatagaaaaaagaatctaggaacacatactctattttatagaacaaagtattgcctgattaaacaaaataaaagaaaaaaagaaagaaaagagagtcaaaaagcaaccagcttgaagccaaactagttagaaataatagtgaccatcgccaaggactctttcggcaccatgccagacaccgtgataagagagctgcgtggtcttctcactcactcccccagccatgacagggccattacaatccccacttaacagaccacttaacagactaccccacttaacagactactatctatatagtgactatatgctactatgaacagactactatctatatactactatccccacttaacagactactatctatagagtaactatatgctactatgaacagactactatctatatagtaactatatactgctatgaacagactactatctatagagtaactatatactgctatgaacagactactatctatatactactatccccacttaacagactactatctatatagtgactatatgctactattaacagactactgtgtatatactactatccccacttaacagactactatctatatagtaactatatactactatgaacagactactatctatatagtgactatatgctactatgaacagactactatctatatactactatccccacttaacagactactatctatagagtaactatatactactatgaacagactactatctatatgctactatccccacttaacagactactatctatatagtgactatatgctactatgaacagactactatctatatactactatccccacttaacagactgctatctatagagtaactatatactactatgaacagactactatctatagagtaactatatactactatgaacagactactatctatagagtaactatatactgctatgaacagactactatctatatactactatccccacttaacagactactatctatagagtaactatatactgctattaacaggctactatctatatagtaactatctactgctatgaacagactactatctatatactactatccccacttaacagactactatctatatactactatccccacttaacagactactatctatatagtaactatatgctactattaacagactactatctatatagtgactatatgctactattaacagactactatctatatactactatccccacttaacagactactgtctatggagtgactatatactgctatgaacagactactatctatatgctactatccccacttaacagactactatctatatagtgactatatgctactattaacagactactatctatatactactatccccacttaacagactactatctatagagtaactatatactgctattaacagactactatctatatagtaactatctactgctatgaacagactactatctatatactactatccccacttaacagactactatctatatagtaactatatgctactattaacagactactatctatatagtgactatatgctactattaacagactactatctatatactactatccccacttaacagactactgtctatgtagtgactatatactgctatgaacagactactatctatatgctactatccccacttaacagactactatctgtatagtaactatatgctactattaacagactactatctatatgctactatccccactcaacagaccccactttctgggccagaggcacagaaaggcaggtgagataaagcagtttgctcggccacacagctgccagtggtggagctgcagtccacatccaggtagtctgactggagagctaatggttaacaatttcagatactgacaagtgctatgaagaaaacaaaacattctacttgaggagcgtttacttaaaaaaaaaacaaaataaaataaaatggggtcattcatgtgccaggaagaggctggtgagggagcctccggagaactgtacatcaagagcatccccaagggtgactcattaggatcaacatccagtggggctgagagcagcagcagcgagtgttatctcagagacagacccacagcaagacaggagatgtgcacaggtcacagaccggcctaggggaaggagatgggccagccctcagtctcaccctctgctggttcccagctgctacttcaggatttgctacctcagggctgggcacagcagggaggagagtgagcagagggaaatgaagagtctcatggggctgacccccttgggtctttggagttgcccagccaaatgttggtcttcattccaaagactctgtgtgtgagctctcccgggcccccatctgccacgcaccatccccacaaggtggacggccctcagcttttcaatggccctgctgggctggccagcctggactctcagaccaccagcctgaaagatttgatcaaatatgcctgtatcatttaccaagaaactctaccccgctatgtatcatatttaaaagccagcttcattatgtgctatttttttttctggactcttatttctgtggctggagtacacggtaggttcaagctctctttcaagatggcttaagcccagccagcatctggggtagccacttagctctcaggaagcaccgcccacgtccctccgtgggctcccctttcactccaccatccagacagctccagccaccctctcacactcaggtctccctaagcaagcgtcgaggagcggttcctgtgacccctcgtaattcccaggcccctccacaggcctgagagtgtgtgggatgcacaccgcctgacacctccctcaggaagtccaggttctacaagtctcagctgtatggcactccttctgacctgtcgcatctttgttttctctctttttcaaaatatgttaaaattttcattgtggtttcttatttaactcctgggttatctagaagattattacctcatttctgggtgtatgtgttttctaattattctcttcattaattaactcctagcttaatcagaacctgatcagatttaagtgctctaaaatattttgggacttgatttatggcccagtgtgtgatcagttttggcacctgttctgtgtgcactcggagaaaatgtgtgttttgtagtagttgggtgcaattttctatagatgtccacagatcaatttgctactcaaattcttcaaattttctatatccttactgatattttagttaccttgttctaaaataactaagacaattgtgctaaaatctcacattatttttgtgaacttgtctatttccactttttttttttttttttgagacggagtctcgctgtgtcgcccaggctggagtgcagtggcgcgatctcagctcactgcaagctccgtctcccgggttcacgccattctcttgcctcagcctcccgagtagctgggactacaggcgccccccaccacaccggctaattttttgtatttttagtacagacagggtttcactgtgttagccaggatggtctcgatctcctgaccttgtgatctgcacacctcaaccttccaaagtgctgggattataggcgtgagcccccgtgtctggcctatttccacttttagttccgtcaaatttccctttgtatatttgaggttatatatgtacatgtgtatatacatattgttgctgtatcttcttggagggttgatccttttgtgaaatacctttttttccagtttagcttaatgcttttacgtctgctttgcctgaatttagcattgacttcatcacatttgttgttattgttggctgggtatgtatttgtccctccttttgttttatacctgttaatatcctaaattttaagagcaaatattaatattttttaaaaaattgagcctgatatcttcatctctttttttttttgagatggagtcacgcctgattacaggcatgagccactgtgcctggcccatctcttatttgatgtatttagtccatttacatttaatgtacatgtaatgtctggatcagtttgccagggctaacttatcatagtaccacagacgaagtggcttaaacaatagaaatttattttctcagaaggaaacaagtcaatttggattagggcccaccctaagagcctcattttaatttaatcacctccattacacccatcaccaaatatagtcacatttggaggtactgaggattagggcttcaatatgtaaattttgagggatataattaagctcataccaatatctgatatatttaggtttaaatccataatcttactatttgatttttacttgtcctactttgcttatctttctctccctgccttttttgggggcacttaggagaggaactaagaaagtgatatttggtcaggtgcggtggctcatgcctgtcatctcagcactttggaaggtcgaagcaggaggatgacttgactctaggagtttgagaccagcttggctaacatggtgaaaccccctctctacttaaaatacaaaaattagctgggcggtgatgcaggcctataatcccagctactcaggaagctgaggcaggagaatcacttgagtccaggaggtggaggttgcagtgagctgagatcgtaccactgcactcactccagcctgggggacagagcgagactctgtctcaaagaaaaaaggtggtatttgccatttatttcttctttctctaataacttagttattttctttattcttcaagtggcgacctggaaattacaagccacatacctcacttactggtgcctcatataaagatgtatttttgctacttcctggctttcacgaggaccttagaacgcgttagttccccaccactccgccttctttgtcgttgtttttatgcagttagattccacacatatctcaaaccccacgcagcctcactaacctgatttgatattgtcaatatgcagatggattcactcacacatttaccctttctgttgttctccagacccctcttcgcatgtccatcctctgggatcattttccttctgcttctgcttgtagaattccttttagggttttgtattttgctctttgttttggttccttttttcatttttgtggttttgttttgttttggtgcaaatcttctgacagaaaatactctaaaagtttttgtttgcatgaattcatctttatttgccttcatcttaaaataatatttctgttggaactataattctatgtgggcagtaattttattccaagacgttaagggtgccatgttagctttcatcactgttgtgtgtgtgtgtgtgtgtgtgtgtgtgttgaaaagcctgctgttagtcttcttgttgcagtgtgtgtgtgtgtgtgtgtgtgtgtgtgtgttgaaaagcctgctgttagtcttcttgttgcactttttaatgtactttgttttttcttctggatactgctaacacttttctgtttgttttgcttctcagctgtaatgctgtggtgagcctagcttggacttctttgtattcttcttgctattagttaacagagtttcttaatctgtgacttgatctctttcatcactttaaaaaattgctccacccatatttttttctttcttttctttctttttttttttaattgagacagggtctcactcttttgcccaggctggagtgcagtgacacaatcttggctcactgcagcctcagcctcctgtgcttaagtgatcctcctgcctcagtctcccaagcagctgggtccacaggtgcccaccactgcacctggctaatttttaaattttttgtagagatggggtctctctattttgcccaggctggtctccaactcctggcctcaagtgatcctcatgccttggcctcccaaagtgctgagattacaggcatcagccatgagacctggcttttaccacccctcggcttccatctatatcttttaaaaatattgtttccatcctgttctttcctgcccctctacttttgggactccagcagcactgaagtgagaccttgctatgcccgtgtgtttctcaccctcccttccatggtttgtattctcttctctctgtgtttcagccttggttttgtctgttgacctcttactcagttcactaactatctgtgtctaaactattgccaaatctatctattgagttgtttatttagtttttgatactttcagttctagagtttcgttttattcttttcaaaggttacaggtgtctggtgaaattatccgtcttggtttttttctctcgagcatcgtgataacagttaatttaaagctcatgaatggcaacgccagtctggatctcctttaagtttgtttcttttttgtctttttgaatttggtcattttatcctgtccctagaatgcctggtaattttttcttgaatggcagacaaatgatgcgaataatctgaagctgtgggtaatatccttttcttctagagaagatttaccgttccttatgtggggcagctggatgagcagctggtttccttaagccagtctgtggctgatgcgtgtgaacctgtggctgatccgcgtgaagctgggttcagtctttgtgagaattctctatttctgattaataattactcttagtgtgtagtgttcctggggtcctagctggaggtcagggtgtttttgaggtctctaaacccaatttcttccctcccagatctgtgagatgacaagaggcttcgctcagcttcccagcctctgggccctgtgccagggatgagtcagcaaatgcctggagaggaaaagcaccacccaatgtccagctcagccgagaacacatccccgggtctcagacccttgagtcgtggctgtttccgcatctttataatcacttataaaatatttcatttttagattttatccaatttctccaattgttcttatcatgaaagttgttcttatacaaactagtccacagtggctgaaatttttttactttttgatataattttgatttttaattgtatgaaacatgtactgaagtccaattataaaataaagcacacttacagatgtgtagttttagcgaggagtggcggctcttgcctgtaatcccagcactttgggaggctgaggagggtgactgcttgaagccagaagtttgagaccagcctgggcaacatagcaagactcatctctacaaaaaattaaagaatcacccgggtgtggtggcatgctcctggggtcctagctgctcaggggctgaggcaggaggatctctggagctcaggagagtgcccttgcctcaggagttggaggctgcagtgagccatgttggcactgctgcactccagcctgggccacagagcaagaccctgtctcttaaaagaaaaaaaaaacctagtttctgtctctgtctcgtacacacatttcttccctcctgctatgtggaaccgtatttattagtttgcaattatccttttatagttgattttgaaaatgtaaaaaacaaccttgtccatagatttcctcctttctcacggcagaagcagcaggctgtgttctgttctgcaccatgctttttccctccttacctcctgaagatccctccagtgtagaagaagaaacacttgatgttctttttacagtcgtacggcactctgttatgtggatacattacagtttactcaaccagtgtggagtgaccttccaggttcttgttatagagcattttagacacacctaaaacctggaagcatcgtataatgaacttctctgcactcaccacccggtgctggcaattggcagctcagggtcaacaccgttccgtctactccccacccacctctccctctccccttcacaactggattatctacaaataagtttcagaaatcacatagtttcctcagtaaatacatcagtgggtttctctaaaatatcaagaataaaacataataataggatgagcgtttaagaagaattcttaacagagaaacatcaataatgacatttcctggacatttatgtgacagctgctgctttcattttagtacaaaaattaggggaggttgaaaatttgaatgtcctagacaataatttttttttttgagacagggtctggctctgttgcccaggctgaagtgcaggggtgtgatctcagctcactgcagccctgacctcatgggcttaaatgatcctcccacctcagcctccagagtagctgggaccacagacacgcaccaccgtgccagattaaacatttttaaattaagatactcatgtaaaagacagtgcttctatttatgcagggcagttctccaaataaatcagttcagacatcctagtaacttatttgagaaaaacggacatttcaaagagtatccccacctcccttaaaatctgaaaggacacataatatgattgctgttagcagactcttctcccttctctactgtgggactccaagccccaagttagtcttgatttaggctgtgtcaaggggaccaacactgaattgaatgtgagattcaaattttgattttcaatggactggattttagaatatataaatgagccttcgtcttaccacccaaagtcaccagaaaactcttgatctgcatgagatgtcatgaagatgtggagaatgaattgtgatgtcttatttaaaagcagtggctgtacaaaaataaaagtgtttccttgtttgcacatgatcaaaagttccccctgaataatacgataaaaggcaatacaagagctgtcagcaggccatggacatacgctgccagagtgtagacaggaagccatggccggcggaggtcatggtggattgagttccggaggaatctgaatggaggtgggcttgagctcggtcttggggaattagataaggctgaagagtaacagaggaagaagacagaggaagtgccggtggggagaagtggctggagaaaaagtgtgagtgtggaaagcgttgggtgcataggaggatagaggagaaggccggtgtgggagaggagtgggagacgctgcaggtccagtcctcaaaagccagcctgccccactccagctgcgaggtggccattcccttcctccctagtctacctctctctgccccggtcttcctgtgtctccctcatggcctcctcgcctgcatgttcctcagactcctgccatagctggaagctggatcaggaagagggcacacaccaaaagtgtggtagcaaagacacacaaggaagtcgagattcagaaggaacaaacgcctctggtgtctgagccatgtggcaaggggatttcaagcacattggcccctgagaaaatggcctgcttccatgggacataaatagccacagagtgaccataaaatgcatcctccgatgtgaaatgctcttgagagtaaaaggcagtggcagcatcagaaccgtggacttcagccccatccccagcagcccacgaagacactgaccctgcagaaacgcctgtcaggtttatgaggatcccaaccaggcccccaggctccacccgactctcgtgaaggtggggctgttctttccctcccacgaggctgtagaccccttgagcaaggactgtgtccagagccccccacccagtgctttgcatgtcacgggtgatgtaggctgacttaatgggggcaggtgaaggacaggtgtggggtgcagcgagggcccaagggacagctgtgacatggagaccccatgagggccctggaggtcgctgggaagtgctgatgtgtgtgtgggggggcaatgtagggcaccaagaatgtcctccgcattcctgtattcctctgccctgcgttcctcctcccccagctgggtttcctcacgctgtccccactggccctgctcctgttcctgtccccaggtccctctgtgggtctttttaattgtaatcttgggagcacctcttccagggctggagtctgtggggtcccctgggagctgaggtctgaagtcagcttcccctcctcaccccgtgtctgggttcagtacctgtgtgggcagtgggaggcggttctgccacctggccagagccagggtgtcctggaggcaggtgggaatcctgggtgggctcagggcactgctcctggctccacctctcctgccagcaccagctccttccctgagcctgtttctccctctgagaggaggctgtggtctgtgtgagccttgctctctgagcctgaggggccactggaggctgagggtgccgtgggctccacaacccgatgagtagtcggtgcgggctgaggaaggaggttggggctgcagctcctcctgtcccccgacccagtgggagcaaacacaggaggatgagtgcatggctctgacgctaggaactcctccacaggtgactctgctgagtttgttcccctgcagggacccacccacaggtgagtgagggtcttgtcctgtcgtcccctctctcttccctgcagctcctgctcccattgctggttcacgtccccatttatcttgttcatcagcacttgctcttcctcctgctgtctgcctccatcagggtgtaactgtttcgtgtgggtgtttggaggggcatccgtcttctggtgtgatgtttctcctcactctttcttctcgttctcttcctttgacccacctctctctctttccttggtgtcctactccccttttcccgtccccctccctctgtctgggttggagactgggctctaggtccctggggtggaggatggtccacagcaggaagacaaggacagatgtgtggggagtgcgaaggtgaaggagcaggaaggagggggctgatgtgggacggggtcctcccgtgccggggagaatattgcagagatgcagtggcttcttctatgttgtggtttctaggaagaaaagtgaagccattaactaaacacccaacggaaaggtctgaaattagagagcaggaagataagccagtgagaggcaagaataaattctgttgtgtttcataatacaattttttttttctgagacaggatcttgccgtctgtgtcctgagaggcacaagtggctggtgcctctgaacatggtggtaaggctgggagaccgttcttctgctggggcatctggtgtattttgctggttgatatggctgagagggtgcttggtcgctgtgggaacagatttgctcctgtagaaaccccctccaaatcacacaatgtcatagctctatcattcaggctggagtgcagtggtgtgatcgtagctcactgcagcctcaaattcctaggctcaagtgatctgcctcagtcttccaagtaactggaactacaggtgcacaccaccacgcccaggtaatgttttattttatttttattttggagacaaagctcgctctgtcacccaggctggagtgcagtggcgtgaacatagatcactgccagcttgaactttcaggctcaaacgatccttccacctcagccacctgagtagctgggactacagatgtgtgccacaatagcctggctaattttctctgttttttgaatagagatgaggtctcgtttatgttgcccaggctggtctcaaactcctacctcgagctatccttctgcctcagcctttcaaagttttggaattacaggtgtgagccagggtacttggccaacaaaatttttatgcattcaacaaatattgactgagctcataacagatgtgccagaccctgttccgggagccagggatcccaccacgagcacccgtggcaccggggaacacgggttctagttgggaaagcagagaacagacacccacatgagcagcctggggcctgccttgcatatatgcctgctgtgggaaccaaggcagggaagggaggcagaagaagaaggatttcagctctaaatgggtgctgagggaaggctttgctgagaaggcgaggaggaggtgagggagcaaggcagggccagtctgggaagagccttctgcacggaggtgagagaaagtgtccaggccccctggagctggccttgtcctgccgtgtgggagcagctccaggaggcagggagaccggcatggagggaatcccgggagagtggaaggaaaggcgtgggtggtggtggagggctgctgatgagtcttgcatttcctctggaagtactttggctttattcttgcagagatgggtccaccccaggactacgtgacaaatagaccaggttgggctggggtgtgccagcgtagactgggaggcaaatgcagttggggccgttgccatcctccagggacactctagaggtggtgtggccaggtgggagctggcagggatgcgtgctggctggggggtatgttttgcaaggggagccagcaggggtttctgatgtttggggcgtgtgtgtgtttgtgtgtgtgtgtgaggagaggacaggagtccaggatgatgcgagtgttgtgacctgtcaatctggacagatctgccactcactgagctgagagcgggagaacaggcgtttctccaggggagagcaggtggtctgtttggccacttcgggtggaacaagcccgtgacacagctgaggggagaggttgagtgcacagtgggtgtaagagtctgagtgcaaaggaaccatgcaggatggagggagaagtggcatcagtcaaccatgcagtattgtagtttaagagactgggggaggggggagtgggacgtgcatgtcctgggaggtgcctgtggctggtgcctctggacacggtggtagggctgggcatcccttcttctgctgggggatctgggggaacctggtttgtttcgctgctgggtggaacctgcggctggtgtggctgagatggtgcttggtcgctgtgggaatagatctctcctgtagaaatcccctccacatcactccaggggtcatcagtggcaaggaccccgggaactccctcctgggcatgaaccaggacaagctccctgacctagggccacagatcaagcagccatctccagggtcctgggcctgggcaggcccatcccagtttaggaaattccccggggtcctggcacagagagcgtggtgtcccgtggagcagcctcatttaacgctgcagtgaggtaaggtggacgtgaatgcacctgcacgcagaggccttacagataaacagccgcccatgtgtggagcaggtcctcgtctttgtaagcatctgaagatgtttcttccattttcactcactgtccctggtagaaaagaatcacacagcaaactcctgtgacactcagaccaaggccaatgaagcaggagcctttctgcagaaaatggaaattgcagccacatgtcactccatcacatattattttgttcagtcaccatgtctgggttgaggtcccgctatgagccaggcaccattctgggggctgccaacgtcatggtgaacagaaacatgctttcattctggtggatctcacagacggggacggtccaaatacgggagcctgtgggtgtcagatggcaccagtgccgtggagaaacggcagcaggaaggggcctgggagaacgagacattcagcgttttcatccggcttccacggaacacctctctgtgaagactggcatttgaggaaagacaggaagcagggagggagggggacctggggaagagcattccaccgaggaaaaccagcaaaggatggaggtgcgggcaccaggcccaggagacccccggaagctctgcgagcaagggaggggcccgaggggacctcagagggacgtgcggggtgtgtgtgtatttccgtgtgtccatgtgtctgggtgtgtaactgtgtctatgtgtgtctgtgtatatgtctgtatttgtgtatgactctgtgtgtgtgtgtgtatgtctctgtgtttctgtatatggatgtatgtgtgcttatgtgtttctgtgcgtgtctgtgcatatctttccatgtctgtatgtctctgggtgtgtatctgtgtgtgtgtctttgtttatatggctgtgtgtgtgactccgtgtatctatgtgtttctgcatgtgtattttcatgtgtatatgtgtgtgtctgtgtatttccatgtgtctgtgtgtgtgtctatatgtctgtctgtgtgtgtgtctatgtgtgtattagtgtctgtctgtgtgtctctgtgtgtgtgtgtgtgtgtgtgtgtgtgtgtgtgtggtgtgtgatgtagggctttgcttgccactgtaagaactgggctttatttggagtaatttgggatgtcattgacctactttcactaggaaagttacacaaatgctttacatcttagcagactctctgcaaatgctgtgacaatagactcaagagttcaaggatagaagctgggagaccagggaagaggctacaataacccatcagaaaaaggagggtggctgggaccagggtagttttggtggaggtgggaaaagcgaattagattctgagaaacactgagggtatgggccaaggggcttttctgatggtttggacctagggaattaaagaaatagagaagttgaaaatggtcccaggatttttgacctgaacaaagtaaagactaaagaacatctcacgttgccatgatctttccttttttttctttttttaattgaaatggagtttcgctcttgttgcccaggctggagtgcaatggcacaatctcggctcactgcaacctccacctcctgggttcaagcgattctcctgcctcagcctcccgagtagctgggattacagtcatgcgccaccacgcctggctaattttgtacttttagtagagacagggtttctccatgttggtcaggctggtcttgaactcccaacctcaggtgatccacccgcctcagcatcccagagtgctgggattacaggcgtgagccaccgcgcccagcttgatctttcctttttgtaacacatgtaatgatctctcaggcatgaaatagaccaaggcatgttagagacagttgaccaaatccatgtgaccccagctaagaggcagtgccatgtggaaagcctgggctttgctggccaaaagagaattgtccaacagtcctgggtctcatgaaatgatcctatgtccactctctgggtatggatatgcacaaatacagatgtgtagtccaattccagagctggcagaggtcctgtcacctgtgtcacaggaatacgagtgtcctcctgcatctctcagagcatacgctgttgaactgaagaatttggagcacaatagagacatgtcactcaatcttataatttctcttatgttctcaggtgacagtgaacaactaagccatgggaagatgggtgaaccagtcctacacagatggcttcttcctcttgggcatcttttcccacagccagactgaccttgtcctcttctctgcagttatggtggtcttcacagtggccctctgtgggaatgtcctcctcatcttcctcatctacctggacgctggacttcacacccccatgtacttcttcctcagccagctctccctcatggacctcatgttggtctgtaacattgtgccaaagatggcagccaacttcctgtctggcaggaagtccatctcctttgtgggctgtggcatacaaattggcttttttgtctctcttgtgggatctgaggggctcttgctgggactcatggcttatgaccgctacgtggccgttagccacccacttcactatcccatcctcatgaatcagagggtctgtctccagattactgggagctcctgggcctttgggataatagatggagtgattcagatggtggcagccatgggcttaccttactgtggctcaaggagcgtggatcactttttctgtgaggtacaagctttattgaagctggcctgtgcagacacttccctttttgacaccctcctctttgcttgctgtgtcttcatgcttctccttcccttctccatcatcatggcctcctatgcttgcatcctaggggctgtgctccgaatacgctctgctcaggcctggaaaaaagccctggccacctgctcctcccacctaacagctgtcaccctcttctatggggcagccatgttcatgtacctgaggcctaggcgctaccgggcccctagccatgacaaggtggcctctatcttctacacagtccttactcccatgctgaaccccctcatttacagcttgaggaatggggaggtgatgggggcactgaggaaggggctggaccgctgcaggattggcagccagcactgaaccccagagtctggtgcctgctgtgccccttcttgcctgtgtcacattgggaagtcactcaacctttgtgagtgtctgtttccattcacctgttgatggtcattggatggtttataggttttggccatcatgagaaaagccattatgaacatttctgtaccaaaaaaaaaggaaaaaaagataatcaggacactcgtgctctgagggattttgtaaagatcacaatgtgtcaatctaaagctccatgaagaagcaacggctgctattattgtcattgttgattgtttatgacatccttggactaaatttactctattttttattttctttattttattttttgtgtttttctgccctttagtgctatatttcttaattcttcttggtaatagctgtcttttattggatgcttactaagttctaggttcctgttccttttctattctttctaaattatttaattgatgacttagactaacaaatgtggatatcttaagtggaaactttctaaatggcagaaattgagtccctataactctttttggacagttctttgcctttttctatgttcaattagaggctttataaaacctcctttaagtaataaaaataaatccctgcagtttagtagttatcctcgtggggggaatatcttgtttttttgtgtgtgttatgaaaggaggatatcttgggcccccaaaatcacgaggataaagggaaaagtcaaggtgggaactgctcagggcaaacctgcctcccattctttcaaagtcagccctctgctcactgagatcgatgcagcttctgattgactcctttggaatgtctcatcggaaactcaaaagactgcaaccatttgtctctcacctacctgtgacctggaagccccctccctgcttcgagctgtccccgcctttctggatggaaccagtgtatttcttacatacattgattgatgtctcatgtctccctaaaatgtataaaaccaagcgtgccctgaccaccttgggcacgtgttgtcaggacctccggagggccgcgtcacgggtgcacgtcctcaaccttgacaaaataaactttctaaattaactgatatctgtctcaaaggttgggggttcacagtgtattaccagtaccagaccctgtgccttataagtagcagttgctcaataaaacattattgaatgaatgcaagaagagagcatcaagtgaggtaatataaatggaagcattttaaaagcactgttcacatgtcaagtttgctgtggcagctgtgattcattttagcacttcaagttctttaacggtttaaaactgtatctctcttggagcatgaagactggaaaagaaataaggagataaactgagccattattttgaaacttatatatcagtcagggtccatttaggaacaaaatcacgtcagttattttaagagaaagtttaacataaagaattgctggccaggcacggtggctcacacctgtaatgccagccctttgagaggctgaggcagagggatcacttgaggccaggagtacaagaccagcctggtcctagctactgcagtccgagctactcgggaggctaaggagggaggacggcttgagcccaggagttcaaggctacagtaagagaactgcaccactgactgcactctagcctgggtgacagagcgagaccccgtgtctaaaaaaacacaaaaattaaacaaaattgctaaccagatgttggagaactgaatggccaaaacaagaacactagggatccttggagctcaaacatctgggggcaggcagtgaccatggcatcccgagctcagcagaggccctggagaagcatctccctgaccttggagggctgcctggccctgccttgtggtacccccggagcacgggggccggcgggggagaagaagcggcctccaaagctgggcccaggcttccgaggagcagctgctgtgtggttgctcctgacactctaggtgttcagagagggcctcaggtcccggctgctgacgcttgggggccagtcggctgctgcgtgtttttctaagggcaggatgagacaagtgcggaagtgtgaaagtaaaatctgcagcatggagccaacttccaggatgaagaaacattgctgggacgatttcgacaggaaaaaacaggaagtcatgaggattggtttctttccgctcttgctggctgacagcctccttctagtgtcctcctggcggagactgatgggccccgacagcaaatcagccctagcaacacaattcagatgacaggagtgtgggctgcaggctgaggcaactgcttaaaagcgggtgcaggtccctcctgtggccattcagtgtccacacagcatttcactcacagctgaacttccactaaacagcagggacattttgcttttcctaagaatgtgtccgcgtccacacacgctgcccttcggcagctgtggcaccgcctgtgggcactgtcatccctcatgtacagtcacggtcttgactgaacggtgggcactgtcatccctcatgtacagtcacgatcttgactgaacggtagcctccaccaccaggggtatgtaaagcaataagaggagggggagaggacaaattagcttccacacagggacacacgcacacacaccccaacatggcaattgatcatgaagacatcattggtatttagaaccttcttcttcactttggattccctatgtcctttgcccccgtctttccagggtcttgcttctgaactgacactgtaaaagagttggtatcgtaatgagaacacctgcttccgggcgatggactaacacaggacctgtcagctccacagacataagcccatcactgcccttcttctgctagaaaacaagttccttgatcagaagagatgctgtgcagaacactctggggtatctgaggcattctgcacatagatggcggtgctgtcagatgtgcgtgggcagggaaggcaaattcaaatctagaaaaggtgtctatcgcagtgaggtcaaattgctatgccgttcatgacaaaagggatccaatataaaagcctgcttctaggaggctagtagcaaaaggaaaggtgccatgttggggcccagaatgagtttctgctgatggaaggttggccactcagtggtagtggtaaccaggtcagcttggtgaggacccatccgtgttggtgcacctgtgaataacctctgtccctacaaccgcaaccactttgtccatagtccactgagcaagcatctgagttgttccacaaagcatggtgttctatggcatgttaagatgattaagatctctgtggattatattgcgcaggaggagaaacgatggagtcctgaggcaagattgttgagacgcactgttgtggtcctggaatgcacacagctgctttttgtgggccttacaacttgttacagaggaaaaatagtttttcatgtcaataagtgcatactagggccaggggtggtggctcatgcctataaacccagcactttgggaggccaaagcaggtgaatcacttaaggtcaggagttcaaggccagcctggccaatatggtgaaaccctgtctctactaaaaatacaaaaattggccaggcgtggtggtgggcgggcgcctgtaatcccagctattccggaggctgaggcaggagaattgcttgaacccgggaggcggaggttgcagtgagcagagagtacaccattgcactccagcctgggcatcagagagagactggatctcaaaaaaaaacaaaaaatctgaatattaggtataaaaggctatgctgctttgttccactaaggatgagcacatctgtaacagccactgtggtttgagtcaccgtctgattaactgcacaataatgcacagtaattttccatctgggtcatgggcaataattaattttagaattatttttaaatgaatatatactgtaagtcttctcaaccttcacccaaatgcatctgtgatcatctactagagcaaccatgcataggagaagaaaaaatattcaaagcttttaggaattaaaattattctctattaactttttcaaaaaaaaagtccacctggaaaacctgctgatcaaacaaggccaagtttattccttatgcagtaaaggtaaacaccaccatgaccacgttctgcagtatttcagaagtggaagatcaagggtagatgtgtatgagtgttaggatctggatttgagaagttggaagtggcttggtgggcatcagatgtgaggagtcttaatgagaaaacagttgtctgataagcagtattctggttttgtgccactgcactcca

SEQ ID NO: 2741 - DNA, 1228 bp, Homo sapiens
ccgtagtcaacgtgcgcctcccctcccggctcccagccgggcgcgccccgggctcgagtctctgcctgcccagtggcagccccgcccttcctctcccagtgggccctcggcgcccagctccgcgtcctgtgaggtccagtggccgcccaggcgcgaccagatctgggtgcgcggagagcgcgcatggcggctgtgggaccgcggaccggccccggaaccggcgccgaggctctagcgctggcggcagagctgcagggcgaggcgacgtgctccatctgcctagagctctttcgtgagccggtgtccgtcgagtgcggccacagcttctgccgcgcctgcatagggcgctgctgggagcgcccgggcgcggggtctgttggggccgccacccgcgcgccccccttcccactgccctgtccgcagtgccgcgagcccgcgcgccccagtcagctgcggcccaaccggcagctggcggcggtggccacgctcctgcggcgcttcagcctgcccgcggctgccccgggagagcacgggtctcaggcggccgcggcccgggcagcggctgcccgctgcgggcagcatggcgaacccttcaagctctactgccaggacgacggacgcgccatctgcgtggtgtgcgaccgcgcccgcgagcaccgcgagcacgccgtgctgccgctggacgaggcggtgcaggaggccaaggagctcttggagtccaggctgagggtcttgaagaaggaactggaggactgtgaggtgttccggtccacggaaaagaaggagagcaaggagctgctggtgagccaggcacccgcaggccccccgtgggacattacagaggcctgagaactcagcaccagggctcggtgtgtgtggtgttggagtgtgtgctatggaaccgcagaatcgatttcagaaagataatagagtccatattatatagggtgtccacataattgttgtacaaaccagagctttttaaagtgaaaagcagtgctaaaataattattgcaaaacaactggcttaaactggagctgtcccagcgaatcaggacgctcagtcactctgatattacgtaacataccagttagggcctgcggaagcatcttgtaatggaacacattactatttctgcagagaaacatggatattcaataagtgggaatattaatacaataaagagcctcatggcatgttttgtcaacaaaacagtagtgaaaaaaa

SEQ ID NO: 2742 - protein, 219 aa, Homo sapiens
MAAVGPRTGPGTGAEALAAELQGEATCSICLELFREPVSVECGHSFCRACIGRCWERPGAGSVGAATRAPPFPLPCPQCREPARPSQLRPNRQLAAVATLLRRFSLPAAAPGEHGSQAAAARAAAARCGQHGEPFKLYCQDDGRAICVVCDRAREHREHAVLPLDEAVQEAKELLESRLRVLKKELEDCEVFRSTEKKESKELLVSQAPAGPPWDITEA

SEQ ID NO: 2743 - DNA, 1198 bp, Homo sapiens
tcctgctccaactctcccagccacggggcttcctggtgggggggcggagagtagaggagacgactaggggtagggctgccggagcttgtgtttcagtctggctggtccagcagatgcttttggggaagcaagatcccgagaccttcagagtcacctcgcagtgtaacctgtagcctgtagagatgacttctacccggcctccccctcagagctcttggagtccaggctgagggtcttgaagaaggaactggaggactgtgaggtgttccggtccacggaaaagaaggagagcaaggagctgctgaaacagatggcagcggagcaggagaaggtgggggcagagttccaggcactgagggctttcctggtggagcaggagggtcggctgctaggccgcctggaggaactgtcccgggaggtggcacagaagcagaatgagaacctggcccagctcggggttgagatcacccagctgtccaagctcagcagccagatccaggagacagctcaaaagcctgaccttgactttctccaggaattcaaaagcacgctgagcaggtgtagcaatgtgcctggccccaagccaaccacagtctcttctgagatgaagaataaagtctggaatgtttctctcaagacctttgtcttaaaagggatgctgaagaagttcaaagaggaccttcggggagagctggagaaagaggagaaagtggagctcaccttggatcccgacacggccaacccgcgcctcatcctctctctggatcttaagggcgtgcgcctcggcgagcgggcccaggacctgcccaaccacccctgccgcttcgacaccaacacccgcgtcctggcgtcctgcggcttctcctcgggccggcatcactgggaggtggaggtgggctctaaggacggctgggcctttggcgtggcccgcgagagcgtgcgccgaaagggcctgacgcccttcactcccgaggagggcgtctgggccctgcagctcaacggcggccagtactgggccgtgaccagccccgagcggtcgcccctcagctgcgggcacctgtcgcgcgtgcgggtggccctggacctggagggacccacccacagctcctgctcccattgctggttcacgtccccatttatcttgttcatcagcacttgctcttcctcctgctgtctgcctccatcagggtgtaactgt

SEQ ID NO: 2744 - protein, 294 aa, Homo sapiens
MAAEQEKVGAEFQALRAFLVEQEGRLLGRLEELSREVAQKQNENLAQLGVEITQLSKLSSQIQETAQKPDLDFLQEFKSTLSRCSNVPGPKPTTVSSEMKNKVWNVSLKTFVLKGMLKKFKEDLRGELEKEEKVELTLDPDTANPRLILSLDLKGVRLGERAQDLPNHPCRFDTNTRVLASCGFSSGRHHWEVEVGSKDGWAFGVARESVRRKGLTPFTPEEGVWALQLNGGQYWAVTSPERSPLSCGHLSRVRVDLEGPTHSSCSHCWFTSPFILFISTCSSSCCLPPSGCNC

SEQ ID NO: 2745 - DNA, 2415 bp, Homo sapiens
ccgtagtcaacgtgcgcctcccctcccggctcccagccgggcgcgccccgggctcgagtctctgcctgcccagtggcagccccgcccttcctctcccagtgggccctcggcgcccagctccgcgtcctgtgaggtccagtggccgcccaggcgcgaccagatctgggtgcgcggagagcgcgcatggcggctgtgggaccgcggaccggccccggaaccggcgccgaggctctagcgctggcggcagagctgcagggcgaggcgacgtgctccatctgcctagagctctttcgtgagccggtgtccgtcgagtgcggccacagcttctgccgcgcctgcatagggcgctgctgggagcgcccgggcgcggggtctgttggggccgccacccgcgcgccccccttcccactgccctgtccgcagtgccgcgagcccgcgcgccccagtcagctgcggcccaaccggcagctggcggcggtggccacgctcctgcggcgcttcagcctgcccgcggctgccccgggagagcacgggtctcaggcggccgcggcccgggcagcggctgcccgctgcgggcagcatggcgaacccttcaagctctactgccaggacgacggacgcgccatctgcgtggtgtgcgaccgcgcccgcgagcaccgcgagcacgccgtgctgccgctggacgaggcggtgcaggaggccaaggagctcttggagtccaggctgagggtcttgaagaaggaactggaggactgtgaggtgttccggtccacggaaaagaaggagagcaaggagctgctgaaacagatggcagcggagcaggagaaggtgggggcagagttccaggcactgagggctttcctggtggagcaggagggtcggctgctaggccgcctggaggaactgtcccgggaggtggcacagaagcagaatgagaacctggcccagctcggggttgagatcacccagctgtccaagctcagcagccagatccaggagacagctcaaaagcctgaccttgactttctccaggaattcaaaagcacgctgagcaggtgtagcaatgtgcctggccccaagccaaccacagtctcttctgagatgaagaataaagtctggaatgtttctctcaagacctttgtcttaaaagggatgctgaagaagttcaaagaggaccttcggggagagctggagaaagaggagaaagtggagctcaccttggatcccgacacggccaacccgcgcctcatcctctctctggatcttaagggcgtgcgcctcggcgagcgggcccaggacctgcccaaccacccctgccgcttcgacaccaacacccgcgtcctggcgtcctgcggcttctcctcgggccggcatcactgggaggtggaggtgggctctaaggacggctgggcctttggcgtggcccgcgagagcgtgcgccgaaagggcctgacgcccttcactcccgaggagggcgtctgggccctgcagctcaacggcggccagtactgggccgtgaccagccccgagcggtcgcccctcagctgcgggcacctgtcgcgcgtgcgggtggccctggacctggaggtgggagccgtgtccttctacgctgtggaggacatgcgccacctctacaccttccgcgtcaacttccaggagcgcgtgttcccgcttttctctgtttgctccacgggcacctacttgcgaatctggccttgaggggcactgctggggagctcctgtctctgggctgccggtgggaggggatgtcgcctccccagagatgcctggtccgtcttgggtctgccctccgtgctcctgacccctgctgcccaagagagcctgctacagacacaaccccgaggcaggagagtgactgtggccaaccgagcaggggaacaggggctttggactcctgagggtgttcccttcctgaggtcacatgtggatttggccagagccttcaggaggtggaggccggtgaggtcaggagcccagctctccagggggcttctgccctgactgggaagggtgcctggctccctaaaacaatgtcaaagccagtcctgctgttctctgttgccagggggcaggtctgggcctgggccaaccacgtttgttatcatggctgctgccttctggacagctgccagctctgccttgagaggttgtgggacctctggatccagctgacctgacaggtcatctactcagggaggagccctgtgctcccagctcagaggacagtctgggccagaactggaaggagacatctgtcccgtctttgagtgacaagcccgggacaacagccagtgggcatcacggctctccagcactccttagccggaggatacagagtgatgggtgcatcctgaccaatgcgacaaccaacacgtgctctcacaaacccctgac

SEQ ID NO: 2746 - protein, 507 aa, Homo sapiens
MAAVGPRTGPGTGAEALAAELQGEATCSICLELFREPVSVECGHSFCRACIGRCWERPGAGSVGAATRAPPFPLPCPQCREPARPSQLRPNRQLAAVATLLRRFSLPAAAPGEHGSQAAAARAAAARCGQHGEPFKLYCQDDGRAICVVCDRAREHREHAVLPLDEAVQEAKELLESRLRVLKKELEDCEVFRSTEKKESKELLKQMAAEQEKVGAEFQALRAFLVEQEGRLLGRLEELSREVAQKQNENLAQLGVEITQLSKLSSQIQETAQKPDLDFLQEFKSTLSRCSNVPGPKPTTVSSEMKNKVWNVSLKTFVLKGMLKKFKEDLRGELEKEEKVELTLDPDTANPRLILSLDLKGVRLGERAQDLPNHPCRFDTNTRVLASCGFSSGRHHWEVEVGSKDGWAFGVARESVRRKGLTPFTPEEGVWALQLNGGQYWAVTSPERSPLSCGHLSRVRVDLEVGAVSFYAVEDMRHLYTFRVNFQERVFPLFSVCSTGTYLRIWP

SEQ ID NO: 2747 - DNA, 1686 bp, Homo sapiens
atgactcaggccactggccaaatgttatgtctccatgttcaagtccctctccaacttctcctcctgggacagaaacagatggcagcggagcaggagaaggtgggggcagagttccaggcactgagggctttcctggtggagcaggagggtcggctgctaggccgcctggaggaactgtcccgggaggtggcacagaagcagaatgagaacctggcccagctcggggttgagatcacccagctgtccaagctcagcagccagatccaggagacagctcaaaagcctgaccttgactttctccaggaattcaaaagcacgctgagcaggtgtagcaatgtgcctggccccaagccaaccacagtctcttctgagatgaagaataaagtctggaatgtttctctcaagacctttgtcttaaaagggatgctgaagaagttcaaagaggaccttcggggagagctggagaaagaggagaaagtggagctcaccttggatcccgacacggccaacccgcgcctcatcctctctctggatcttaagggcgtgcgcctcggcgagcgggcccaggacctgcccaaccacccctgccgcttcgacaccaacacccgcgtcctggcgtcctgcggcttctcctcgggccggcatcactgggaggtggaggtgggctctaaggacggctgggcctttggcgtggcccgcgagagcgtgcgccgaaagggcctgacgcccttcactcccgaggagggcgtctgggccctgcagctcaacggcggccagtactgggccgtgaccagccccgagcggtcgcccctcagctgcgggcacctgtcgcgcgtgcgggtggccctggacctggaggtgggagccgtgtccttctacgctgtggaggacatgcgccacctctacaccttccgcgtcaacttccaggagcgcgtgttcccgcttttctctgtttgctccacgggcacctacttgcgaatctggccttgaggggcactgctggggagctcctgtctctgggctgccggtgggaggggatgtcgcctccccagagatgcctggtccgtcttgggtctgccctccgtgctcctgacccctgctgcccaagagagcctgctacagacacaaccccgaggcaggagagtgactgtggccaaccgagcaggggaacaggggctttggactcctgagggtgttcccttcctgaggtcacatgtggatttggccagagccttcaggaggtggaggccggtgaggtcaggagcccagctctccagggggcttctgccctgactgggaagggtgcctggctccctaaaacaatgtcaaagccagtcctgctgttctctgttgccagggggcaggtctgggcctgggccaaccacgtttgttatcatggctgctgccttctggacagctgccagctctgccttgagaggttgtgggacctctggatccagctgacctgacaggtcatctactcagggaggagccctgtgctcccagctcagaggacagtctgggccagaactggaaggagacatctgtcccgtctttgagtgacaagcccgggacaacagccagtgggcatcacggctctccagcactccttagccggaggatacagagtgatgggtgcatcctgaccaatgcgacaaccaacacgtgctctcacaaacccctgac

SEQ ID NO: 2748 - protein, 327 aa, Homo sapiens
MTQATGQMLCLHVQVPLQLLLLGQKQMAAEQEKVGAEFQALRAFLVEQEGRLLGRLEELSREVAQKQNENLAQLGVEITQLSKLSSQIQETAQKPDLDFLQEFKSTLSRCSNVPGPKPTTVSSEMKNKVWNVSLKTFVLKGMLKKFKEDLRGELEKEEKVELTLDPDTANPRLILSLDLKGVRLGERAQDLPNHPCRFDTNTRVLASCGFSSGRHHWEVEVGSKDGWAFGVARESVRRKGLTPFTPEEGVWALQLNGGQYWAVTSPERSPLSCGHLSRVRVDLEVGAVSFYAVEDMRHLYTFRVNFQERVFPLFSVCSTGTYLRIWP

SEQ ID NO: 2749 - DNA, 50966 bp, Mus musculus
  misc_feature (1)...(50966): n = A, C, G or T/U
ggctggggtgggagggggacggnnnnnnnnnnnnnnnnnnnnnnnnnnnnnnnnnnnnnnnnnnnnnnnnnnnnnnnnnnnnnnnnnnnnnnnnnnnnnnnnnnnnnnnnnnnnnnnnnnnnnnnnnnnnnnnnnnnnnnnnnnnnnnnnnnnnnnnnnnnnnnnnnnnnnnnnnnnnnnnnnnnnnnnnnnnnnnnnnnnnnnnnnnnnnnnnnnnnnnnnnnnnnnnnnnnnnnnnnnnnnnnnnnnnnnnnnnnnnnnnnnnnnnnnnnnnnnnnnnnnnnnnnnnnnnnnnnnnnnnnnnnnnnnnnnnnnnnnnnnnnnnnnnnnnnnnnnnnnnnnnnnnnnnnnnnnnnnnnnnnnnnnnnnnnnnnnnnnnnnnnnnnnnnnnnnnnnnnnnnnnnnnnnnnnnnnnnnnnnnnnnnnnnnnnnnnnnnnnnnnnnnnnnnnnnnnnnnnnnnnnnnnnnnnnnnnnnnnnnnnnnnnnnnnnnnnnnnnnnnnnnnnnnnnnnnnnnnnnnnnnnnnnnnnnnnnnnnnnnnnnnnnnnnnnnnnnnnnnnnnnnnnnnnnnnnnnnnnnnnnnnnnnnnnnnnnnnnnnnnnnnnnnnnnnnnnnnnnnnnnnnnnnnnnnnnnnnnnnnnnnnnnnnnnnnnnnnnnnnnnnnnnnnnnnnnnnnnnnnnnnnnnnnnnnnnnnnnnnnnnnnnnnnnnnnnnnnnnnnnnnnnnnnnnnnnnnnnnnnnnnnnnnnnnnnnnnnnnnnnnnnnnnnnnnnnnnnnnnnnnnnnnnnnnnnnnnnnnnnnnnnnnnnnnnnnnnnnnnnnnnnnnnnnnnnnnnnnnnnnnnnnnnnnnnnnnnnnnnnnnnnnnnnnnnnnnnnnnnnnnnnnnnnnnnnnnnnnnnnnnnnnnnnnnnnnnnnnnnnnnnnnnnnnnnnncccccccccccgccttgactctttctaccctgacaacggtcttcagagactgctcataagcaactgtaattctttacttttaactgtttctgcaagtgacaacattgtgcacaggccatcttgttactgtgtttaaataatctgctagaatttgagtacaggtaaacctgttttacaggtagattgcctgattgactactaggtctaaattcttctctgcctctgcttggaattttaactttggagaataaatgaaaaaacaattcggtgtgtaatagcactgtctttcccacactagaaattttcaccatcccgcaaccgttctgtaggctggtcaaaagattgtgaaggcgtattttgctttttgtaattgctgccagtcttttgaagttggcgctttgaagaatacattttagaattaaaattacgtggagccagtggtctagtcaaattctctgacctggctctgaggaaccaagcctagaatgaagagactggatcaggatgttagagttaggagggtagtcataaagcagacgttaagggtgatatagttgttaagtatttggggtttggagaaggaagcgggtatttttatcaggtagatattaaagtaggtcaggtagccatttcacaggtgcacaggtgcttgctaacgtggacaaaaatgtatgtggcagacattttctagtgtgactggaatattcttgaaagagaatccttgtataagttgagatgtattatggttgctgggaaatttcaggctttttttttttttttgaacagacatagacgctgatatacagaacttggtcctgactacaaataaaggcattataggaatttgcctactatgcatgtagttttaactagtattttggttaatgtttaaacatttgactgaacccatgttaactttacaaaaaaaaaaaaaaaaaaaaaaaaaagacatcttaaaatacagtccctgttagcctgaatctttctttgtagaatgggctggccttgaactcagagatcctcctgtttgtgcctctggagtgctgaggttaaaggtgtccagcaccatgcttaagttttcattcaatacagcctagaaagacagtataagtaagacatactggaagaaatgcttggagtatcctttggtccttgtgtggtgaggggtcaatatttccagcacacatgcagccctctcctctgacaaggtccactggctaggaagctcaagcttgcttgtcttatcactgtggagaagaaagatctgttaatttttttaaaaaaagatttatttgttacatgtaagtacactgtagttgtcttcagacacaccagaagaaggtgatcagatcccattacagatggttgtgagccaccatgtggttgctgggatttgaactcgggacctttggaagagcggtcagtgctcttaactgctgatccatctctccagcccgagctctgttaatttttaaaactttttagcttctacaaaataaatagtttttcttaattgtacctgttatttaggctatggaggtagctatgttaccagaaagttaagtgctgaccaaacacaagtataactgtataccgtgtacgtttgaggacagtggaatgcagtagagtttggtgtttgagtaagtagtttaaagattagaaaagagtgattatttgagtctaagatggaggctgattcaggctgccttaattttactctttggcctttacttttttgttgtctgtttatatatttcggataagttgtgcactgaggaatagcatttgatggtcctggtgatgagaattcagagatgaccatattcagtttctgccgtcttgtcctgcataggagtgagtagtgggtatatagtgcttcaagggatcgagaaagattaaacttatggatgagggtgtggtgccggtttaaaaccagtaacactgaggagaagctggccaggttggagaaggggatcattctagacaaaggagacagtgagcagactgaggtatcgggtttgggggtaaggccaggcaccataagatgttcctggaacagtgggagtggattgagagcagctttagagaagggctgtttgctgagctttgtttccaggtagcaaagaagggtcagattttttttaaaaagattttttttttaaagcaagaaacaaagttttaaagataactaggtatcagcttgggggtataaagaccatgcaagtaaaattggagtcatatttgaaataatacaagtagtgactgtgttttgattcagatctggtgtctgtggctccttttgtaatgggcttgagcagtgcccaattgctctgtaatacaaggccatgtcagatcagaatgttggtgttttagaagatgttaaaagcagtcaaagccgtgaaaggcctgaaatgatacacatgaaacttgaggtttgtggactttgtttcctagagctcagacaggctagagaacttaattgacggtcaggtcaaccttgtgtgcactggaatcagcagtcaggttactcaggaagattgtgatgcttaggatatagtatgtattttgtgaaatgctggggaagtcgagttttccctctacattcctggaagtagaatattgagccttggaagccataggactcttaataaagtgctgttaacagggtttgtgtggaaatcccagggcttgggaggaagtggaattggagtacagtactccaacattaaaagaacaggaacttggtaagtatggtagcatatctttctcatgttcaatggctaagaagtagatcaatattgcagtaactatgtaccttacctcaaaaaaacacctggtgtatctgagctgcacatccgcagggttgcgccttataaatgattctgaattgctaggagagttctctgaaagcctggaaaactgacagtaaagttgagtgggtgtggtccacaacaccgaagaagctgacttactgggtggtgttcctgtcgtggttcacctggggcagttttctatctttgtctaatgtgttttgttttgtttttttcccacagattaaaatagcacataaacaagtgagaagtttacagtgattgttcattattaagtcagtcatgttggaacaaattcacatttttccaaacaagtgttgtatagacgaactaattatacttgaacacagtatttgagcatagtattcaatttagagtgagtttgcagtggtgcagagagacaaagagtaataaacatagcaggttatattttaattagaaatatataaaccattttgtgtgtttcttcttaggaagattctaattttgcctgggaacctttgaaggagttacctcagtgatgttgagctgaagttagaagatgactaagggttgttaggctgagtagggtgttggagagagagtgtgtccactcagtcacatacaaggcaggctatgcaaggatgctggatagaaggcaggaacaaccttggctatttttcttaaaatgttagagcattttcctgtataccgtgggagcccagtgagcattctcgtgtgacatacttggaaagcaagtagtaaaaatggggaggagactagatgaaaagggtcaggacacactgaagaggaagtttctggttatgtgatgtacatagattagagagatgattaggacttaatgagagaatgaggccattagcattgaggggagaaaaactaggatactctgtaacaattttgaaagtactaaaattaagataatacagatactgcatagtagctgtttctaatttctctagattttcctttttgagtgtggagaataatagtcttcaatatcaaggggtacaatatctttttaagattaaaaaaaaatctatctctttatttatatttttgagacaaagtctcactatgtatccttgactggcttggaattcactatgtactctagactgcctctgtatggtattagaggcctacaccactccacttggcttgagggtaccatttcagtgcatgcaaagtgcctgaaaagtagtgagtgtgcaaaaaatattcatatgctagttcagggtgtggcaattatcagcacaactcaattttgccattatgcctattgatgtttgcttggtttgactttctgtttcttatctcaaggtatcctagaactggtattctcagttcccatggacagtaggaagattcttttagtctggtttctcgggatttcgccttcaccacttgaagcctgggtatcaatattttcatattcctgataaggtggaccatagcttctgtcttgttttattttattttttaactatcacagttttcccctttgaatttatataaacattgactgattatgacctaacttgctagatgcaggacttaaaaatatgctctactgactcctcaatgatgtagcaaccatatagcacttctactttattaggtcttaaaagtcatctggagatggcttatattttgtgattttttttttttttttaataaggcacattctgaaagttttgtgttcatttgggttcctggaaccagtcatcctggaatcaatccctagcagataccttgggacaactgtatttaatactttgtctcaggtacagtgagagtcaaagttagtttggggacagtcaccaaagatgatatctagcatgaatgaaggcaggaagacagtagaacaaagaaatagatctgagactgtgcagataactcagataagatctgaaggggtgaaaggcagagaattggtgagaaatttgtgttagaattggagtctgaatactcattttggcttggaaaattgggcatgcgtcataggaagaaagacaaggtggaaggtcaagaggctaaatttccttttagacttttattttgttctcttcctactgtaaggtaaaagaaatgaacgagctatgtagtacatttgatacgagattattggaaacatgagttatattgtattctagtatcttatgaagcaatttcagaatagtctttggaaaatgaataaatctaaggctgtgcattgtagtggacttctttaatcacagcatttgggaggcagagtcaggtggatctcttgagttcaagacagtctggtctgcatagtgagatccaggccagtcagggctatgtagtgataatctgcctaaaaacaagcaaatacacagggttagagagagatggctcagtggtttagagcacttgctgttcttaaagagtactagtgtttggtgcctagcatccatatggtgactcaaaaccacctgtaatttcagtttgaggggaaccagcgcctccttttgtcctctgcaggtgtcagacatatctaagcacttttgtatacacttgaaatgaaaataaatcttgataaatctttaagaatgttctttggaagcctggcagcggtggcacatgttaaatgctggcacttgggaggcagagacaggcagatttcttgagtttatggctagtttggtctacagagtgagttcaggacagccagggctacacaaagaaacccggtcttgaaaaacaaaagaaaagaatgttctttgaaggacattccacagaactctgttatcgctttgtctaatcttgtgtggtgagtatattcatggttctatgatgtaggaaaatggtttgtgatctactttaactgtagaaatagtgactagaatttcagtgtgcaaatgacaagagtgttttggaggtggaagtggagcatatctgaaggatgtcagtttgtttgctggctctgtcaagagtacaaagaaaggtactaggatagaagttgaaaagatagggcagcttgttggttgtggcaaccatctttattcccagcacttggttggcaaaagcaggcaaatcttttgaggccagctttttctacaaagtgnnnnnnnnnnnnnnnnnnnnnnnnnnnnnnnnnnnnnnnnnnnnnnnnnnnnnnnnnnnnnnnnnnnnnnnnnnnnnnnnnnnnnnnnncatcatcaatactaacaacaacaaagaaagtaggtacggattctgaatggtaaactatggagtttgaatttcttatctaaggtgtagggatttagtattatttgcagtgcaaaagagggaatgtgtgtgctaagtaggtcctctacagcgctactttcccattccagcagatcagaaaaagatagaggggatgccctagatctttacagctgacgtaggatcagaagctaactgtagttaagctttgccattttagatgccagtgaagatatgcaatgaaggctggctctttaacgtagtataattagatagaactcagcgttaggaagagtaatttgagagtggtatataggtcagttgtaatcctaaaagtgcgcatcgtctagaggaagcaaagcagtacaaataaaggactagagtgtggttgcattgctgtaacggttttgtttttctctataggttaaagctttctgatttttttttcttatacctgacaaagtgcttaacacactaaaatttttcaacaaatattttatgaatgaatgtgtaaagaaatctcccttaaagaaagcgtagtttgtctaaatcaaattactttcagatttctgtgaaaatctttctgggccacaggaaggagtaagtcttaatctgaggtatctgtcgtctggccaagtcccagttttcagacaggataaatgtcccgagttcatcgcattaatttcccaggcgcttggctctctgccgtcgagattactagggttgacaaggaggtgggtaccagaacgtctgctggcttatgctctgcaagtagattgtagtgctgttatcttagtagtctttctagtcagtgctaatgggttttctaacctagcttatattccttacctgaataatgttaattaggagttaaaaaattgttataacttatacataatagtgttgacttttaaatcttttatacttcatttgcattattagctattttgtctaaggcagggtcttctatgttaccccagcaggtttttatttaacatgtaggaatgttttgcctgcatatatgtctgtgcaccacttgtgtgcctgttggcttcagaggccagagggggacattacattagagtcactggaacaggagttaaagacaattaggagccatcatgtgtgtgctgggaatgctgggaattgaaccatggtcctccagaacatacagggcctttagagctgcctttagactagccacagtcaggctcttttagctgttattcttttgtaaagtggggctttcctttagtttgatccctctgaaatcccttcctttgtgaaggcataactaggtaagcctttctctttagtaccagctctctggttagttggctgctgggtctgtgctgcttgctctcactcttctcaccctcctccctcttcttgacttgatggttattggagtggtatctctccactgttatctcattttctacattatgcttttctgcagcacctgtagtctcatgttaatgtctcggtttagcattctttctttgaagtactcattttattgattgtgctttagcctattataattgtggttctttttgactaaattatcactatgaccagtgagaagatttcatttagttcctgtattatgttgacatgaaaatcccatcagattttgttttttgacactgaaagatgccctagattcatgttgtattatttcttgtaccatatttacaactgtttatcttacaaggagctttgtattgttggtagcttatttttctgaagtttcagttgtctgtgttcagtcttactccagaaataataagtggtaaattaataagctaggtggtggtggcacattgcctttcatcctggcactggggaggcagaggcaggcaaatctctgtgaggttgaggccagcttggtctgcagtgctagctagttccaggacagccaaggtgtcttgagaaataagcatatatattcataaattttaggtcacaagccatttcaggtgtatgatgaatacttgtgctatcctacacccagaaaatgaattatacctttatccatactgtatgtattacctgctcattagtcatttggtctggcatattagatgaactctgatggtacctcagtggcttgtgtttaagaaatgcttattttacggtgtcgccaaggcacaagagtactgatactagcagtttggctggtacaccaaagagaagtatagcagttctccctcccccatattacagtggagtccattctaagatcacagtgggtgctgaaaaaaatggtaccaaactctttataaacagtatgcccactcccccacatatatatatatacttatttttaatttctaaattaagcataatagattagtaacaggtgaactgtaaatctaacaggatttttttttcttaagaacttttatattttaagtcaaagaaaactacatctctttgctgtctaaattgggaaagtcattctgtctaggatgtgagtcagttatttacacaatcactgtgatacagtgacagtatattctaaacagctactaagtgactagtgggcagcagtgtatgcaatgtagatacattgcatggaggcccgatttcctgggatccacaaggtagaaagagaaagtgtcttttgcaggtttccctctggcctccacatgcgtggcagcttggtgtgtacatgatgtgtgcatgtacatacaagcagataaatgtaaaagacattaaaaatgaaattatgaattcatgcagttgtgattactcatgtgatcagattttcttctatttggccagtggaacatttcttaagctaacagctatattttcttcaactatcacttttattagctccagggtttaatcagccatatcctagaactaaaaatcatttctttgtggtactctagttcttttgggtagaaaatctatttaatgatcctaatatgtctgctttttaaaaaaccaatatttttatttatttgactcttcagtatgtactgactggtttctctttttcatttattaacaggcatgcccaaagaaaagtacgagccccctgaccctcggaggatgtacacaattatgtcctctgaggaagcagcaaatggaaagaaatcacattgggcagagcttgaaataagtggtaagacatgttagcatgaatctatggaatagagattaaagatatgttgtaaagttaggttttctaatactactgcatgtagaagagcaacagcggtactttacaatgttagtttaactttggagctggaagggcactgaaaagaagtgtttgggttggaatttaagtcccattgattgtcggttacttctccttgtgcgtgcgtgtcctctcacttcctgatacatcataagctctaaggttggggctgtggatttcggctttttactagtaaggttactgtgttgtcgtagtctaataaggaagcggtgtgagaaaacagtctggttgagttttagtgcggagaccgggcttttctagagatgacttagcattaagtttctttcctttctggctttttgagtttctctgtgtcctgtccagagctgacttagaactcagagatctatctgccttcctctgcctcctgaatgctggctggcattaaaggtccacaccaccatgcccagctatgatggctcattagttcattctgtttagccctgagtaatgtacactgtctggaagtaccatcagctcttgcttgcttacttcgagaagaacatcttgggttcttccaggttttggcattttgcatattgcttctccaaatgtctgccggtagagtttgctaaagaccaaggaagtatggttgtcgctcatatgctaagagcgtgcttagtttttatcagaaactactcggcattttttttaaaacaaaacaaacaacccagtattttctaaagtattgtgtttctaccagagtgaacaagaactcctgtttcgcagcctccttaggatttggtgtccttggtgttttgagtcaaactcatagagatttgcctgcctcagcctcctgagtactggaatgaaaggcacgtgccaccattgcccggtattttagtattttgtagtttcttagtgacagctctgttgcagtttaaatgtgaaatgtccccctctaggttcctgtgtttgactacttggtctctagctagtggtgtgaaagttctgagactttagaaggtggagccttcctttaggcttcatatctagtctggttccattttctctccattctgtttttctgacaagttgatgctgtgctggcttctgagttttgccaccttttctgcctgctgccatgtcttttccttctgtactggaatggtgctcagaacagtcattctcaacctgtgggttgcaacccctttggcaaacctctgtttcccaaattacggttcataggagtagaaaaattatagttgtgaaataacaattaaagtaattgtatggtcagggttcaccacaacatgagggactgtattaaagggttgaagcctggaaggttgagaccactgccctagaacaataagcaagagcaaacctcttcttttataaatattttcttccagtttgtggcttgtcttctcattctcttgacagttgagttcagacttttttttttttaaagatttatttatttatttatttatttaatatgagtatgccagaagagggcatcagatctcatagatggttgtgagctaccatatggttgcttgaaactgaacttaggacctctgcatgagaagtctgtgctcttaactgctgagccatctctccagccccaagtgcagacatttttaaagtttaatggatttggtattatattaaatatgtatattgggaagaactgacattttggcaatattgggtctcagttgtgaacatgggctgtcttttcacttatttgttcttacttgatttctttatatggaatttcatactttttctaactttgtatctctccttatcttagtgcaaatataaatagtggtgtttttatttgaattccacttattcgtcattggcatatcaaacagaatgaatgactttttttttttttttaaagatttataaatgtaagtacactgtagctgtcttcagacactccagaagagggcttcagatcttgttacagatggttgtgagccaccatgtggttgctgggatttgaactccggaccttcggaagagcagtcgggtgctcttacccactgagccatctcaccagcccccatgaatgacttttaagtctttatgttttataaactttactcaagtgttctagttctaagtctcactgtatgttgatactattcctttaaatgtcaaaagtttttaactacctaggttttccagtgttgttcattcttaaaacatgcagatttcttgttggttttgttcttttgaaaatctggcgataggtctttttttttaattatttattatatgtaagtacactgtagctgtcttcagataccccagaagagggcatcagatctcattacggatggttgtgagccaccatgtggttgctggatttgaactcagaacctctagaagagcagtcagtgctcttaaccgctgagccatctctccaacccccaggtctcttctttagactctcgtttattttgtgctaatttgaaagatagtccaagtgggaggaagagttatcgttaatggtttgcattgtcagtaggatgctccgtctcttcttgcttaagtttctcttaagactacactcattcctgtccttgcttctttatctatgtccgttttctgaggcaattgctaagttcttgtgcctttggttttaagtactgtgattatgatgtctctttggtgtagggtgttccccacacccctcccactttcttttgtcaaccttttcctctttctctctctctctctctctctctctctctctctctctttctttctagaatacaacaaaacaaaaacaaacaaacaaaacacagggagtccagtgtgtattggccaattatgcctgaacgtgaggcttattccagactctggttcaagtgtcacttcattgaagaaaactgattttccctcacgcagcaccaatcaaaagccaatagcttcttggcaatcagtagaattttatgcccactacccatgaaactttttatagaaatctaaaatttgatgtatacaaaaaaattctgcctgaagatgccaaataacctacctatctgtgtatctctttagttctcatttgaatggggcagtactgtgactgcctgccttggagggacacctggagctttcagcaacttttgttccaggccttttgagataccacacaaaaactattttttaaaaggtgcaccacaaaagtctgtttttcactattcttctcagtgtgttatacaggtgagaggaaatggactaaccagagccacactcatagtttccaggagatacagccttggattgaaatttactggtgctcattgaaagatttttgaagcaggtgtcttcttgccctgtaagccttctgtaacatttgcgtttattgagtaagccttatttagatttacttttctatggagaataatagaccatgactaaaattctgaatcaatttttatatgatttttagaaggatattatatgaagttcttttggataattattaagtttagcttgagaatcaggtagctttcattatgtagtcaccttaggagcttcctgcgatccgtccagtgcttattttccaaaagctaagagtggtcaggctaacgtaggagaagttctaagtcatcatttgcttgctaggaattacataccgccattcattcattctttgtttttatgaaccaatgagtaggtgattatgtgtaaagatttccagaattttacaaactataggaatccctgacaaggtagttaagaaactgtgataaatacagaacagaaatgcttgaagtgtctttaagaaggttttactagcctggcggattaaagaaagcatcttaggctagcagtgtactgagatggtgatgtaagccaagtagaactgagattgagggcagtttaggaaagggaacacacaaaaattattttttaaaaggtacaccacaaaagtctgtttttcactgttctcctcagtgtgttacacagcaaacacatagacaaataagttgttctatgtctcttttttgatataaaattatgttatatgtatatttcactactgtggggatttttgtttttgtttttgttcacttactcaatacaacataatctccagtttcactgagatggctgatcatgtccactaccaaaaccatctctaaactggaattcagttgctgagccaaccccagtctcagcttttcttgtcagccccaggagacacagcactccttctgtaggtatccttgtctacctctctctcctcttgcagataacttaccctctggatctttgggccaaggcctgctaatcttagagtgattgtggctcagggtggcaggcacaatctccagaagtaggtgaaggtgatctcggagacactagacgctcttgtttgtaaggtaccaatagaaatgtctccatgcaaactgctccttcatgtagccttgagacttgagagactgcatggccttcattacatgaaggttggactgtttcttatctgacagcttggagtcttaggtatatgggtatctttcttggcaaccatcactgcttccttaaaaaggagttcatagatggcagtctggttcttcttaggcatcagtatcatgccagctgcagggtccaaggcggggttggaaagaagcgagaagagattttttgtttgtttgttttggttttggttttggttttggtttttcgaggcagggtttttctgtgtagccctggctgtcctggaactcactttgtagaccaggctggcctcgaactcagaaatccgcctgcctctgcctcccgagtgctgggattaaaggcgtgcgccaccatgcaggcgaggttttttttttttaagtggtactttttcttttttaatggttcttttgacaaacaataccataattattttatattgccctaatatctaagggcacatagataaagggtatagtagttaaaggggtatatggatttgtagttttgacatgtgatactttggagatttttttttttttttacataaattagggtggtttgatggttttcttaatctttttctgcattagttttacattcttactatatctactagttattttgcctttttgtttgtatgataaatagggcattctattttatttgattaagtccacaaaattggttaataatgcatcctatatgctaacagggacattctttgtcatgtgtgggctttcttttttcctaaatccttgtaaatgtatgagttagttgctttgatttcttggttcactatgcctaatcctttagggtttgttgactgaactgctggaaatgtgtgtgtgctttaggtacaacagtcttttgttgacttcttacatatctgactgacttggggtagggtggggcggggtggggtatgaaaagaagtatgagaagtactggacagtagtgctcctctttagcctactatgtcaactagatgtttagatttttcttcccccagaatctttctagatgtgtaagctttggtttcttggtaggttcattaattatcccttagctccctttgatttcagggagcagtatttcttcctgtctcctgatatttagtaataaaatattctgggaactttagaatgaattcacttactagaataagagtcttaaatttcagcctatcttaagccactaaatcaccctggaggacagtttctgcttaactgtggcatgttagacatttccagaccaaggtagtcacagtttgatcagagaataactgacatgcagaaatcagcatgcgtaggagcgggagtggttaaaagcacatgctagtcttgagggggcccccagtttcacttcctagcacccacatcaggtagctcaaaaaaaccacctgtcactggggattggaaaccattttctggcctctgccagcacctgtgttatccacacagatacactcacttatacataattaaaaataagttcttaaaatcagcatttatttacattgtaataatgtaatcaatctattctgacctgtagatgtgcctgttagtgctctttcctgagaaagaacctgtgatccctctttgttaatgtgccattgctacatctcttctcttatcctatacaagattggtgttttatagcagttatataaataaaatcattcaatatggtttttgttgttttatttttctggtagacatgttttctgggtgtcctcagctgaccttgaacttgctatgtagccaaggatgactttgaatttctgatctgtctccatgtccttctatctggggcattccataggcgtgcactatactcctggtatgtgttggtactgggaatcaaacccaggaaggactgcatgcatattaagcaagtactttgccatctgagattcatcctcacctccagtgtgggacaaatacggctactgtaaatggtcctgttgctgtgggtgtagcttttatttctctggggtaaatatcttttgtcaaatggtagtgtagttttaaacatgaggctcttaaagnnnnnnnnnnnnnnnnnnnnnnnnnnnnnnnnnnnnnnnnnnnnnnnnnnnnnnnnnnnnnnnnnnnnnnnnnnnnnnnnnnnnnnnnnnnnnnnnnntgactttggcctccacccccagggcagtagcatgtagtgaatgtttaggacttactctctgacttgtagtgctatcaaattgtggctttaattcttcttcttcttcttctttttttttttttttaattattgctgatactgaacatctttcagtatgacttagccatctgtttgtcctttttgttgacgtgtttgtttaaatcttgtacaaagagtattttagagttctgtattgtcttaatccttttaagctataccacaggctagataatttataaacagttcaaagttgttttatggcttcctaatgctatggccttttaatacagctcctaatgttgtggtgaccagtcaccctcccccaagccataaaattattttctacttcataactgtaattttgctattgttatgaattgtaatataattacctgtgggttttggtttttttaatggtcttaggtgacccctgtgaaaggtcatttaacacctctaagggatcaggacccacaggttgagagccactgttctagagactgaggaggtgaggtccaagggctgcatcgggtgagggccagcgtagatgaaagcatgaggtaaaagagagtgtgtgagagagaagatgaaaagagactaaactttcataaattggtttctattataacacatgggcagaacactggtgactcatacatcttacatcatgtcttgcttctcaacactgttgccaagattgattttccaacataggatttttagaaggtgcgtccacaccatagtgtgtgtatgatagaccctgatgccaggtagtactagccctccagcttcattgtgttgtttctttctttagtgatcatcagttttatagttgctgtacacttcacatatcttcacttagctattcttaggacatgtcattcctcaccattttacagtttctgtattgtatataagttgtatttttttggtctggtttactattaactttcataatttgcgtaatataaattgtattctttgtatttctagttgttcattattgatgttcaggaatacagtgctttttaaaggtggtgatcttactacagcttttcaaacctcacttaatagtggcattttcgtttactcagtaatatttttgcatacatgattatgacagtggtggatggggcagttttatttctaccttccaaaatatttattccctcttcccagtgtcctggctaaaactccaccgtgtaaagtgggagtaataagaggatactcttgccttgttcctgatttttggagggcccttgtatccctttaccactaagagtttcataagctcttttttcaaggtcaagttcttaatttactgatttaaagactctacagtgggtattttgtcaaaatactgctcaaatttgcatctgttagatagtatgacttttttagtcttattaaaatgagtttacattgattttttttgcagtattcgtctttaatttctagatcaaagtacttgtttataattttttgaaatggagtctgtgtttccagcttacatatataaaatccttagcaaatcctaggaaatcaaatccaccagtgcactaaaagaatccatcagtggggctggactctagtgaagttggtagagtactgattcagccatttgacctgtgtgcctttatacattttcttttttatgggaatttttgttgttgtttttaaaagtaattatttgtctggttagagaaataatgaactttcatttatcatcagtgtatgtgtttattgtccagagtgatgggcttcatgaagacatttttattcatagtctccctttccttcttcccaacttgcccttcctgcttgtccctccctctgtgtagagtgactgagctttttgtgtttgtgggtgtattagttctatttctctgctatgtcaaactacctgacactgacagaggcaacctaaaggaaggaagggtttgttttggccctcagtttcaaaaagcccagtctttcaggatagggagcatacagtgtcaggcggggacaggttgttggttacattgcttcagcaggcaaaaggcagagggttgtgatgctggtgatgcttagccccactgttcctttttatccagtctgagaccccaaacatagaatggtaccacccacttcccacctcagctaacctaatctagatagtccttcagagacttgtccagagactcgattccatggtgatcctgaattccatcaaattgacaaccaagactaaccatcacactctatagttttctttgcataaggaacatttttctgcctccctttctttcttccttccttccttccttccttccttctttctttcttttttttttttttttttttctttctggtttttcaagacagggtttctttgtgtagccctggctgtcctggaactcactttgtagaccaggctggcctcatactcagaaatccgcctgcctctacctcctgagtgctgggattaaaggcgtgcgccaccatgccaggctccctttctttttcttacaacagcttgaagtacaatttatgcatcaaccttgtgtagtcacagatttctgtagtgttgatctcagtttgagaacatttccattatttcctaaaaggaactctgttcttattaacattcttttttctgtttctccttagcgtcctttccaacagctattactcttcctttttggtgggttcttgctgttttggacattgtgtgtaagggcattcaccagctttttcactgagcgaatattttcatggttgatccttgttctagcgcatacctgatatgcatataatattctatggtagtgaacattcacatctattcattcattgagtcatagaagattattcattgagtcatctagattatttccagttttgagttttttggttttgttttatttttgttttctaagttttttgagacaggatttctctgtgtagccctggctgtcctagacttgctctatagacctggctggcctcaaactcacagagatgtgtctacttctgtattaaaaccttctataatcatttatctggacctatatttcagtttctgttgtgtatatacctaagagttaactatcatacattaactctagattgaactttttaagaaactgccatgctgattgagtgagtacctgagccattttacacttccactaacaacatgtaaggtttgagtttctctatttactaataatactttctgattgtattgatccagatgggtttgaaaagtagctcatcattgtggtttgagggggctacatttccatttccctcatggatagtgattgtaggtctcttttcatatggatattggccttttgtacatctttggagaaatatgtattctctcttttttttttttcttctttgagtgtttttgagatgagatcttactatggagcactgagtagcctggaagttactgtatagcccaagctggtgtcagccatgtggttctgttgcctctgcctcttaattactataaacaaagcctgttccagttgtactcagatcttttcctaattctattttgtaaattgtgtgtgcccgtgtgaatataagtacataagtgcctctatgcttgtgtggaagtcagaggacaatttgggtatcggtactcaccatttacctggtttgagttagggcctctttgtttctttgccacatctgccaggcctgcaggtctctaagagctttgaagggttctcttgtccctggctcactttccctgagagctctgaggttacactctcactgtctggtctttaatggaagttctgtgaactggaattcaggcctcacacttgcctgctaagtgctttacccattgagccagctcccccagcctctctgagttttaagaatataaatgactttgcatatttttgatttgccaaatattctccttttctgtgagtttgtctttttcctttctaatgttgtcctttaaagcgcaaaaggtttttcttcctagacagggtttctttgtgtagccctggccatctaagaactctttctgtagaccaggctggactttaactcacagagatcctcctgcctctgcctcctaagttctaggattaaagatacatgcttccacttctgcctagttcaaaagactttaattttaatgaagtacaattcagttgtttttgcttgtgcttttcagttttgtatctagtgtgaagtaagggcccagtgtctttttttttttttttaacatttaaaaatttttgtgtgtagtggtattcttgtgtgtatgtctgtgtgccacaagattgtctgtgctcaaagaggccagaaaagagcatctggttttctgggactggagtccttgatggtcctgagctgccttatggttgctgggaatttaactgtggtcctctggaagagcagccagtgcttttaactgctaacccatcttggcagcaccctgtcttcattcttttgtatatggttatccagttgtacctcttatttcttaatttgtttttctgcttccagcatccctatttggaatctccaattatagatgcttctattgttaaaagttgtcccagacattactgaagtgccatgggttttttttcccaatgtgtttcctttttttgtctagttttttcttgtcctgctttctaatccagcaattttcttcagtgtctagtatactgttagtctcatcttggccctccccccaccccactcctgctgttctgcatcttgatgtaaatgcaaaattctacaggttcagttttagtgtttgagctgtcatttctatctcagcatagttgttacttgtcttagttttggttaattttttgctacatgaatttttgctttcctgctgatttccgtgcttgctgattgtgtctctggtgccagaagctgaggcttttcttcgggggatgcatgttggaagagtcctccggctaagcttgggcattgttcaggggtgcagtgaaggtactggaaaactgtctgactcttttgaggtttgatcttaagctttctaggtacgaccagagcagctattagcctggagttgatgttgaccctgtgccctctgagttgaaaggattttgttctcccatcagcatttgggaacagcatggcctcctctggctccggcagtttgtttgtcacattcagtggttaagggaaacctccatatccagactgttctgcccatttctctcctctgaactggtttttgaattcctgccaccacagtgtcagtccccagagctcaggagcttacttgctctaactgggattgccccctgccctgtttatttttttgcaaatactacccagcaagtaaactgagaaaactgtagagaccaccatgtttgtttcccatgcctcctgggtaactgctaccctggttggtgtcttctgtaggataacaaattcaggctttcttaccccatcctgactagaagtgaaagtccttggggttgtgttttcagccatcgggatgtaatcagtgctcaaagactggtatatttccacttcacctgtttgtttcattctctctcaaactatgcctgaaccattgaggagattatagagaaagtttgtatgtattgtagaaactattgaccttaatcaaggaattcctaagtatagattcaatactgtattgaaagaaggctgtattttttagttactgaacactgtgtctagtgcttggctaggtctctgaaatgtttcagggcagatattttcacttgtatattaatagtacagattttcttttttattgttgctttggctttgttgttgttttgttgctctcttttttgggggttgggtttgttttgggagataagctctcactgtgtagaccaagctggtctggaactcccagaagagcagcttgcttttgactcccagtgcgagaattaaaggtttgtaccactacactgggcttcacagcctcaaaggctccaacatgacacagatattgttgtcttatatgatgcagttattacttgaataatttacccctaatctcaactaatctgagaatatcttagcttcctcttttttaaaggtaaaatttttattttcttgtgtataggatgaacagttttcagacattatgtaattttgtgttacataaaggcagatcttttatagtatccaaattctagatttattgctttagattattcatagttttgtttatcatacctgaggtcatttaaaggatattttttccagtgtgctcttaaaatgaaaatagtttcaagtattgatactttgctttaaaagtttaaattttagcttcattctgctaattagagttaatcatttagtgcattgtgaattgttctagaatggataaaaatcttgttaagccttctcaaaccgtttaaaatagtaatttaagtacctaattaaaccatctgacatttatttactcatggaaccaattttggcagccgctctatctaacccttccccttcccccttttttgtcttgcaggaaaagtaagaagcttaagctcatctttgtggtcactcactcacttgacagctttgcatctgagtgacaattccctgtcctgtattccttcagacattgccaagcttcacaatctggtatatctggacctgtcccataatcaaatccagagtttaccggcagaactcggaaacatggtatcactcaggtatgaagattcagtattggacttttaggttcctctgaaacaaaagggagcaaatatatagttaggaaattaagccattttataattgaggaaaggaggcatggctttgaggtttagttttgtttttttaaagttttttggtaagaattgactgtccagagataaaagtcaggtgggtccattgcttagttttttattaggatgttatatattttgttacatattttatttttgaatcaaaaaattgtaaacagtatagagataaacaactctaaggcactgttgtttaatgtccttatctgtggcccacacagacatatttactcatatgggtccatagtaggaaagctttggcatgaacaaagctagacttggttactgtgcttggaagcctgtagtcttatgggtagaatgtatagtgatgcagttcctttgagagattaaatttgccatatgtaaactaagtgatcttgaacaagcttcttagccagaggttagggatgttggcaatggtgagtaaaaagcaacgcacctggtccagcgtgaagattcagcaaatgataattgctgcttttcttctttgttttgttttgttttgttttttaaacctttgaggggctggagagatggctcagtggtttagagcagtgactattcttctagaggttctgggttcaattcccgcagccacatggtggctcacaactttctgtaatgggatctgatgtcctcttctggtctgtctgaggacaactacagtgtgcttgtatacataaaataaataattcttttttctttaaaaaaaaaatcttttgaaggttttgtttgaagatctgtataaatccaaacccagtgtaccggctcagagcatggtggtttccatggcttctctgctaccttttattataaggagtaaatacgtacagacgttcttatcagtctcagtacagctttacttggctcagttactgagtatttactatgacttttttgctagtttgatttctttgttttgtttctgttttgagacaaggtttttctgtgtagccctggctgtcctggaacttgctctgtagaccaggctggccttgaactcacagagatctccctgcctctgcttcctgagtgctggtactaaaggtgtgcgccaccactgccagacttactatgacttttgaatccttggaaacaaactggtgtacagaaccttctttctgcttagtgtgtgtgagaaagaaacccgctactcagatcttgtttttcctatccaaagaagtaaccaagatttgtatccagagacagagatggtagagatcattcccattgaaactgtgattagataaacaaaagtatgaacaacagggaagcgacaatgtctcaggcgatgttcagtgtttggttgactttttttttccttgaagattcctgtgaaatgttaatgtggttgtaagaaacattaaaataacctcttgcttatatagtttttacttttaaactgaaagtcttgtaagtttggtaaatataactgcagccgttgttaagctcactcagcagttttcacagtggctgtgtgttaactgcttttattgttgctgtaaccaaaaacttgacaagaaataaacctaaaggaaagactacctcattagattcatgattcattagatcatggcaaagccgtgatgcagagatgcacagcagcagtcacatcgcctccgccgttgggcagtggggctggatgggcttgctctctttttccgttttatttcgtgtgggttccgagccctgaggctgcctataatgaagtatccatgcattcagtaacttgtaaaaattaaagctttcatcagacttttttggtttttgacacagggtttctctgtgtagccctggctgtcctggaactcactctgtagaccaggctggcctcgaactcagaaatctgcttgcctctgcctcccaagtgctgggattaaaggtgtgcgccaccacgcctggctatttattttatggtaattttttccccctgtattttaccaaaagtgttgtctgtggcagttctgttgtttatttttaactatatagagtttgaggaaagccaaggctagatattggaatatgatgtgtaaaactctgtcattcttaggtacagattttcctagaaaatattgttgatttttctgttaagattaattaacgtgtcttctgacttcctggaatttttattatctatagggagctccatttaaattacaaccagttacgagttctaccttttgagctgggaaaactgtttcagttgcagactttaagcctgaaaggtaggatttcatttttttttttttttcttacagtttaaaagaagctatggtatgcttgggtggcagtgctgtcctgggcttcattgctctgcctgtgttgtgggtgggttcctgtcactgtcaccctcaggcaacccctgtctttgggtcctttggctcctgtcctgtctgctttctttgcttcggcttggtgctgcgttacttttgctatgctttctcatcgtgtcataaacaacttttcctttatgtttatatatgtttcctataatcagcatacagttcccataaaataagaaagaaaattcccccagtaaatagaaatatttgatttggccctgatactaaaaattacgtttttgagggtttctatttaaaaaagaagttgacttataggtacttagtattagaagtgggaaggagaaaggcagtgggaactattatgaagtggcttaggccagaaggagtcaaaagttcgatttttaaagggtgtcaagacgtgggcatgttctgtaatgtgattggttcttcatcagtctgggcaggtgtgggcagagagctgtcacctaaagcaaaggcttctgggtaaagtcccgaagagttactttcatacttctgaaagataattatagggtccggtaatgttctcagaagctcatttactgtatcataaaactgttcaacaaataaaaatacttgtgcatatgtaataatttttagcagccatcaactttgtaaatggttcaagtccattgcatgtcagagaaagcctctcttgtatattcttccagttcagaatcagtacaaagcacttctttattaacagtccattaataatctttatgaacttttgtgtacagtgcaaaatttgaggctggagacatggctcagtggttaagagtactggctcttctttcaggttcaattctcagcacccacatggcccctcacacacagcctgtaactgcagtcccaggggatccaaccccattttcctggcctccaaaggtaccaggcatgcatgtgatgcccagatataagtgcaggggaaacacccgtccacagaaaacacaaaataaatctttttttacaaattttttttttttttaaagattttatttattcattatatgtaagtacactgtagctatcttcagacactccagaagagggcgtcagatcttgttacggatggttgtgagccaccatgtggttgctgggatttgaactctggaccttcacaagagcagtcgggtgctcttacccactgagccatctcaccagcccaataaatctttttttaaagtgcaaagtttttttttttatatatatatatataattttcaaaagtgacatttttatttgttaagttattaggaactatagtgtaacattgttgtaatagtattttttgtggtgttaggtgattatattttcttagttttctaagtttgaaacactttattatcttagtttacctacttaaattttccccaggaaatccacttacccaggatatattgaacctctgtctggagccagatggaacaagaaggctactgaactacttgctcgataatttgtcaggtactgcaaaaagaagtaagtggctgtttgtttagactttttattaggaaaacatgtaaggatatcacctaattattattattttttctatatacatatatacccagtttcaacagaacaaccacctccaagatcttggatcatgttacaagaaccagacagaacaaggccaacaggttggtagccctgttttttaaaaataattttttatcagattttgataaacctaaaagtatttttgacaatgctccagattatgaacaatatttaaggttgatttaaaggtttttataagttgattagattcgggaaataatgataaagatttaattctgtaatgcattgcttcttaaccaggaagcaatttctctttggaggacatgtgtagagtttttgctacactgctatgtattcctggatggacacatgtgcatactccaggagccaccctgggtcagcagatgaaagacacacacacacatacgcgcgcgcacgcacgcgcacacgcacacacacacacacacacacacacacacacaagcttatttttaactgtgctttttttagctcagtggccggacacttttaagcctctcgcagctaacatgcccttagctttactcccagttcaacacctctaattcttccctcaacttagttgcccagttatttactccttgctcagcaccctaaatttgctctcaacttagttatgtttctagtctcctgcttgctatcccaggctcagttggggaaggggccaatggccactccacccaagatctcacatagctggtggctctttgtcctaccgaaacatgatgaatcctgaatgcctttcctcttctggccactgctagcctgcctgtgggtaactggaagccctgcctcttctgcccagccattggctgctagcatctttatagattgatcaagaaccaattggggaacaggaccctcagcattacttggcaattctgattgtcaaaactgggagaaatacaatatggagaaataggattgaagtcagggacacagctaaatatcccacggtacctgaccaagtcagcccctataagagaaaactttagccacctccggcacttgaccttttgtatcagtcagattcacatctttctacattggaggtttccatgtgctgatggttctaaaggtacttaatagtagggaaaataaaagatagctttcttacttgagagaaaaaaaattgagctgatggcctttaatctctttaacctaagttttatgggaagagtttagttctcaagagtatgtttaacaaacagcatttggctgatgatatgcctgaccttgtgcatgggattaagacacgggctactttgtttcatggtactttgcattattttgcttcatagatagttaaattgtttgggcttttgttgtagccctgtgtcagcctagtctaccattgccattcctcctgtagccaagacaaaattttcttagaaataaaatatttcttagtctatgtgtctaagagagtgctgttctatagattataatgaaagacttttgcctgccccaagaagccagaagtaacttctgtgatttgctgttattactcattctattttagtgttctgaagccaaactcacatactgtctccaagctagtctgcagttagtctatcgggaaaagaaaattgggcagcctgttaaggaaactgcttgtcaagtttctgtattctgcatttacagttagtggcatagaagaaataagaagtcttggtttgtcctgttttaggttctatagataagaagcacattgtatcctgtttggttcatctttctttacatcatttatttttcttaagtaatagcttttcagtgactgtatgttgagtggttaagtctgacttaacatagtgaggactattgctgaaataattatggttgtttttttctgccacgtgtgtgaataagttatctttcctacagccttgttttctgtcatgtgctataatgttctttgtgataaatatgcgacccggcagttatacggctactgtccatcatgggcacttaattgggactacaggaaaaaggccattattcaagaaattttgagctgcaatgctgatattataagtcttcaggtaagacatatagaagactcttttaagttacacgaccctccaaaccaagacaaaataagaagcaattacacttgaatacattctgatatatttgaaatgccagcttcagcggcccttaaaatcctggctttttctggtttgggtggttctgagaaaagtcaactgtcctgctgtgcatccttctgtggtgtcagataaaacaaatgggttcagttaggttttaaactttggtagtaccttccctcctttgtactgcatttgaattgggtggcaaagttactgaagttgtgccattgtctggatatattctcactttaccagcactgttactggaaaattatggtgaagtgggaaaagattggactgtctgcacagtcactaggcttttttgcccaaatcttagagtaagtaatacagtcttggtcagtttgctttctttttctgggtctagaattacaatctgtgacatctgtagtttcttcttgtgtggtccttgttccatcagctctaagacatgaatatacatgtgtaggtgaacatgtctttcactttttaaaaaaactatttatttgtttattttatatatatgagtacactttcactgtcttcagacacaccagaagagggcatcagatcccattacagatggtcatgagccaccatgtggttgctgggaattgaactcaggacctctggaagagcagtcagtgttctaaaccactgagccatctatctagactgtaaagaactagcattggcaactggtacagtaaagttttaagattggttttagataaattacattttggagatgttccattctttaatctataacttggtctgttgaaaaatattacttcaggctatacatacggggtgtataggacagatctttatctttgaagtaactttgccggttatgatttttcaggaagttgaaacagagcagtattacagtttttttctggtagaactgaaagaacgtggctataatggattctttagtccaaagtctcgagctcggactatgtctgaacaagaacgaaagcatgttgatggctgtgcaatattcttcaagacggaaaagtaagcctaagctgatttcttaaaaagtaggataatgtcctcagtatttgcagggtggggctaagggtgtagcaatttattgataaataagagaaaagaaaagaaaagaaaagagaaaagaaaatgttattgacgaaaacatgactatttaaaaataaagggtcttgttcttttgtttgtttgtttgtttgtttgtttgtttttgaaataacttgttttgggggcatattgagagaactgctgtttctttgggtggtttcctagggattttattctgctgttaattgaaatatttcccatgtaatcttccttcttggaaagctaagttttggaaaataattgtttaaaaattatgagatgaaatatttcagcagtgatggtaaagatgaccagctatactgtactaagttgtaaaggtatttccaggtcttgtctgtagatcagtaacaaactgaatgcaagtcttcagatctaggaatatacgtcagcgtttagagtctggggatatacaccggtgttagagaatctgcctaacatgcacggtgaatgcaatcccagtaatacaaaacaagccaggttagactggaaacagcctgaagtgaatttggggagcttggtactgtggagaattttccacaatgtgactgaagtgatttttgtatctggtaataaagttttagagaaagactcttccctcagagctaatgtcttactcccgatcccatgtttatgctttgtttcagattcactttggttcagaaacacacagttgaatttaatcagctagcaatggcgaattcagaagggtctgaagccatgttgaacagagtcatgacaaaggataacattggagttgcagtactgctagaacttcgaaaggaattgattgaaatgtcatgtgagtgatggcttcactgcctgtaaaattgacactcccgtcttcccaaatttaatagttccaattagataccttcaaaacagaaatctcagtgtgtttaataggctggtccaacacctgactatttgtcttttctaagtacatatatcattttctctatcacaaggctaacagatgagaaatttgttgccccgaaaaatcataaacttgagaaggcataacaaacaaagatgttttaagacactgaggtagatagtaattgacacagctgctcaggggcaagaattcatatgcgcccatggtttcttatcagcaagggtgcttggtaaagctaactttttatgagtcagtaattctgctaagggtcgtgagtttggggaaggttgactacttctaaaagttaagagggttgtatatgctgacaactgaaacttccatcactgaagttgctacaaactgtgatgttcctctcagaagtgaagaatattgataaagcctcttagagtctcaaattctgcttgtggaatggacagatctgaattcttctccattcgttgttgtggaatttgggatatttaatttaaagataacacctagtgactgaggatcatgtcccaatgctagtatttgcagagtctacacaagatctgtgttcattctccagttctgaggaaataaacaggccaaagaatttataactggtaaaaagtacatatctaagagaatttagatttaatatgagagactggatttagtacttcaaaaaatagctggcatgagctgtctctatctaggtaggctttagtgctggaagtatcaaactaatgtagaaatcagttcttagctttgttgtgtatcagattcagtgattgggtaggaaattgttagatacgttagattatcttctgaagtttcagttgttttcagacactgtaagaagctgtagaccaatgagcaggttatgtctgttttatttttatctaatatagctggaaaaccacatctgggaacagaaaaacaacttattctcgtggctaatgctcatatgcattgggaccctgagtactcagacgtgaagttggtacaaactatgatgttcctctcagaagtgaagaatattattgataaagcctctcggagcctcaaatccagtgtattgggagaatgtggaactattcctcttgtgttatgtgcagatctgaattctttgccagactctggtgagaaaagtaatattttctatggaatggctactttttgatttacagattttttttttataaagaacctatgtgcatatctgtgcacaagtgcatgtgtgtgtccaggttttcataaggatcaaggaacagctttatgtagttaatcctgccatccaccacctcacgggctctgaaggtagaactcgggtgatcaggcttttgggacaagcaccttcacctgctgagccatctcagcagccctgttacgtattgtttgtttgtttgttttttgataattcagaatttagtctaaaggaaaattcattttgtagtggcagctgtgtacaggttttacaattttttttctataagatgggcaacagggaaaagaccattctgaagtagtagtatagaaacctgtggaagtgatgataggtgttgctcattctctctgtgatctccccttcctgattcctcactccccaccccaccccttttttttgaggctggtttttaaactcaagaaatctttctaagtaggtacaaccacaggagacgtgtcaccatacccccagattccaggctgatgacttgaaatggcttgttagaaacatgttttgttttaatttcccggagacatttataatccagactctttagaagctgtaaagataacttctttgggattctagctggtggtaaactatgaccacagttatatttgattaacttacagaatcccaaattttgtttcttctgatgacttgtataaaaagtacatcttagaaattaagaccttggggagctccttcctttcttgctccccggccatcttggcggctggtgttggttgggggttgtcccgcacctaaggcaggaagatggtggccgcaaagaagacgaaaaagtctctggagtcgatcaactctaggctccaacttgttatgaaaagtgggaagtacgtgctgggctacaaacagactctgaagatgatcagacaaggcaaagcgaagttggttatccttgccaacaactgtccagctttgaggaaatctgaaatagagtactatgccatgttggctaaaactggggtccatcactacagtggcaataatattgaactgggcacagcgtgtggaaaatactacagagtatgcacactggctatcattgacccaggtgattctgatattattagaagcatgccagaacagactggtgagaagtaaacaagaaagttttcctttaataaaactttgccagagctccttttgaaaaaaaaaaaaagaaattaagaccttaaaaaaaaaaaaaaagaaattaagaccttttatcataaagatatctttgttttatatgatacaacaaaaaagaacaagacccttgatcttgatttttgtcatcaagtaggactctgcaagcttgatcttattaatacttcctatggataagtagcaccgagaataagcctggttccttttagtagcaaactagacagttcactgtgttccagctctgttcatattctcatcggacagtatgcatgtgtaactatacaccaccatattaatagttgtcaagtacgataatacattatttttattattaattaacagagccatgaggaagaaacttaaattttgttttcatgggcaacaaaaagtgcctgagaactctagtcctttagccctgtgccatcaagtcctcaagcagtctgggatccttgctgcttaagagtgggcattcttacagctccatatgctgctccacactctagttgcaaagtattggagggaatgaggaatgggaaggttaaaatatgtttgtagagcctactttatgattaagagtttaagaaaatagtgaacttgctctttaacttgatgacattctgttccacagtttggtgggataataagatgacacataaagggctggagaggtggctcaatggttaagagcactgatagctcttccaaaggtcttgagttcaaatcccagcaaccacatggtggctcacaaccatctgtaatgagatctgacacccttttctggtgcgtctgaagacagctatagtgtacttagatataataaataaatcttttttttaaaaaaaaagatgacacataaaaccccgagtcaggttgcatagtcctgtggatagttgaggacatgagggaacctgtatactatttcgattgtgatcttctcttaagtctgaagttaagcaggaatattctagtcatctgtttgatttaaccatagaaggatttgggaagacacatctatttgtcagatagttttaaacaaactaaaatgtaaaatatttgggtattataatttcataaggatgaatttggacagatcatgacaaattaagaatttgttttctgtgtggtatatttgacaaatgtcagtgcatttctgtttgtctaggtgttgtagagtatttgagcactggtggggtagaaacaaatcataaagacttcaaggaactgaggtacaatgaaagtctcacaaacttcagctgcaatgggaagaatgggatgaccaatggaaggatcactcatggtttcaagttaaagagtgcctatgagaatggcctgatgccttacaccaattatacatttgatttcaaggtgagctttcacagcctcatttttatcagcatgttttgtaacttcttaagtcttaaacaccagtgtatgctctgactggagctgagcagcaagaaggacgagattggtgtcagtctttctagataacctagtagaatggtttccagagtaaaaagtcaggtgaaatgtggctgcaaagcagcccttggttattctttgctctttttgacatttatttcttaaatactggtcactaaaagccagatactctagtatgtactttgtgtccttctgtcactttacctgaaatgcctttgaatgccaaaaggtggattaccgtagccacttttaaacattgtgtgtgtgtgtgtgtgtgtgtgtgtgtgtgtgtgtgtgtgtgtgtttctggggagggtgctcatgctgccaccgtgcttgtgttgatgtcagagggcagcttggaggagttggttctctccattatatggtcccctggggattgaatttagcttgtcaggcttagcaacaagtgcctttacccactgaaccatcttgctatccttacagaagttgtgtgtgtgtgtgttctgtgcagggaattgaatgcagggtctcatgtttactaggcaagtgttcttaagcttgcccctagtcttggtttctaaagcatgctatgtgttctgttacacagttgctctcttacacagctaatggcttgcagcaaggacacctgtctcagtgatcatcacttaggtggtggaggtttatactcacaggcgggtggttattgggaagacaagcttggtgaccaaagtagacaagacatttttgttttgttttgtttgtttgtttgtttaactgagatgggaaaaaaacacttgaatatgctttactgtccttagctgagcacatgagaggagggtgaagttaatggaggcgagcccccaaaccggcatattcactcctgtgtgctgtgttacctagcagtgctgaagatacacaaaatggacataggtctgcacttgggcagctctgatggagtgggaaagacatcttgtttttgtttgaggcagggtcacactacacagcccacagttgcctcagattcttcctcctcttagcttcctaagtgatggcattacaagtgtgcagcagcacactcgtgtaaaaagcggaccttggatcaggtaacttcctgttactgtgacaaaacgcttggggttgtaaggtttattttagctcttatttttgaagttttttgtacataatcaagttgtactgttgctgtgggcctctgtattgggagagtgtcatagtgagaacatctgacagagcaaattgctcacctcggttgccagtaagaaaaaaatggaaaaaggaagaggagagttagggtctcataatcctatttgacagtgtatttctagtgacctacagacctccctgaaggttcttggcatctcccagcagcactgcctggggtaccaagcctttaacatctggacctttgtgggggacattcaatagtcagtctcaacaatataaatgagtatgtccctatactttaacattagaaagggaaaagaacagtattggaggtgaaggggtgactgcaggacttgggagggtttggtgcttggtaaggagctagccaggtggcaagaagaacgtggttacttgtaggttgttaggagagagcttatctagccaggactggttggttttgcagaatttgactctttctggtttctgtttttcttatgtagggctacatgtgttgcacatactgtcgtttcttcaacttagcaaattgcttttgtttaccaaataaaacgtctaaagctatatcttgaaaacagttgttatttcagtgtttccttgattggagcttaccatttttattgttgttttccagggtataattgactacatcttctattctaaacctcagctgaatactttagccatcctgggacctctggatcaccattggctagtcgagaataacatcagcggctgcccacatccacttattccctctgaccacttctcactttttgcacaattggagctcttactgcctttcctgccccaagttaatggcattcaccttcctggcaggaggtagtcactttcagaggacctcagatttacttgtaaactcgtgaaaatctgaatataggagagtaaggtatggccactagggatttttctcaatgatcatttgaattttcagtctggttatttgataaagggtatagtatgaaagccaggtgctagcaacagacaaattctgagcccagtgtactttatatactgctagacagggactggtgtgtttacaccttttaatttgttacaagtaattttcctgtttcttctctccaatgtgttttgtcatgccttgaaataggaagatgtgtgagcagtgtgctgtttgcacagaaatccacagcactgttttctgaggccagtagtaacatcagagaccgttcttccagactttactccctcttttttcagacttgtttgtaaaatgtagaatttgaatttagcctttatgattgtatatgatccacagaagacctgatttatgaagttttgtactaaaaaaaaaaaaaaagcaaaattgaaaacagttgtattgtaaactaaggctaattttttttaacctgtgtcctgtgttctgaaggccagctggtaacaaagctgcatccgactttctctgcagtgatttgcactgttggggttgttagcccttttgtactactttatttttaaattgagaacattactctttaaatgtaagtttgcttagaccttgggatattttcttggaccagaggcaacttatgtatgaattcctgaatttctatggaaactttctaccaggacagataagctgatctgtaggcatttaatggactgaagatgacagttgacatatgtacattctggtatttttaagtctttaagttttaactttttatgttaaaaaaattacagctgcttaggtacagcttctaagtcctttctgagacattttctgttctgtctccactgtgcctgcctaaatttgttctcaccgagcactgcctgtgcatgcagagaaaatctgtgcatcttttatatttttaaaaactaacatttgtgagaattttatggaaatgcttttgtatgagctgtggcttttccttcctcgttgtgaagcgttggatagcacattctggaacatgttcatgggtcctgggcttgctcaccagacccaagcactgcttcttggtgtccttgcacccagagtgccactatcatgtgtatttcttattctcttaatgtttaaaaaaaaatcattccttttttttaagaagagtaattttctgtttatgaagcagtataaattagatgcattttcaaaacagtttccctaagacaattgtttggatcatttttaaagtgactaaggaattttagtatgtcaaccaagataaaagttatactgtaccctatattttgcccatagtgccattagtagattagagattaaagtcacctttaactttacaaagttaacttgtatatgttctgttctcagtcgttagttctctcaaaatcaaatgaattcagagggaacttgtctggctgcttttgtttcaactgcaggcagtggagcagaaggacgccgtgtggcactaaagtgaactgttgagtgttaacagttttatacagagactgagccattttggatgactcaaaattttatgagaagacatttaattgcttatgctgtttttaagaggaaataaaattacatactgtttaaataaatgaattttttctttttaagaaattctctaaaggtcttgatatcttggaccttgtttttcctttaaggttttttgttttgtttgtttaatcgtaattgtaatgttgggtttgtttgttgtggatttttactttgtttaagttgtgctggcaccaaacacgtccagtttgtaatcaacaggttggtgtagaaccagtacataacttgcaatggctttttgtcctgtcttcccccacccccacccgtctctgtctctgtcttgtaaagtgtgaatatgagatgtactgactcgattttcttaaacactgtgttggtagtgtgcatcatgacaatttccagggaaggtggactgcagtgggtggactgatgggactgaggacccactttccctgtgacctgctaagggcagcacaggtctggagagtgtggtgccaggagaggggaggagcacttactcatctctgcatttgttagtggatgatgtattcctttcatggatactggaactagagtgcacttgttagatgctaaaggtttgagctttacacaaaacatttcatctgtatttgttactgtctacaatatatttgaatttgggggcagcctagtaagatataattgcctgttatgtcttgaaagtacttgttttgcctcttttaggcatactgcattctgtgggtcagtttgaacatctccaccttgtttagatagtgataagttgaacagagagtgtagatttacaagtataatcttcaaaagaaaaatattttgaatctatcaagaaatgttcacaccaaaatagactgatactttgttaagcaaggttttatgttttaaatgctttgtgtccaaaataatttccaagaaactatacttcttaaaatgcataaaactagtctgttttcataatgtagattatttttgaaaaattctgtaataaatatatgtaatgttttgctataatgtaatttcagtgttcttgctgataagtacatcttaggagtgttttacggagtgtttggaatatgtttcccttttaaagatgagcagattggaggcactcaaatctttgtaaattttatgaagtacagtttacagtattggtggtaattatttatgctttgagaatttaaataatgttcattgaaattaatttatggtatagtataaactaaaattctagaagtaaattgttgattgcagctttaataatcccagaacataggcatctccaaaaattgtttttgtttgtacttttatttgatttggtgtcaaccaggaaaatttatttcatattagcactttgaaacctaaagatataattaaattcggtagaatgcacttctaaatctttaaattataattgaaacctcttaagattccattttccaataattaacattcatggtttaagagttccactttttcactatttaaactacagaactcatttccatcctgactctgaagtttggtggtcatgtcatagaaccaagcaggacagtacagtcttctgatgagtcaaccataatatccagtacagatgttgcagataatttcgagaacataagcaggtgtcctccaaccacaagcagtattttaagatgttcgctttattccttttggttacataaattttaaaaactggtatgttgatgtagtgtctaaaatagagtagtctttattcacagtacattatgttgtgtaatgcactggactaactcttgtttaccattcatgtaacaaaacccagcacacttctgcactaagctcaagaatgtcacatctgcctaggcagctcttgataggggtgatgagaaactgaatttacaccatatggactggtggtaacaagggcttttactgttcttttcagtggactcttcttggtcaaattgtaactagctagtattatatttatatacagggtctcttttccttaccgatgtattttcctactcatagccaaccaataaattcaatatctgtttcaaatattttaaaagtgtagtttgtacagctctagcactaaggcttccaaaacaggtgttaatcagaagatcgcgcatttacagttcagagtcctctgggacagtcacagttacccttccggggttgggggagtgagccggggacaggcacacacggtacagtgaagtgctgggaacacttttcctcatgggctgtgttattctgtaacactcgggttttattgttggcttttttttttttttttttttgccaaagttcaattttatatttaggttatgggtcatccttttacgttttagggtttttgttgttaccgtataccccatggtataaaaacgaggtcatgttatggaaggacactgacatatattttaaataaatgatttaaatatagtagcaagcgttgtgttgaggttatgataattattaaaggtcttattgttaatgtctaaattttgttgtatgtataacctttaaaaaggttttaatttccaaggttttcatgagtggatttacattttaaaaacaaaacgttgagttcctttctgaaactgcaccattctatttcagaggctgaggcaagagggttgtggtttccaatcatcatccctcttaaaaaggagagaggaatgactacttccatgggctttgtattatgcatgctgaaaaaaaaatgtttaaaatcagaagactagagagaatgatgttaggttcttagagtaaacacatattatataaactgaaagcaagtataaaaactaagtatagtttgtaaattctaactagtgtttttttttttttttttagggaatagttatctaaaatatgagctgaaaatatatttagtataacattttcagcttttaggtagcagtgttgatgtatatcacaaatccccttttttgagtttaaactgattttgataaactgttagagatagagataactacagagatttaagagatcctgcgatctgcctctccctcccctcccaagtgctggggttaaaggtgttctctgccattcctgactttacagagatcattctaacctaacatatattagaagaagataggttgtagaagacagcccttactagaattcttggcagacttgagaggctgtttgtaagtacattagtcaccagtcaggctccaagttcttggtttcttggagatgcaaacttaaaccactatgatctaccccatagttactaaatttacattggacccgtcaggacaaacttcttttctgtcgactatgatctaaggcacacttaagtaactgttgtcagtattctccagcctctgggctcagactcggtgaacacaaatggagagaactggatgaatgggggttaagccttttttttttttttttggtattgatgaacaatcattttgaattgcagtattatgcttaattgggagaggtttacaggaataatctctcacttgtttgcagtcataacctaatgcagtaaatgccacgtgcatatactaaggagcaacacaggtcaagaggtgacattgtggctatgttttcaaggactaagaacttcttttctagaggaatgaaagaattgtattaaaagcctttatggactgtctatgactttgggtggatttggcacatgatgtggtccaagctcatggagtgcacttggactacatgggaagtttgaactttgttttatgtgtggtgtagagatccacacgaaggtttgactgggaagtagtggaccaccatacctacctggacttaagcttttctctaattctctttaacaagatggaagcttagttgggtcaccacttccttaattccatttaatatcttcagtctggttatttccttgaacacaggatttagctgcattccacttcctggtgcccctttaatccttgaaccatacttaaaaaaaatctgcaagcattactgtaagcagcactatggaggagagatgaagtagtgagactagtgaccagctgctagcttcagtatggttcagttgaaagatggtgagcaataaatgtccatggtgcatgtgtacacagagaaagaaaacatacagagtaatcctttgtcaatcaaagcagtccaagaatcttaaatgagtttcttctttgaggaattagctctgtgccttagccacccacggcttttaatgacttgaagcctggctctgtaacagagcaccatgaaatagcttttgttgtttatgaagcttgacttttacaaaagatttcttttataaagacttgatttttatatatatatgactacgctgtaaatgtcttcagacaccagaagagggcatcggatcccattacagatggctgtgagccaccatgtggttgctgggaattgaactcaggacctctgaaagagcagtcagtgctcttaaccactgagccatcttgcagccctacttgtcacttttcacctgtctgtaattccagttccagggagaccaaagctttccaaggacattcacgctcatggtgtacatactgcctaactcacactttgttttgtctttagaataatttctgggtttaatttttttttttttaatttggctggggcaagagctcactgagtacagcacttgctgcagaagcgtggggaccggcgctaagatccacagcgcccacagtaatgtatgccatctacaggacctatcttaggaatacgatagagtagatagacaagaagcagatgaaaagtgtcacataaacacaattagttgtcagtggttatgccaatcagaaaacacaagcttaaatccttactagaaactaagagtttgcctgtgatgatcacatcgcaccacagcgctccaaactggtggactaaagtcaacaatgaggaattggttcacagagcagtcctagtgggaactctcaagtgctgggctgctgatggccagcaccacagcataggaagaagactgtcactgcagaagacctggattctgtttccaacaccaacttggtagctcacagctggttgtaactccagttctagcaggaggtccaacacttgtcccctcaaggcaccaggcaccacagatgtggtttggtcagcacttataaatcaaaagaaaaacatactgatacatttcaaaaacaaaagttatagggtttcagcttctgctagatgtagtgtccttttttttgtattaatagccattgataacaatcctacaactaactaggcatggtagaacagccctttaatccctgcatttgggaagcaaggcaggtgagttcaaagccagcatgatttaaataatgagttccaggccagctaaggctacatagtgaggtcctgcctcaaatccttcatctagcttttgtttaaaacaaactaaacaaacccccctaacctgtggtattcctttgcttcatgttttgtgaaaacatccctcatcagcagttaccctgtgttggatcagaaagacaaggcacattcttgattatttctttcatccattttcagaacaataagttagtttccctacattctttgatgaaaggttatctaataagctatttattgctcaagaccaagaagaacatggatttatatacacactggacaaggtttgtttgtttcagctattactattaacattcaaaaataacctgatctctatggcccgtgtatctttgagatggtcctggtagtcactggcaatttcctatctggtatgaaaggttgttacctcttgtatttcctatatgagggcagtacttaaccattcattcaaagacttctgcttcttagagtgggaagttgcacgtggagaccaaaactgtataatgcaggaaggaatgcttttagccactgtcatacctgagttctgggtcatttcagaggacagaacggaaaatttcccctcaaagataaaatatgtccatggtgttttgaaaggaaaatgtttcctattgtcttggaatttgaatgcttggtcccctgtttgtagagctgtttgggaaggcttagaaggcatgaccttgtgggaggaggtgtgtcattgggaaccagctttgacgtttcgaagacccatggtattcctacttcacagtctctctgcttgtgctgcccttcaaattgtgagctcacagcttctccagtggtcatgttggctgcttgctaccccactgctccgacacttaagcccccagaactgtagataaataagtaaaccgttctctagcttgtcttggtcgtggtgttttaccacagcgatggaaagagtagctaataagtgttgatagttctaattccgttttcgtttgaaccataaggtttgtacttaaaatgaatggtcctaagtcagggcctccctttaacttggccagaacaacttgggttttgatgacactaaactgacttttttaagaaataaagatcccttcatccccagtactgggagtgagctcctgagtcttgtgcatgctgggtcagacctctaccactgagctatattcccagctcataattactcatccaacttagactgtaccatggacagcctcaggatagcaatgccatcgctaggaaaagtgaactgacacttaggcggttcttgtcctcagggtacagcctcttgactgacatctttttctttactatagattgcttctgttgtggctatcctcagaaacaaaattagatttacttcttactgtcaagttttagaggattgtctttctaagaatacatttatttggctttggtagtagtctcaatggttacagtgggaaattaacaaaataagatttatttaaggaaataaagctttttagtcctttctccctgccattgattaaaaaaaaaaaaaagaaaagaaaaagaaaagagagagaatcacctttcttaacaaatagaacctgtctcgtggtgcgttctcagagacacatgtttatgtgcagggattctgttggaaaagatagagagatggtgtgtggcctttaaaagatgaaaactggaagctggagagggagatggtttagagtgcttgctgttcttccagaagacctgagttcagttctcaggatcaagtccggcagctcataatcacgagtaactccagatgtaagaattagacacttccttaggcactcacgcatgtgcatgcacacacacacacacatacataaacaaaagaaaaacattaaggaaaaagagcaagatgaaattcaggtaccagattggagatgacatctgtgtgaacgaggagtcatcttctagaactctgcacacaccctggagttaacagttctgcggtagtgtgggaaaaattaaggaattagtattgggcagaggggaagctgggtgctaatggaatcactaagtggtggtccatgggagtttgaagacccttcaggtttgttccctcttgaagccaagaggccagctctttatgacctaccccagaaaatgtggacttcctctggctcagagttgtaaccttgttctatgagggtggttcccagaaggcaactgtcagttgccaaaactctcaagagctatggagaggaccccgtgaaggggaaactgggtgacatatggtgacatccagtacagccacccctttgcactctcctgacttctcaaataacagatttggggatccacctcctaatcagaccaggattatgctggtctcatttccccaggcatgagagctggtcttggtcttatgctgaatcctaaggtctcctctaaacatttcttcctcactgtcctgggggagagtggccggtttaagcagggtagcagagctagctcagactgggctctttttattcagtacaagtccgcccactcccaggtctagtgagcttctgtagtgtttctgtggaaacttagggtgtgttatcagacaatctccagagtctggccatgttattgttaacaagaagttatctagggacatgtcagggtgtcccccacccgcttcaccagagttggaaaacaaacaggtcatctatatgtgtttgtgactattcagactagcgtcttccacaaagagccgtacgatcataggggcagtgtattgaaaatgaaactcaagtctcactcgaatccaggtggcttttttctctacactagtttttgatctcattcattctccaaattcgaaagttcaaatccctggttatttttataataggaatagaaaatcctaatcccagccctatgtttgtgtgtaaaagatctaagtagctccagtttctccctcttcctcttccctcctcccccttccctcccccccccacacatacatacacacacacacacacacgcacacgtatgatactttttggctttctccagggtttgactttgaggcaagaagacatcaaccaaagctgttctagctgggtttattaaggtacagaggaaggagaaaggtgtgagcagcagggtttccagctcttgttaaagaaaaatatctcgtcaggcatctcgtcaggcagaattttcccaggttcccctcaaccgaacattgtcaggaccccctggaaaagagaagccaagcttgagagtgcccttcactgctaccgaggattgctgaggagaggacctgggtacccgagcttactcaagacaggaaggcatagtagctggttctggggagggtctctgtaaagcccatagggagagagccttaggacaaacgtcatggctggctggcagccacttgcgaaaggtaaaccctgaacaactctttggagtcttcccagttttgttaggatatggcttgctggagcagatcaggaagcaaggctctctctctctctctctttctgatgtggaaggtgtctggggaggggtaaccacccaggaggaagtaaccacgaaaggaagatgcccatgttaccagcagtgacttcacagctcctacagcctcagggcccagctcggtgacacacttcctggatccctctatgagaggatccaatgggatgcccatgctggccaggatgaacctcaggatggccaagtggcttaatggtaggctaggcacagcccctgccacagcctctgcagctggagcaagggcggccacgggttctaccgcaggcttggccaatgagtccatgaagaaagcaacacctgccaatacaaacagagaacctagggccttctcaaagattctgaagacctaactcctccagggagggcacccaagggagaagtcatagccaccctcctacttcttgattgatggctgccctgtgtcaagggagatgccaacagaagttaggaaaggtggccatatattgggcccaggaaggagatggctacagagagagagccataggagatgggtaaggtttttagagttggggacattcatactgtgccttgctgattgtggggacattaaccaggttgagagcagatgggatgggtggcatcaatccagggctggcccttgaagatgtcatcagactagtgggtgagctgaaggtgagtaggtggatatgtgagtgagaggcagctcggaggctcaggtgggactcaggttgcgctgacagcagaaagctttaaaggatcataggaaaaatagaggaaaccctggaagggataagcagaggagcatctgggttcccctgtagacaactctgctagaatagctcccatcaacatctgcacaagagtgaaggctatatggtaaaaaccagctggagcagtcagtggccaggaaaaagcaggtaacaatggcagatcctccataggagatactaagcccccaagggaactcaccagagtcactgagcagagccacacagagcactagaaaggtggtggtaagcttcatggtagaatgagtctcagaagatgctcccaggacctataagacaatcttcctgaagcctggctccgatgggttcatatatccaggagtggaacctcaccctcctgggaactgtgttgtttgctcagctaacaggcagaaaggcagccaacttcctcttatggtcagtggaccctgggaggctcgcatatcccacctcagtcctgaggatttcctcttggcagggtctcctgaactcaagtgctaggcctttcttccaggaaccacggatgccctttgtcttcatagggcccacccaggcctacaccttgataatgtggtctgactccgcctcaaccttgtcacggtacaggtcaggggcccatggctcggtgggaacaggctccccacgggcgattatgtaggttctgggtctggaagcatgaagagcacggggtgaatcagcaggtcccagggactctagatctctcaatgagctattggtccctggtcccagactatggaaatgacacaccatgacagtcttctcagctcctgctggtctgagagcaccaatccattgagccagaaaggaatgcctaatagcctggctgggcaactgggccttactcctggctacatatttagttgggccacaggtagctgctaatgataaagggggcgggggagaggggctgtgacatttttctgtcttttaaatcactctcaaaggcagcagatgagcttggtatatttcagtttctctaaaagccctttcttgtctaccacccgcagaaatgtagtagagaacgaagcacggatacccttccattaggctcattagtgggaagctgtgacttccagcattttagaatggctccgtctcagaagttgagcatgccttgacttttgtagctgggaggaaagggtctcccgcggcccctgggctgctgtgaagactgcagatcccacctgtttccagcccgtggcttgcgagcatgctgacgttgtctctgcctattccttagtcttttccttattgctttgtctgggaagcgtttgttagttaccatggaagtaatttcggcgggaaattagttttcagcttgtgaggttgcacctcctttcaatggttttctggaaggaacgctgcctgtaagcgtccatctgtgtgaatgtagagggcgccactgccacacccagaataccccgagcctcttcctctgaagggcgcatctgagatgtggacattgctctgaaaagacaagcccagttggcctgacagcggtgtcccccaaaaccatcgtttcactttctgtgacaactgtagtccaagaacattaaacagaaaatcccacaactaacagttctcaactttcccagaatttttatcaggtgtaacccaccttgctttcttgcttttcttcttcttcttcttcttcttcttcttcttcttcttcttcttcttcttcttcttcttcttcttcttcttcttctccttctccttctccttctccttctccttctcctccttctcctccttctcctccttctcctccttctcctccttctcctccttctcctccttctcctccttctcctccttctcctccttctcctccttctcctccttctcctccttctcctccttctcctccttctcctccttctcctccttctcctccttctcctccttctcctccttctcctccttctcctccttctcctccttctcctccttctcctccttctcctccttctttctcctccttctcctccttctcctccttctcctccttctccttcttctccttcttcttcttctccttcttctccctcttcttcttcttcctcctcttcctgttccttctccttttgtctttaaatttataattatgaatacagattgttatatgtgagttttactgtgacatttccatacagcatgtccaatgcattgacc

SEQ ID NO: 2750 - DNA, 5132 bp, Mus musculus
aggcatgcccaaagaaaagtacgagccccctgaccctcggaggatgtacacaattatgtcctctgaggaagcagcaaatggaaagaaatcacattgggcagagcttgaaataagtggaaaagtaagaagcttaagctcatctttgtggtcactcactcacttgacagctttgcatctgagtgacaattccctgtcctgtattccttcagacattgccaagcttcacaatctggtatatctggacctgtcccataatcaaatccagagtttaccggcagaactcggaaacatggtatcactcagggagctccatttaaattacaaccagttacgagttctaccttttgagctgggaaaactgtttcagttgcagactttaagcctgaaaggaaatccacttacccaggatatattgaacctctgtctggagccagatggaacaagaaggctactgaactacttgctcgataatttgtcagtttcaacagaacaaccacctccaagatcttggatcatgttacaagaaccagacagaacaaggccaacagccttgttttctgtcatgtgctataatgttctttgtgataaatatgcgacccggcagttatacggctactgtccatcatgggcacttaattgggactacaggaaaaaggccattattcaagaaattttgagctgcaatgctgatattataagtcttcaggaagttgaaacagagcagtattacagtttttttctggtagaactgaaagaacgtggctataatggattctttagtccaaagtctcgagctcggactatgtctgaacaagaacgaaagcatgttgatggctgtgcaatattcttcaagacggaaaaattcactttggttcagaaacacacagttgaatttaatcagctagcaatggcgaattcagaagggtctgaagccatgttgaacagagtcatgacaaaggataacattggagttgcagtactgctagaacttcgaaaggaattgattgaaatgtcatctggaaaaccacatctgggaacagaaaaacaacttattctcgtggctaatgctcatatgcattgggaccctgagtactcagacgtgaagttggtacaaactatgatgttcctctcagaagtgaagaatattattgataaagcctctcggagcctcaaatccagtgtattgggagaatgtggaactattcctcttgtgttatgtgcagatctgaattctttgccagactctggtgttgtagagtatttgagcactggtggggtagaaacaaatcataaagacttcaaggaactgaggtacaatgaaagtctcacaaacttcagctgcaatgggaagaatgggatgaccaatggaaggatcactcatggtttcaagttaaagagtgcctatgagaatggcctgatgccttacaccaattatacatttgatttcaagggtataattgactacatcttctattctaaacctcagctgaatactttagccatcctgggacctctggatcaccattggctagtcgagaataacatcagcggctgcccacatccacttattccctctgaccacttctcactttttgcacaattggagctcttactgcctttcctgccccaagttaatggcattcaccttcctggcaggaggtagtcactttcagaggacctcagatttacttgtaaactcgtgaaaatctgaatataggagagtaaggtatggccactagggatttttctcaatgatcatttgaattttcagtctggttatttgataaagggtatagtatgaaagccaggtgctagcaacagacaaattctgagcccagtgtactttatatactgctagacagggactggtgtgtttacaccttttaatttgttacaagtaattttcctgtttcttctctccaatgtgttttgtcatgccttgaaataggaagatgtgtgagcagtgtgctgtttgcacagaaatccacagcactgttttctgaggccagtagtaacatcagagaccgttcttccagactttactccctcttttttcagacttgtttgtaaaatgtagaatttgaatttagcctttatgattgtatatgatccacagaagacctgatttatgaagttttgtactaaaaaaaaaaaaaaagcaaaattgaaaacagttgtattgtaaactaaggctaattttttttaacctgtgtcctgtgttctgaaggccagctggtaacaaagctgcatccgactttctctgcagtgatttgcactgttggggttgttagcccttttgtactactttatttttaaattgagaacattactctttaaatgtaagtttgcttagaccttgggatattttcttggaccagaggcaacttatgtatgaattcctgaatttctatggaaactttctaccaggacagataagctgatctgtaggcatttaatggactgaagatgacagttgacatatgtacattctggtatttttaagtctttaagttttaactttttatgttaaaaaaattacagctgcttaggtacagcttctaagtcctttctgagacattttctgttctgtctccactgtgcctgcctaaatttgttctcaccgagcactgcctgtgcatgcagagaaaatctgtgcatcttttatatttttaaaaactaacatttgtgagaattttatggaaatgcttttgtatgagctgtggcttttccttcctcgttgtgaagcgttggatagcacattctggaacatgttcatgggtcctgggcttgctcaccagacccaagcactgcttcttggtgtccttgcacccagagtgccactatcatgtgtatttcttattctcttaatgtttaaaaaaaaatcattccttttttttaagaagagtaattttctgtttatgaagcagtataaattagatgcattttcaaaacagtttccctaagacaattgtttggatcatttttaaagtgactaaggaattttagtatgtcaaccaagataaaagttatactgtaccctatattttgcccatagtgccattagtagattagagattaaagtcacctttaactttacaaagttaacttgtatatgttctgttctcagtcgttagttctctcaaaatcaaatgaattcagagggaacttgtctggctgcttttgtttcaactgcaggcagtggagcagaaggacgccgtgtggcactaaagtgaactgttgagtgttaacagttttatacagagactgagccattttggatgactcaaaattttatgagaagacatttaattgcttatgctgtttttaagaggaaataaaattacatactgtttaaataaatgaattttttctttttaagaaattctctaaaggtcttgatatcttggaccttgtttttcctttaaggttttttgttttgtttgtttaatcgtaattgtaatgttgggtttgtttgttgtggatttttactttgtttaagttgtgctggcaccaaacacgtccagtttgtaatcaacaggttggtgtagaaccagtacataacttgcaatggctttttgtcctgtcttcccccacccccacccgtctctgtctctgtcttgtaaagtgtgaatatgagatgtactgactcgattttcttaaacactgtgttggtagtgtgcatcatgacaatttccagggaaggtggactgcagtgggtggactgatgggactgaggacccactttccctgtgacctgctaagggcagcacaggtctggagagtgtggtgccaggagaggggaggagcacttactcatctctgcatttgttagtggatgatgtattcctttcatggatactggaactagagtgcacttgttagatgctaaaggtttgagctttacacaaaacatttcatctgtatttgttactgtctacaatatatttgaatttgggggcagcctagtaagatataattgcctgttatgtcttgaaagtacttgttttgcctcttttaggcatactgcattctgtgggtcagtttgaacatctccaccttgtttagatagtgataagttgaacagagagtgtagatttacaagtataatcttcaaaagaaaaatattttgaatctatcaagaaatgttcacaccaaaatagactgatactttgttaagcaaggttttatgttttaaatgctttgtgtccaaaataatttccaagaaactatacttcttaaaatgcataaaactagtctgttttcataatgtagattatttttgaaaaattctgtaataaatatatgtaatgttttgctataatgtaatttcagtgttcttgctgataagtacatcttaggagtgttttacggagtgtttggaatatgtttcccttttaaagatgagcagattggaggcactcaaatctttgtaaattttatgaagtacagtttacagtattggtggtaattatttatgctttgagaatttaaataatgttcattgaaattaatttatggtatagtataaactaaaattctagaagtaaattgttgattgcagctttaataatcccagaacataggcatctccaaaaattgtttttgtttgtacttttatttgatttggtgtcaaccaggaaaatttatttcatattagcactttgaaacctaaagatataattaaattcggtagaatgcacttctaaatctttaaattataattgaaacctcttaagattccattttccaataattaacattcatggtttaagagttccactttttcactatttaaactacagaactcatttccatcctgactctgaagtttggtggtcatgtcatagaaccaagcaggacagtacagtcttctgatgagtcaaccataatatccagtacagatgttgcagataatttcgagaacataagcaggtgtcctccaaccacaagcagtattttaagatgttcgctttattccttttggttacataaattttaaaaactggtatgttgatgtagtgtctaaaatagagtagtctttattcacagtacattatgttgtgtaatgcactggactaactcttgtttaccattcatgtaacaaaacccagcacacttctgcactaagctca

SEQ ID NO: 2751 - protein, 550 aa, Mus musculus
MPKEKYEPPDPRRMYTIMSSEEAANGKKSHWAELEISGKVRSLSSSLWSLTHLTALHLSDNSLSCIPSDIAKLHNLVYLDLSHNQIQSLPAELGNMVSLRELHLNYNQLRVLPFELGKLFQLQTLSLKGNPLTQDILNLCLEPDGTRRLLNYLLDNLSVSTEQPPPRSWIMLQEPDRWTALFSVMCYNVLCDKYATRQLYGYCPSWALNWDYRKKAIIQEILSCNADIISLQEVETEQYYSFFLVELKERGYNGFFSPKSRARTMSEQERKHVDGCAIFFKTEKFTLVQKHTVEFNQLAMANSEGSEAMLNRVMTKDNIGVAVLLELRKELIEMSSGKPHLGTEKQLILVANAHMHWDPEYSDVKLVQTMMFLSEVKNIIDKASRSLKSSVLGECGTIPLVLCADLNSLPDSGVVEYLSTGGVETNHKDFKELRYNESLTNFSCNGKNGMTNGRITHGFKLKSAYENGLMPYTNYTFDFKGIIDYIFYSKPQLNTLAILGPLDHHWLVENNISGCPHPLIPSDHFSLFAQLELLLPFLPQVNGIHLPGRR

SEQ ID NO: 2752 - DNA, 5239 bp, Mus musculus
aggcatgcccaaagaaaagtacgagccccctgaccctcggaggatgtacacaattatgtcctctgaggaagcagcaaatggaaagaaatcacattgggcagagcttgaaataagtggaaaagtaagaagcttaagctcatctttgtggtcactcactcacttgacagctttgcatctgagtgacaattccctgtcctgtattccttcagacattgccaagcttcacaatctggtatatctggacctgtcccataatcaaatccagagtttaccggcagaactcggaaacatggtatcactcagggagctccatttaaattacaaccagttacgagttctaccttttgagctgggaaaactgtttcagttgcagactttaagcctgaaaggaaatccacttacccaggatatattgaacctctgtctggagccagatggaacaagaaggctactgaactacttgctcgataatttgtcaggtactgcaaaaagaagtaagtggctgtttgtttagactttttattaggaaaacatgtaaggatatcacctaattattattattttttctatatacatatatacccagtttcaacagaacaaccacctccaagatcttggatcatgttacaagaaccagacagaacaaggccaacagccttgttttctgtcatgtgctataatgttctttgtgataaatatgcgacccggcagttatacggctactgtccatcatgggcacttaattgggactacaggaaaaaggccattattcaagaaattttgagctgcaatgctgatattataagtcttcaggaagttgaaacagagcagtattacagtttttttctggtagaactgaaagaacgtggctataatggattctttagtccaaagtctcgagctcggactatgtctgaacaagaacgaaagcatgttgatggctgtgcaatattcttcaagacggaaaaattcactttggttcagaaacacacagttgaatttaatcagctagcaatggcgaattcagaagggtctgaagccatgttgaacagagtcatgacaaaggataacattggagttgcagtactgctagaacttcgaaaggaattgattgaaatgtcatctggaaaaccacatctgggaacagaaaaacaacttattctcgtggctaatgctcatatgcattgggaccctgagtactcagacgtgaagttggtacaaactatgatgttcctctcagaagtgaagaatattattgataaagcctctcggagcctcaaatccagtgtattgggagaatgtggaactattcctcttgtgttatgtgcagatctgaattctttgccagactctggtgttgtagagtatttgagcactggtggggtagaaacaaatcataaagacttcaaggaactgaggtacaatgaaagtctcacaaacttcagctgcaatgggaagaatgggatgaccaatggaaggatcactcatggtttcaagttaaagagtgcctatgagaatggcctgatgccttacaccaattatacatttgatttcaagggtataattgactacatcttctattctaaacctcagctgaatactttagccatcctgggacctctggatcaccattggctagtcgagaataacatcagcggctgcccacatccacttattccctctgaccacttctcactttttgcacaattggagctcttactgcctttcctgccccaagttaatggcattcaccttcctggcaggaggtagtcactttcagaggacctcagatttacttgtaaactcgtgaaaatctgaatataggagagtaaggtatggccactagggatttttctcaatgatcatttgaattttcagtctggttatttgataaagggtatagtatgaaagccaggtgctagcaacagacaaattctgagcccagtgtactttatatactgctagacagggactggtgtgtttacaccttttaatttgttacaagtaattttcctgtttcttctctccaatgtgttttgtcatgccttgaaataggaagatgtgtgagcagtgtgctgtttgcacagaaatccacagcactgttttctgaggccagtagtaacatcagagaccgttcttccagactttactccctcttttttcagacttgtttgtaaaatgtagaatttgaatttagcctttatgattgtatatgatccacagaagacctgatttatgaagttttgtactaaaaaaaaaaaaaaagcaaaattgaaaacagttgtattgtaaactaaggctaattttttttaacctgtgtcctgtgttctgaaggccagctggtaacaaagctgcatccgactttctctgcagtgatttgcactgttggggttgttagcccttttgtactactttatttttaaattgagaacattactctttaaatgtaagtttgcttagaccttgggatattttcttggaccagaggcaacttatgtatgaattcctgaatttctatggaaactttctaccaggacagataagctgatctgtaggcatttaatggactgaagatgacagttgacatatgtacattctggtatttttaagtctttaagttttaactttttatgttaaaaaaattacagctgcttaggtacagcttctaagtcctttctgagacattttctgttctgtctccactgtgcctgcctaaatttgttctcaccgagcactgcctgtgcatgcagagaaaatctgtgcatcttttatatttttaaaaactaacatttgtgagaattttatggaaatgcttttgtatgagctgtggcttttccttcctcgttgtgaagcgttggatagcacattctggaacatgttcatgggtcctgggcttgctcaccagacccaagcactgcttcttggtgtccttgcacccagagtgccactatcatgtgtatttcttattctcttaatgtttaaaaaaaaatcattccttttttttaagaagagtaattttctgtttatgaagcagtataaattagatgcattttcaaaacagtttccctaagacaattgtttggatcatttttaaagtgactaaggaattttagtatgtcaaccaagataaaagttatactgtaccctatattttgcccatagtgccattagtagattagagattaaagtcacctttaactttacaaagttaacttgtatatgttctgttctcagtcgttagttctctcaaaatcaaatgaattcagagggaacttgtctggctgcttttgtttcaactgcaggcagtggagcagaaggacgccgtgtggcactaaagtgaactgttgagtgttaacagttttatacagagactgagccattttggatgactcaaaattttatgagaagacatttaattgcttatgctgtttttaagaggaaataaaattacatactgtttaaataaatgaattttttctttttaagaaattctctaaaggtcttgatatcttggaccttgtttttcctttaaggttttttgttttgtttgtttaatcgtaattgtaatgttgggtttgtttgttgtggatttttactttgtttaagttgtgctggcaccaaacacgtccagtttgtaatcaacaggttggtgtagaaccagtacataacttgcaatggctttttgtcctgtcttcccccacccccacccgtctctgtctctgtcttgtaaagtgtgaatatgagatgtactgactcgattttcttaaacactgtgttggtagtgtgcatcatgacaatttccagggaaggtggactgcagtgggtggactgatgggactgaggacccactttccctgtgacctgctaagggcagcacaggtctggagagtgtggtgccaggagaggggaggagcacttactcatctctgcatttgttagtggatgatgtattcctttcatggatactggaactagagtgcacttgttagatgctaaaggtttgagctttacacaaaacatttcatctgtatttgttactgtctacaatatatttgaatttgggggcagcctagtaagatataattgcctgttatgtcttgaaagtacttgttttgcctcttttaggcatactgcattctgtgggtcagtttgaacatctccaccttgtttagatagtgataagttgaacagagagtgtagatttacaagtataatcttcaaaagaaaaatattttgaatctatcaagaaatgttcacaccaaaatagactgatactttgttaagcaaggttttatgttttaaatgctttgtgtccaaaataatttccaagaaactatacttcttaaaatgcataaaactagtctgttttcataatgtagattatttttgaaaaattctgtaataaatatatgtaatgttttgctataatgtaatttcagtgttcttgctgataagtacatcttaggagtgttttacggagtgtttggaatatgtttcccttttaaagatgagcagattggaggcactcaaatctttgtaaattttatgaagtacagtttacagtattggtggtaattatttatgctttgagaatttaaataatgttcattgaaattaatttatggtatagtataaactaaaattctagaagtaaattgttgattgcagctttaataatcccagaacataggcatctccaaaaattgtttttgtttgtacttttatttgatttggtgtcaaccaggaaaatttatttcatattagcactttgaaacctaaagatataattaaattcggtagaatgcacttctaaatctttaaattataattgaaacctcttaagattccattttccaataattaacattcatggtttaagagttccactttttcactatttaaactacagaactcatttccatcctgactctgaagtttggtggtcatgtcatagaaccaagcaggacagtacagtcttctgatgagtcaaccataatatccagtacagatgttgcagataatttcgagaacataagcaggtgtcctccaaccacaagcagtattttaagatgttcgctttattccttttggttacataaattttaaaaactggtatgttgatgtagtgtctaaaatagagtagtctttattcacagtacattatgttgtgtaatgcactggactaactcttgtttaccattcatgtaacaaaacccagcacacttctgcactaagctca

SEQ ID NO: 2753 - protein, 380 aa, Mus musculus
MLQEPDRWTALFSVMCYNVLCDKYATRQLYGYCPSWALNWDYRKKAIIQEILSCNADIISLQEVETEQYYSFFLVELKERGYNGFFSPKSRARTMSEQERKHVDGCAIFFKTEKFTLVQKHTVEFNQLAMANSEGSEAMLNRVMTKDNIGVAVLLELRKELIEMSSGKPHLGTEKQLILVANAHMHWDPEYSDVKLVQTMMFLSEVKNIIDKASRSLKSSVLGECGTIPLVLCADLNSLPDSGVVEYLSTGGVETNHKDFKELRYNESLTNFSCNGKNGMTNGRITHGFKLKSAYENGLMPYTNYTFDFKGIIDYIFYSKPQLNTLAILGPLDHHWLVENNISGCPHPLIPSDHFSLFAQLELLLPFLPQVNGIHLPGRR

SEQ ID NO: 2754 - DNA, 102507 bp, Homo sapiens
  misc_feature (1)...(102507): n = A, C, G or T/U
caacctatgcctcccaggttcaagcaattctcctgcctcagcctcccgagtagctgggactacaggcgcctgccaccatgcccggctaatttttgtatttttagtagagacggggtttcaccatgttgccctcgaactcctgatctcaggtgatccgcctgccccagcctcccaaagtgggcggattccaatgcattccagcctgggtggaaagtaagaccccatctcttaaaaaaaccaaaaagcatcagtatagttttgatgttgtgttaaagaataaggaaaaagaagttaaaagagagacagaaaacaaaacgcaaaaccagaaacaaaaccaaatgagctgccttttccccttcccagcaattctctaaggtaagtctttgggagtgcatctgaactctgcatgggaagctctgtctcctgcattctgaggcctcgaggcaccttcttgactccacatactgagtgtgaggccaggaagagacaagtgccgaaggaagcagctggcaggaggcctgttgcatgaaggtggaggcttgatggaacgtggacctcgggcctctgcctctttcttccttgctgcttctacgtggacctcgggcctctgcctttcttccttgctgcttctacgtggacctcgggcctctgcctctttcttccttgctgcttctacgtggacctcgggcctccgcgcctttcttccttgctgcttctacgtggacctcgggcctctgcctctttcttccttgctgcttctacgtggacctcgggcctctgcctctttcttccttgctgcttctacgtggacctcgggcctctgcctttcttccttgctgcttctacgtggacctcaggcctctgcctctttcttccttgctgcttctacgtggacctcgggcctctgcctctttcttccttgctgcttctacgtggacctcaggcctctgcctttcttccttgctgcttctattcctctttcttccagcaacggtatccctgattttcctctgactactccacactaattttttttttttttttgagacagagtttcactcttgttgcccaggctggagtgcaatggtgtgatcttggctcactgcaacctctgcctcccaggttcaatgattcttctgcttcagcctcccaagtagctgagattacaagcatgcgctaccatgcctggctaattttttgtatttttagtagagacagggttttaccatgtgggcaaggctggtctcgaactcctggcgccaagtgatccatccgccacagcctcccaaagtgctgggattacaggcatgagctcccgcacccggcccccatcaactctttccatatatgcttgagtgcagctgaagacgatctgcctccacaagtagggcatgtgacttcttcctgactggtgtatgacacatgccagaacatggtgtttgattcagagatggaaatgagtcaggcctaggacctctgttcgaccattttggggacattctctttcctgccaggcttgaaccttgaaggagatggtatccccttttcttgaatgtggcacctgatgataaagtcaccatggaggtgagcagaaccgagtggcattagctcccagatcaagccacacctgcagctagtggactcttcctggtctttctttttttttgagatggagtctcgctttgtcgcccaggctggagtgcagtggtgcgatctcagctcactgcaagctccacctcccgggttcacaccattctcctgcctcagcctcccgagtggctgggactacaggcgcccgccaccacacccagctatttttttttgtattttcagtagagacggggtttcactgtattagccaggatggtctccatctcctgacctcatgatccgcctgccttggcctcccaaagtgctgggattacaggcttgaaccaccatgcctggccatcttcctggtcttttaatgctacgtgagccaactaattcctttgtccccctcttaaagctgtttgagttaggttttcagccaattgcaggctaatacaatgggctcagggacaaaggataataggggtaagatatgattgggatctgaaacttcatctacgataccaggccctatctaaggagaactgtggcctgcaagcctcaagtccagagaaagggagacagatgtccagggtgtgtccatgtctctggcactgcatggcagtgggaaatttttgtcaccagcgctggtctttggccactaagcctgcagccctagagaggaggtgtcagactgttaagagctgaatggctccacaggtctgtatttcagactcaccaaacaacctccgaatggctttgcttccctctagaatgtgctttcctactagaagcgggtttgtcacacggctgttcaaatttttcttgcaaataaaccttgggacctgcttcattcatcattctcctgcgcattttggttcttgtggtcagtctgtaatcgacactgcatatctctggggcccctggcaaatccagctgctggacccatacagtaatggtccacatttgtcttcattcgttttcttttgcctataacagagtatcttaaactgggtaatttatatggaaaaggaatttatttcttacagttctgcaggctgagaagtccaaagtcaaggggccacatctggtggggacttcctgctggtggggactccctgcagtcccaaagcagcacaaggcatcagatggcaacagggatgggtgtgcgaaggtgctagctcaggtctgtcttcctcttcctacaaagccaccagttcctctcccatgataacccattaattaatccatgaatgaattcattcattcatgtgggctgaattttacctcagttaaagaaaatagggtaacctaaccttgagaacattgtcagagaaactttgaggaattatttaccttcatatatacatactgtgaaattcaaatacttatttcccttagactcttattcatgtatgtgtaagagacagagagaaacagagtcggagacagagttttagttgacttgaaaaaaggaaacagacttttatacactgttggtggaaatataaactggtacagacttttcaaagagccatttggcaatatctaccaaaacccgctcattttttgtattttttgtagagatggggttttgctatgttgctcaggctggtctcaacctcctgagctcaagcgatctgccagcctgggagagtcctcatggcccaatcacctcttaaagaccccacctctcaatactgggccatcccttgaaaccattctgccctctaggccctctaggcctcagagcctgtgacagcaagtgtagcctcaaagacctccaaaatgccctagaggtctttcttctatttttttttttttttttttgaggtggagttttgctcttgttgcccaggctggagtacaacggcatgatctcggctcgctgcaacctccacctcccaggttcaagcaattctcctgcctcagcctcccaagtagctgggattacaggcgactgccaacacgcccggctaattttttgtatttttagtagagacggggttggtttcagcatgttggccaggctggtcgcgaactcctgatctcaggtgatccaccccgcctcgtcctcccaaagtgctgggattacaggtgtgagccaccgtgagtgaccagctccatgctctttgatgatcctttttctctgtactaatcttggtgaaagaccactgggccacccttggtttctgcttttgaacacactttttcattctacatggccaggctgagttttgcaaatttgtctgctttgtttctcttttgattgttaattctgtcttcatgagtgctggaggagacaaatattcaaaccacagcaacattctccatcagtcccaggttggaattccaatgccccagtcatgtttgagtgacagacaccacggcaacatcaacaatcatggccatcacctaggtgtccattttcattactgaaccacccatctgaggccaccctctcagagttaacaggaatcccggacagaaatatagttataattaagcattaatcaggcggcacttaggcccacttccttgtaacagaaagtcatgtagctccggacactgaccattatgcacccccgctgttactacagatgggatttctgatgttagggtcctaaggcttttgtttaaaaatcacttaagcagcctggcacagtggctcacgcctgtaatactagcactttgggaggccgaggcgggcagattgcttgagggcaggagctggagaccagcctgggcaacaaggtgaaaccccatgtcaacaacaacaattaacggggtgtggtgtatgcctgcagtcccagcctctccggaggctgaggtgggaggatcacctgagcccaaggaggttgagactgcagtgagccgtgatcatgccactgcactccagcctgggtgacagagtgagaacctgtctcaaaaatacagtaacataaataaatataggccgggtacagtggctcacacctgtaatcccagcattttgggaggccgaggcgggtaaatcacgaggtcaggagttcaagaccagcctggccaacgtggtgaaaccccgtctctactaaaaatacaaaaattagctgggtgtggtggtgtgcctctgtaatcccagctactcgggaaactgaggcaggagaattgcttgaatctgggaggtggagcttgcaacaagccgagattgtaccactgtgctccagcctgggcaacagagcaagactctgtctcagggaaaaaaataaaaaaacaaaaataagtaaataaatatgaaagaagtgctcaagcagatcctgaactccagtcgaacaggtgatgccaaccagtttgaagacccccaacccttgcccaaaggaaccaatcagcatgagaatcagcacggcttcatcctgctctccttgacaaaccagcaatctccattcttcagcccactccaaaacccttgaaaatcctagccccaaactcatcagggaggcagatttggtttcttcttgtctccacatccagtggccctaggattcaaacctcctctgctgcagcctggtgtcttggcgcattgacttgctgtgcacatcggatgatgaccctattctggtgacgcatccctctgtgcaacgcatttactggtcaaattagaattattttggttgtaagctacagaagccaaactcaaacttaagcgaaaaaaaaaaagtattggtttgtatacctggaataggttctggtataggtcacgagctaaaggaaaaaactactgaaacaagttgtcaggcccttgctctgagactccacatcttcaccagtgtctcatctctccatgtggtggggaagatggcactggctgccaccaattcatgctgtcctcgcttagcacgtatcaatcccagactggtcctgctttggtactgcctgactgcagtagaaacaaggcccaggccaggccagtgagagcctgccctgggtctttggctggaatcattaggaaagaagcaccttctctaagcggagaagctggtagaatctaagcctgcaggtgttggtggcatctttcccgcttgtgaggcccgcagagagaacaggatggagggtgggaggtgagatcgattcttgatgccaccttacaatgcctgaatggttcagcattccctctttcaattcaattccctccttcttgcaaagaaatattgagttgtgagttttataacttgcaatgggaggtctggcctaacatgaggggcactttgatctggcctgaaagggtgagtaggtattttgcggggttctcctcggatatgcagaaagaaaagggcatgcacagcagagccactatcgtaccctcctggtggcagcaagtctccccagagggctccaattagtccaccccgccctgcatgcacgcgcagctcctccacagcttatgtcctctcctcttgaatctggcttgggcttgtgcctgctttaattcatagaatattgaggaagtggccttcttcagaaggcctggcagcttcgctttcctcttggagcccctggttgtcatgtaggaagtgcaggatcacctcctgctggggaaaggggccacacacaaagtctgaaggatgagacactgcgggggaggcctcgttagggggcagcgaggtgccagacattcaacacccagctgccacctttggtataggcatgaggccccaagggtgaacatcagaatcatgagatacagtaaaactgttgctttatgctaccaagattttgtgcaacaagacctcccctcctccatacagtcgtgccagtcacaagggaattgctccctctgttttttgttttgttttgtttgagtttttttttttttttttttttgagacagtcttgctctgttgcccaggctggagtgccatggcgcaaccttagctcactgcaacctctgcctcctggattcaagcgattctcatgcctcagcctcctaagtagctgggattacaggtgcccgccactgcacccagctaatttttttttttttttgtatttttagtagagacggggttttgccatgttggccaggctggtctcgaactcctggcctcaagtcatctgcccgcctcggcctcccaaagtgctgggattacaggcgttgagtccccgcaccgggctgaggtagctgcctctggccaaattacaaaaaggcacccaggctggagcacagacggccagggcactcacacagggaggagaggccctgcagggtgtctgtcccattggcccctcagcctgggatactctgtacagcacagggccgcacaactccctgctgtacaggaggaggttgtggagggatggccacaggcagcttactggtctacatgtgttcttcctgactcctaaacttctgcactgctctgtctttgcccagtgtcctatggcgctagaggcctgggctgtcactcctgatgtcatggcagtgccaagcgatgaccatcccaaggccgtgctggggagagggggatcatcttcacctctgaacagcttttgtccctcatcctttccttgcccttccagccaggtctcctccaccccaggcaacagcaacccatttcccacatccccagctctcaacagccttcactgaagcagaagcctcggtttgttgctactgttagttcctggaacctgtctcactctcatttcttcagggttgattttccaggaagcagttagcagcctatcctagtttgccacataggtgggcaggcagctttccttttccttcacgccttcaacatatacctcaatttttttttttttttttttgagacagggtttcgctcttgctgcccaggcctgagtgcaatggtgcgatctcggcttactacaacctccgcctcccaggttcaaatgattctcctgcctgcctcagcctcccgagtagctgggattacaggtgcaagccaccagacctggctaattttttgtacttttagtagggacgaagtttcgccatgttggtcaggctgttttccaactccggacctcaggtgatctgcccccctcggcctcccaaagtgctgggattacaggcgtgagccaccgcgcccgaccaatatacctccaatattaagtctgttgggtgttattcttgcccctagactgtgagcttactcagggctgggtggggtctgattcatctctgtgccctgaccatcagtcaactaatatttcttgatgtaagcatcatgaatcagcccagtcatttctctgctgaccttcaaacaccagagtttgccctgaacaccttttgatcttggagcacagcagctgctgtccgttacccaggctaggaccccagcaccaaaactgtccattaatgtaatggaatgaattaccattaataggctgaagtggtatgttaacttactcttttttgtataattgaggaaggaataatattcgactgttcacgattgaatgtcttgtctttaggcagatcaagatactggctccggtcaaatactgtgtttcgacgtgattgacaggcgaaggcttaaggaaaaggaagaggagaaaaaaaggggaggacgatcaaggaaaagaggagataaaagtggacaacccggccgggcgcggtggctcacgcctgtaatcccggcactttgggaggccgaggcggacggatcacgagatcagaagatcgagaccatcctggctaacacggtgaaaccccgtctctactaaaaatacaaaaaatgagccgggcgcggtggcgggcgcctgtagtcccagctactcgggaggctgaggcaggagaatggcgtgaacccgggaggcggagcttgcagtgaaccgagatcgccccactgcactctggcctgggcgaaagagcaagacaccgtctcaaaaaacaaaaaaaaagtggacaacctggggcggaaaaagaagtagatgaaaaatggaggagcgctaaggagaggagaaaacagaagtgccaaggcaggaaaggagcgaggagagcgggaacagaaggagacgaaggatggacggagaggaagggatggagggcggcaggcagggaggcagggcccgcagcgcgccgggccggtccaccgctctccagcgcgggggtaagggggcggggcctgggcagctgcgtgccgggagcgacccccgcaccgaagggcggatggttgtgcccggcgacggcgcccaatgagcggccaggatgttggagcgccggcggcggtccgggcgctcgctggctgagggacggcggccgccgccatgatgcttgtttgctttcaatgaaaacgaggggggcgcggaggaggaggcggcggcgtcggtggcggcggcgacggcggcgcggaggcgaaggcagcggcgggcgcagcgaggagggcgaggccgggggccgagagggcgggagggcgtagtggcggcccgtcggggcggctgaggcgggcagccgaagcagtggctctcggagggggaacaaagagcagcgactaaggcggcagaggagcggcggcggtggcggcgctgcagcagcgggcgggactggtatggtggttccacagggcagaccccgctgcactcacagggaggaggaggcggcagcggcggaggaaggcggcgcaccccgagaggtgagcgaggcaggccggaggcccggtcggggcgccgctcctctctccggccgcgcacggaccgccccccgtcggccgggctcggtcgcgggcaactttcgtttcgtgggcggcggtcccgctgctccgcaagctggcggctgttgggggccccttcgacgcgccgcgatcgcgccccgccccgggccgcgcccccgggccgagtccctgggaggggggcgttgattgacggcggcggcggcggcgcgcagaggggagagggtcggcgctgggctcccggatcccggccggtcccggctgccgtcgtcggaggaggcgagtccgtgtcccgggactcgtggccaagatgggtggcaacttttgagaagcgcctctgtgggtggcgcgctgtgtggagtgtggagcttcgcgctccgtggccacaattactgtcaagcgggaaaccaactgcttaccccctcccctaaaatgtttttaaaattcagtttaacgcagattttgagggagaggacggggtggattacaggttaaagaagcacttggcatgcaatgaggatgcttattttatagtattgcgaaggattcggagattgtactggtttctacaagcagttttctctggtaacccaaattgcatccctcctttttgtttttcagcactaatcgctattttctttggaaacttcctttgattctttacctccttcaccttccccgaagagcctgctaaccaacacctgtggccttctgtttttaactgttgttgccattgacagcgttgtgaatggtcatctcgctcgagctctttggatttgttgttactgtgtaagctgatgtgttttagataatctgcttcaatttgagttcccatacttacctgttttccaggtggattgtctcattgttagtgctgaatcttcttgcctacttgtatctgggaatttaactttgaagaggaagagagtgaatatgaataactgaaaaataaaatggtgtgtagtagcactttgtattttttacaatatactagaatttactactctagaacagattagtaggctgtaggagtggacgtgggccattgatcaaaagggtttaaaggcttttttggggaattgctgttaagacatttatcacagtttttatttaatttatttattgtttttgagacaggatctcactctgtcacccaggctggagtgcagtggcacagttctcggctcactgcagccttcgcctcctgggttcaagcgatccttttgcctcaccctcctgactagctgggactaccggcagacaccaccacggctaattttttaattttttgtagagccttgctctgttgcccaggctggtctccgactccagggctcaagcgatcttccttccttggcctcccaaagtgctgcaattacaggcatgagccaacatgcctggccatcacagtgtttagaatgtgatgacttttagagtaaaatttagaataaaaattgcttaatatctttagatctgtgatctactccaggtgttttgctttaaacaaaatacatgaacagctgctaatgagaagacagacctttctaggtggaggtgacttgcccatggtactgtaatgaggagggaaaggaccgggtttgtgtgcgtgtgagagcgcatgagtgtgcgacctaatcgctagaggtttgttcttttgggaggagggagggtatgttaatggttggaagttatttcaggtcacttctcagtcgatgaacgagatgctgaacgaaatgatcaaaaaagatgatgcaattgccaggcatggtggctcaccgtgtaatcccagcgctttgggaggttgaggaaggaggatggcttgagcccaggtgtttgagaccagcaaaaccctgtctcagaaaaatataaagtaacatatataaagtctgtgataactgtcacaacgtagtgagaccttgtcttgatcactttataaaaacggtgacgaaagacagattttcttgtgagactgaagattttctctgaaagtcaatcattaggtaatttccatagtgtcttgatagtggtgatgcagcccaagcggctcctcttgaatgcctgttcaatttgtaggtattttcaggttgcttaaatgttgttggcaaagtaaaactacaattattgggaaatttcaaacttttgagcagacataaggttggtttatagaacttggtcctaactacaaatgtgtaaaggcgttgtaggaatttgcccactgtacatgtagtttaaaagtatgcattttatgccaggcgcggtgactcacgcctgtaatcccagcactttcggaggccgagatgggtggatcacctgaggtcaggagttcgaggcaagcctggccaatatgatgaaaccctgtctctactaaaaatacaaaattagccaggtgtggtggcgcatgcctgtaatcccagctattcagtaggctgaggtgggagaatggcttgaacctgggaggcagagattgcagtgagccaggatcacgccactgcacttcaccctgggcaacgagtgaaactccgtctcaaaaaaaaaaaaaaaaaagtatgcattttggtgaatgcttagacattccagtacctataattgccttcttatattctttaaatgataaacctttttcatagtgcaacagaaaaggataatatatgtaagacatattggaataaatggttaaggcagctcacagctgtattctttgggccgttaggggtgagggatcagtatgttcagcacctttagaacccattcccatatgcaaggtccactggcttgggaagctctgcttgaaagcatttattactttggaaaagtcctaataggctcagctaaaaatgtatgttttactgggaaaaccaaagacttggatatgtagatatctttatacccattactcatacagtcattttataacaaaagtgtgattaataaaacgctgtgtatgtgaaattaagaattgctgagactgggcgcggtggctcatgcctttaatcccagcactttgggaggccgaggcgggcggatcacttgaggttaggagttcgagaccagcctgaccaagatggagaaaccctgtctctactaaaaatacaaaattagccaggcgcagtggcacatgcctgtaatcccagctactcgggagactgaggcaggagaatcgcttgaacctgggaggcagagcctgcagtgagccgagagcacgccattgcactccagcctgggcaaaaagagtgaaactccatctcaaaaaaaaaaaaaaaatgctgagtaaactgtaaacatatactgtatgcatagctggggtacattagagtataatggaatgtactgtattttggtacttgaataagtaattagcgaggtggggggttatttgatccaagatgaggactcatttaggctgtctccacttcgctcttctctggccttcacctctccttcatccatttatattttcttggtaacttcagttacacgttaaggtatgtactggccatagtgttttaacactgagaattcaaagacaaataatactccgattttgccttctcgtagtgtataggcttcataggtgcacagagtgctgtgggagaacacaatagagaatgattaaacttgtggagggtgtgggggcagtttacggaaaataacactgaataggaatttgccaaactggggagagggagtcatgtcaaacagaaggaagtgtgggtgcactgaggtgtcaagtgttagggtaaggctagtgataaggtgttactggaacagtgggaatgactcgagatgagcctgcaaaggtgtgtctggtctagattttgaaggaccagccttgctaagctaaaagggaagtgtatagccttatctgacagcagaagagagagccaaaatattgttagcagaggagcaaggcgatttggaggtcactttggcatccctgtggagaatagagtggaggccctacaagtgtatatttgagatagtatggagttagtgactttgaatctgttttcttctttttttctgagatgaaggctcgcttggagtgcggtggcgcgatctcggcccactgcaacctccgcctcctgggttccagccattctcctgcttcagcctcccgagtagctgggattacgggctcctgccaccacgccgactaatttttttgtatttttagtagaggcagggtttcaccatgttggccaggctggcttcaaactcctgacctcaagtgatctgcccaccttggcctcccaaagtgctgggattacaggcgtgagccaccatgcctggcctggatctatttttaacttggatatggtgtcttctgagtctgtggtcccttaagggactttagggctatgcccagttgctctataatacagggtcatttaaaatcaaagtgtcagtatgttttggaagaagttaaaagcagtcaaaacaatgaaagttataaaatgttactcatgaaagttcaggtgttgagaatactcgtcttctgagttaggcttaggcaggctatagaccttaagctggaaaattcaaccctatgtccacttgaaatcaaagccaccaagcttaaaaagttaccagtatcctgatggtttgctaggatatgggttgtaaacattttctgaaattttggggggaaggcagttttctctctagtaaattattggaattggaatagtgagactagcttaaggtctaagaagttctcatacaactgttaatttatacagtcagttctgctgtaaagcaacatacaggttcctaaaaatcactgctttgcagaatcgtgcagtagaaatgacttacaaatggggttggggtacagcactctaaagctttatcagtgacacatttaaaaaaggaacctggtaaaaatgatagaacagttttacacgttgaatggttaagaaatatatagatactgtaataaatgtggcattttctttgaaaaagccctggtttgcttgtggaaagggatgtcagaaaggttgctgctggtgagttactgtgaagtggtagaagaattacttataatcagatggaaggttgtaacacgagaagcaaataggtgtggctcttaacccataataaactgacttagctggtgggtgtttgaagtgtgtttcatgtatttctacacagttcagttcggctgggtgcaagctttctcccttcatctagtgtttatgtgacagaatagcacataaataaacaggaaatatggattgtgctcaaattgttctctaatttgtatatcaatcacagtggaacaaattcaccttttcttttctttttttttccccctttttctttcttttgcttttccttttccttttctttcttgacagggtctcactctgtgtcacccaggctggagtgatgatgacttgctgcagccttgacctcccaggttcacccgagcctcctgagtacctggtatcacaggtgtgtgccaccacacctggctgatttttcttatttttagtagagatgaggtctctctacgttgcccggtttggtctcacactcctgggctcaagcagtcctcctgcctcggcctcccaaagtgctaggtttataggtgtgagccactgcacctggccaaattcacgttttctttttcttttcttttcttttttttttttttgagatggagtctcactctgttgcccaggctagagtgcagtggcgccatctaggctcactgcaggctccgcctcccgggttcacgccattctccttcagcctcctgagtagctgggactacaggcacctgccatcatgcctggctaattcaaatgcacgttttcaaaacaagttttatagttgattatacttgtttaatactagttttaaatagtactgtaactcagtttcaaaaatacttgttgaacaatctatgtgtcaggtaacatgctacctttgtggggcttacagtcttttgtcccaagtaggtttatagtgttgtggagaaggacaaatgaaccaatagagtactcatcgggttatacagtaattaagaaagcacaaagcattttggtcatgctaaggaaggagaaagtcattctgcttggaaaacccagggagtcatctcagaggtctttaagctggattttaaaggatggatagggatttgttaggttgagtaggacagggagaaggaacagcatattgggaacaacatgggctgtggagcataagacacagggatgagagggacaggaagagtggtcagaaacagcttgtgaatagttgtagggtttttcttaaagtgttgagatttcctgtatatgatagaaatccagtgagagtttaggtggatatgggtgagcaagtggttcatgtaacatactttttcaggaggcacataatgaaaatgtagaagctggattaaaggagttagagttcatttacgtcctgtgagagctcaagtacatcagcataggggatagaaaagcacaggataccagaattagggacagactagccatgagctataaaaataggaaagagttgagtatgattcagaacttgtttagcttagagaactgttggtatgatttaacttgggaaatagaagaacagatttggacgaggaaagtagaatagtttgatttttgatcctgttaagtttgacatacctcctggatacttaggtggatatgtctaacagatatctggaccagagagcggtttggggtttgatagatttggtcattgtatagttggcattggaagttaggggattactcaggaagagtgtgtgaacaaatgtttttcacccttttgacagaggtaagatctccatttgagaatcagttaagaattatggactctgctgaagggaatgaaagtatgcatatatgcaagtgtgaaacttatggaccacaagaggagaggactaagggaaccctaaggaacagctaatattttgttttggacagcattgaaatggttgaagagacaagggcagaacaggagagagtaacgctacagatgccgagagaggtcatagtgccaagaaagaaggagttttcagtagtcatcattgtgcccaggtttagggtgggatgagatctggaaatgggttgataggatttgacaggtgggggaatgaatgcagggaaaatttttatgggaccagggcatatataagtcagatagtagattgggcggaggagcaaatgggaggttaagatgaagaaggttatagactactatttgcaaaaatttaaactagaagagaaggaaagaagggtaatagtttaaagaggagacagggtcgagagaaggtaggcacctgtgttagtcaccagctttgtttccttaagtccaaaactttggaaataaatttataatgtatattgcgtgtatgtttccaaacgttcccctgatctattggttgaaattattgcatttttatttggtgatacaaaattgttttgcctgcggaattttatgtgatttcaaaaacaataaaaaaaactctttctcattagcgatagagattatctgatgtaaaatcataatattacaattttcagccttcagttactagaagaagaagatttgtcctcattagcggtagagattatctgatgtaaactcataatattacaattttcagccttcagttactagaaggataagatttgctttcatatgccatatactaggtttgcacttatgttgtgctccattgcccaaactttggttaaatatttgatgcggttttaagtgtaaaatagtagcaaagaggaaatcattagacatggtcattttctttccaagttattgctacaaacacatagagacttaataaattagccagtggctctgtgtatccaaatacagagtattacaggtgattagctaggtgcattgagtggttgtatatagttttactaggcagattttgattatacggagatagatgtgttagtaatctctcctaattaaaaaccaaacagagatgaagatatgacttgactaagttaaatcaaaaattgtattgcactcagccttttgggaggcaaatatttttcttctgtaaggttatgtattgttgttaagtaaacacttcagcatcataaaacaatatttgatgaagctaactgccatgttttagaccagtagtttcctttgttaatctaaaattatgacaatgataactatagtttatagactaaagaattgtcatttggtttttagttttatggaaactatagaaactcaaagatttaggggttcatagccactgaagaaaaaaaatgatattgaatgccggtggtgcagtgggctgtgctgctttacatgtgtctcatttaatcctcacaccaaaattgtgacatagataccaccaatttataagtgaggaaatttaggcattaaagatgattgtaaacccatcatttcaagccaggacttgatgcaggtctgactctagtttgtatttttctttttttttttttttttgagatggagttttcactcttgtagcccaggctggaatgcagtggagcaatctcggctcactgcaacctctgcctcctgggttcaagcgattctccagcctcagcttcccgagcagctgggattagaggtacgcgccaccatgcctggctaattttttgcatttttggtagagacggggttttgccatgttggccaggctggtctcgaactcctgacctgaagtgatgtgcccgcttcggcaccccaaagtgctgggattacaggtgtgagccactgcccccggccccagtttgtattcttactgacactgtgccctacttccttttttttttttttttttttttttgagagagtctcaatctgtcatccaggctggagtgcaggggcgccatcttggcttactgtgacctctgcatcccgggttcaagcgattcccttgcctcagcctcccgagtagctgggactacaggcgtgcgccaccacacccggctaattttttgtattttagtagagacagggtttcaccatgttggtcaggatggtctcgatctcctggaccttgtgatctgcctgccttagcctcccaaagtgctgggattacaggcgtgagccactgcgcctggcccctttttcttcttaacacactctcatggtattatgacttggaatggtcttttgaggttaatttgataatataggaaaacccaattgttggcccaaatttataaccatttacactagtagttgatcatgttgacataatagtactaagtggcagaatctttgttaatatttgtgattctctttttggttatggatcaaaaacctcccaagagtccacataagagtacttttcatgctagtcaaaaattcagttctaaagcatttcattattttggaaaaggcagtctgttatacatctgtagtcaaaaagcagtgtatagctttcaaattttctgaaacattatcagtggccttagagtaagattctggtgttgttaaaggcttcttgatgctttgtaaggtcaacattttatgaataattttcttttgtagttttaaggggaaaagactagtggatcaaaactgattgctcatacattacaacttcccaagtcattgtgtatctgaattggcagcctagagtaaatattgaatggctcaaaagaccaagattcccactagatagtagtacttagaatattatggttcattccaagagcgggggcagtaaatagattttggaaagtctggcaaaaggtaagaaaactgcaaagattcatgttggcataaatattaaggtgctgaagtgataaactaaatggtggttgcttgtctcatggtaagagaacagatttaggattgatgacttccccactgcttacctttttaatcttggtgagattttactacacaaatcatggttttgacttaataccttacattagtgggcagactttaaagagatttgcggaactgagacagtgtcactcttctcactaaattttactttgttttttaaaatagttttcattaaaatgtcatttaacatgtgataggtttattactgttaaagagttcataaatattttttaaagttctcagttctaatttgattcttattgataattgatagctataacccacatcaatgaaagttctgaggtactagttaattttttttttttttttttttttgagacgaagtcttgctctgtccccaggctggagtgcagtggcgcgatcttgactcgctgcaagctctgcctcccaggttcacgccattctcctgcctcagcctcccaagtagctgggactacaggcctctgccaccacacccagctaattttttttgtatttttagtagagacggggtttcaccgtgttagccatcctggtctccatctcctgacctcgtgatccacccacctctgcctcctaaagtactgggattacaggcggtaatagttaattttttttttttttttttttgagacggggtctggctctgttgcccaggctgaagtgcagtggcgcgatctcggctcactgcaagctccacctcccaggttcacgccattctcctgcctcagcctcccgagtagctgggactacaggcctccgccaccacacccagctaattttttttgtatttttagtagagacggggtttcactgtgtagccatcctggtctggatctcctgacctcgtgatccgcccacctcggcctcccaaagtactgggattacaggtggtactagttaattttttttttttttttttttgagacggagtctggctctgtcgcccagtctggactgcagtggcgcgatctcggctcactgcaagctccgcctcccaggtttacgccattctcctgcctcagcctcccgcgtagctgggactacaggcacccaccaccacgcccggctaattttttgtattttttagtagagacggggtttcactgtgttagccaggatagtgttgatctcctgaccttgtgatccgcctgccttggcctcccaaagtgctgggattacaggcttgagccactgagcccagccaagtactagttaatttttaagactgcaaaagggtcccgagacggtagtgttttgagatctgctgtcttagtgtattgtggagggtttgggactgtaaagtataggtgaggaggttaatttgggaaagatgatgcatctgagacataaatgaggggctcatgatcccagcaacatattatttggataatgaacagaagatcttggtcttgcaagtgatagaattcttgagaatgaggctgtggtagaatagaaagactagctttggagtcagattgtccctggttcaaatcccagctctacaattcagttactaagtgtgcaatcttgggtaaattgcataaactgtgggtctcagtttcctcttctataagataaaggtagaatctacctcatgggttgctgtgagaattaaatcaaggtcatacaggtaaattattgcatagtagttgaaagcacaaactcgaatcagacttgggttaaaataacagttgtgtcatttagtatccctgtgacctcaggaacgttattctccggaccttctttctttatgtaaagattataatagtgtctgctcacaagagttctgagggttaaatgagataatgcatgtaaagtgctggatagacctggcaggtaatgagtgctcacagaatagttggctactatatgcctagtgcagtgcatggcagataggtgcccaacacacttttgccattacacctatctatttgatgtttgctcttattttgccgtagcgtgtcactaagatagattttttatagtttaagtttgtccccttgcttcttacctcaggctatcccagaaccagtatttttagttctcttggatattaaagtcctttctattttctctagattttgccttttaggtaatagtttttcttattcctagtaagataggcactgcttttaaggcttcttttgcactcttagaaaatgtttgcttttatactatcctggcttctccctttaaattcatataagcattacctgaatatttgccaagctctggagttataaaaatatttaagatatgtaaatggaagaagcctgtgttacagaatgtgagataaaaaaatactaaggcaggtttaatgaatacaacagtagacatgttttcgaggtttagcatagctcagagctggaaacagtaaacttctgtgtttgggagggatatggaggaaggttgtaatgcatgttttaaagttgaatgtctgagttggcatttgaaggatgactaggggccttttggtgtctggggcgtttcaggcagaagacatggcattgctaaggcatgaaggtttgtgaggggtaagtgggaattagggagatccaagatgatactaaggaggtatacagagatcaagtcaaactcaacttacttgttttgtaaatgagcctgggtttcctgtttccaagggtattgagatgaacaagatatagttttaggggcccggtgtggtggctcacgcctgtaatcccaacacattgggaggcccaggcgggcagatcacctaaggtcaggagttcgagactagcctggccaacctggtgaaaccccgtctctactaaaaatacaaaaaaattagccaggcgtggtggtgggtgcctgtaatcccagctactctggaggctgagttaggagaatcacttgaactcgggaggcagaggttgcagtgaaccgtggtcacaccattgcactccagcctgggcgacaagagcgagactccgttttaaaaacaaaaaaagatacagttttaggaacatgatgtacttgtatttctaggactgtcactttggacggtatatttagtacattcttgcactgctataaagaaatgtgtgagattaggtaatttatgaagaaaaggggtttaattggctcttggttccacaggctgtgcaggaaacgtggctggggaggcctcaggaaacttaaaaccatggaggaaggtgaaggggaagcaggtagtcttcacgtggccagagctggaagaagttggggtggagatgctacacacttttaaacaaccagatcttgcgataactcactttctgagacagcaccgaaggggaaaagccacccctgtaatccagtcacctcccactaggccccacctccagcactggggatacaatttgacatgacatttgggtgggaacacagacccagaccatatcagaccgtatctaggatggattagagatggggagagtggtggaggaaagactatgggtgtgagactgttggaatagctcaggtaagagctgagggaattaaggcagagtgggtgagagatttaggaagtaaaatgggctagagttggagactggatatgaagactgtgactaggtaaggaagggtcaaggatatgctcatatttttggtttggaaatctgggtgtaagcataggagaaagggcaggattgaagaccaagatgataatttgtttttttagtatgagacggagtctcgctctctcacccaggctggagtgcagtgacgcaatcttggctcactgcaacttctgctacctgggctcaagcgattcacctgcctcagcctcctgggtggctgggactacaggcgcacgccaccatgcccagctaatttttgtatttttattagagacggggtttcaccgtgttggccaggatggtctcgatctcctgaccttgtaatccacctgcctcagcctcccaaagtgctgggattacaggtgtgagctaccacgcccagcctagtaaagttttttattttatgtttttattttttcaaggcaaggtctcacggtcacccaggctagagcacaggtgccatcatggctcactgcaacctcaatctctagagctcaagcaatccttccacctcattctcccaggtagctgggactgcaggtgtgtgccaacatgcccagctaatgtatcttattttaattaattaattaattttattattattattatttttttttttgagagggagtctcactctcgcccaggctggagtgcagtggcgcgatcctggctcgctgcaactctcacctcccgggttcaagcagttctcctgcctcagcctcccgagtaggtgagactataggcaagtaccaccatgctcagctaatttttgtatttttagtagagacaggtttcaccatattgatcaggctggtctcaaactcctgacctcgtgatccacctgcattggcctcccaaagtactgtgattacaggtgtgagccacagcgcccggcctattttattttatttttatttttttattttgagacaaggtctggttctgtcacccagactggaatgcagtggtgcgatcttggctcactgcaacctccgcctcctgggctcaagccgtcctcccgcctcaggctcccaagtagctggaactacaggggcatgccaccacacttggttaattttggtatttttttttctacagaccaggttttgccatgttactggtcttgaactcctgggctcaaatgatctgccagccttggcttcccaaagtgctgggattacagttgtgagccactacacccggccctgattttttttgtttttgcttttgtctttttgagatggagttttgctcttgttgcccaggctagagtgcaatggcggattctcgtctcattgcaacctctgcctccgggttcaagtagttgagattacaggcatgcgccaccacacctggctaattttttttttttttttgtatttagtagagatggggtttcttcatgttggtgtaactcctgacctcaggtgatccacttgcctcggcctcccaaggtgccgggattacaggcgtgagccaccacacccagcctaattttttatttttacgtagagacaggatctccctatgctgcccagtctggaactcctgggctgaagtgatcctcctaccgtggcctagtaagacctttttgataccttggtgttttttttttttttttttcactagctactctttgttaaattcctcctatgcaattcatatggtttgctttgggagattatcacggggttctgataccaagatacctgccatagtatcatcagcaatttatagtagtctcaaaatgtgtagttatgatttaagttttgcctgttagtcaagagtagttatcttttgcagaagctttttgttgttgctgttttttgtttgatttcctacaaggaaagactaatgatagacatttgccactaaggacagctcctaaatgaggtttatcgtctgtaaacctttttttttttttttttttttttttttttttttttaagagatggcgtttttctgtgttgcccaggctggagtgcagtggctattcacaggtgcaatgatagcacgctatagcctcaaactcctgggctcagcctatcctcctacctcagccttccgagtagccaggacttctatccgtaaacttttaactggccaatatgtgaaggaaacctgactagaaagagaaacaaacaaatgtgatgacattgggaggcagcagattttgggtttgaagtgagagtagaagtgccttaactgaattgaggctgcgagaaaggcttgtgactatcgtctaatggagctaagtgggtttgtttatactagaggcacaggcacatatttttaatttgtagaattcaaatcatacacttggcaaaacagcaggcgaatatattaaagaatgtggtaggcctgccatctcagtcataattgtaatttgaaattccagagtatgtgtatttaaaaatagcatttattaaattattgtctttatatgacatttaaatgttcattatctaaaagttttaatatacctataaatgaattgtcatttagattgtattcaaagagggactgatttttgggtgagtgtcttttggggctttttgttttgtaataatggaaaatagcacagttacttttttttttgcgacagagtctcgctctcgtcacccaggctggaatgcagtggtgccatctcagcttactgcaatctccatctcccgggttcaagctattctcttgcctcagccttctgagtagctgggactacaggcacctgccaccattcccggctaatttttatacttttagtagagatggggttttgccatgttggccaggctagtctcgaactcctgacctcaggtaatctgcctgcctcggcctcccaaagtgttgggattacaggtgtgagccaccgtgtccagacaggcaggttttttttggcatatgtttgtaatttgatttcctttctttggataattccttttccatttttaaatataattaatttttttggagggcaggcacagtggctcgcgcctgtaatcccaccactttgggaggccagggtggggaaatcgcttgaatccaggagttggagaccagcctgggcaacatggtgaaaccttgtctctacaaaatacaaaaaaaaggccaggggcggtggctcacgcctgtaatcccagcactttgggaggctgaggcgggtggatcacgaggtcaggagatcgagaccatcctggctaacacagtgaaaccccatctctactaaaaatataaaatattagccgggtgtggtggcatgcacctgtagttccagctactcgggaggctgagacaggagaatcacttgaacccgggaggcagaggttgcagtgagccgagatcacaccactgcattccaggctgagtgacagagcaagactttgtctcaaaaaaaaagctgggtgtggtggcctgcacctgtagttcagctacttgggaggctgagatgggaggaccgcttgagcctggggaggttgaggctgcagtgagccatgattgtgctactacactccagcctgggcaacagagtgagaccctgtatctgaaaaaaaaaataattttaaaaataaaaaatttttttgagcgacaggttctctctctgttgcccaggctggccttgaactcctgggctcaagcaatcctcccacctcagcctgctgaataactaggattaccggcatatgccactgctcctggctccatttttaacatatcactgttttccttcttccctttccatcaaaagcatggcttggaactcatttctcttaatctgttttgaaatttgtagtttcattcagctgtcttctcttgtaatgtgtgaaaattatgaactgcaataaagacaggatctttggaaagatgagttgtattgtattttagtctacttgtgaaagctgtggatttcagaatggtctttgaagaatactcagcaaaacttcattattgttttgtttagtcttgctttgtgtaaggcattcatggttctggttttgtgagaaaacagcttgtgagcagacccactgtggaggctaggtgggaaggaggtgggtaacatttaacttaaccttgaattatagatagaatttcagtgtgaaaatggtatcactaaatgcttggagatagggaagagtggagcgtatctgaaggatggcagtttgtctgccagttgcatcaaaagatatagaaggaaatattgggacagaagtctggaaaggtggaatattttgaattctcaactgcggagtttgaattcttctcagcagtagagatcttaaaggggaagagaagggatgatatagaatcatcattttaagtgggtataggaccagaaatcattacagctaaacattcaaattttattactatttttattcttatttatttatttttgagacagagtcttgctctgttgccaggctggagcgcagtggcgcaatgtctgctcactgcagcctccacctcccaggttcaagcaattctcctgcctcagcctcccgagtagctgggattacaggcatgcaccaccatgcccggctaatttttgtattttttagtagagacagggtttctccatattggtcaggctagtcttgaactcctgacctcaggtgacccgcctgccttggcctcccaaagtgctgggattacaggcataagccactgcacccagccatttatttatttatttaagatggagtcttgctctgtcgcccaggctggagtgcagtggtgcgatctcggctcactgcaagctccgcctcctgggttcacgccattcttctgtctcagcctcccgagtagctgggactacaggtgcccgccaccaatgcccggataatttttttgtgtttttagtagacacggcgtttcaccttgttagccaggatggtctggaactcctgacctcgtgatccacccgccttggcctcccaaaatcctgggattacaggcttgagccactgcacccggccatttatttattttttgagacaggatctctgtcgctcagactggagtgcagtggcacaatcaaggctcactgcagcctccacctcccagtctccagcgattttccctcttcagcctcctgagtagctgggaccataggcgtgtgccaccacacctgactgattttttttatttttattttttattattattttgagacagagtcttgctctgtcgcccagcctggagtctggcacaatctcactcattgcaacctccgcctcccaggttcaagcgattctcctgcctcagcttccctactcttagagtagctgggatacagtcgcgtgccaccaggcccagctaatttttgtatttttagtagagacagggtttcaccatattggccaggctggtcttgaactcctgacctcgtgatctacccgcctccgcctcccaaagtgctgggattacaggtatgagctaccatgcctggcccttttatttatttatttatttatttatttttatttatttatttatttatttttgagatggagtcgtgctctgctgcccagggtggagtgcagtggcgcgatctcagctcactgcaagctccgcctcctgggttcacgccattctcctgcctcagcctctccgagtagctgggactacaggcgcccgccaccacgcccggctaattttttgtatttttggtagagacggggtttcaccgtgttagccagatggtctcgatctcctgacctcatgatctgccctcctcggcctcccaaagtgctgggattacaggcgtgagccaccgggcccagcccatttttattttttgtagagataggggtttccctatgttgcccaggctggtttcgaaatcaaatggtcctcctgcctcggcctccaaatgtgctgggattacaggtttgagccacaccatatggctgaaacttctcgattttatagtcagaagtcagcttcaccgtaatcccagcactttgggaggccgaggcgggtggatcatgaggtcaggagttcgagatcagcctggccaacatggtgaaaccccgtctctactaaaaatacaaaaatcagccacatgtgttggggggcacctgtaatcccatctactcgggaggctgaggcaggagaattgcttgaagctggaaggcagaggttgcggtgagccgagatagcgccactgcactccagcctaggcgaaagagcgaaactccatcttcttcaagtctgcttcacaaagagcttgttttactgaattttgcagtgtaattaggacttggctttaggaagaataatctaagtggtatttaggttagttgtaatcctaaaagcataagtaccaattagaagaggccattgtaatggctgaggaaatgagaattaaagtcctaaattagagtggtggtagcaaaaataagagagttgtagtgtgagtgcatggttctgaggtttttgtttgctttccagttgcttaagctgtaagatcatgcatttcttatttattctttattcatcgtgcctggcagagtgcttgtcacattgaaggtactcagtaaatatttgttgaataaatgattctgtaaagaaaacttccttaagaaagcatgattccactgtactgaattgcttttggattttttttctatgaaaacctgattttggttgtgaagaaaaaaatagaccagttcattagcgtaatttgctaggcattacacaagacattgggagatacaaactgtttagaggtgatatatgctgtggtaaacgtatggtgtgcatgcagagtggggagtactgaacttgtttccgtgttgaggagggcttacagaggctgtaacatgtcgtctgagttcctgtgaagagaaagtaggagtttaggatgaaggttgtctttgataaagagattagcatgtattgaaagacttatattttaggctggatgcagtggctcacgtctgtaaacccagcacttcgggaggtcgaggcaggaggatcccttgaggccaggagttcaagaccagcctgggcaacatagtgatgcctcccatctctacaaaaaaaaaaagaaagaaaaaaacagaaaatattagctgggtgtggtggtgcctgagcccaggagcctatgattgcaccactgcactctagcttaggtgacagcgagacattgtctcaaagtcttagaactaggtttcctctaattaggacattgtagggtagcatgtgtcaaagggctggagataagtgagaaaatagctaagttgaggtagtagaggactttgaggtttggactttaggcaggcaggcagggccatctaaagttttaataggagagtggcatgagcaggtgcatatgaggaaggtaatcgatggcagtgtggggaggatgtgtaatagttgaagttgagaaatgaggagggtctgtattaacttcagtggaagtagattggcatgaaagttagtgtcactgccttttcatatgcgccctaacttacagtagctctaaggagcctgattactaaaaaaaaagggggtctttctgcacgtgagtttatttcttcctccttacctcccttcctttcctctgttgctctttgttttctcctttatggttgggaaaagaagtaaagcacaaagaatggagaagaagaaaatgtgaaaagcatagtaaaaggagagagagatgtcaaattcaagatttaaaaaaaaaattttctttttgagatcagggtctcaccgcgttacccaggctggtggagtgcagtggcttgatctcatctcactgcaacttccacttcctggtctcaagccattctcccacctcagcctctcaagtagctgggactacaggcacacaccaccacgcctggctaatttttgtgtagacaggatcttccatgttgcccaggttggtcttgaactcttgggctcaagtgattggcctgcccaggcctcccaaagagctgggaaaattcaggatttttttttttttttttgagacggagacttgctcagtcaccaggctggagtgcagtggcgccaccttggctcactgaaacctccgcctcccaggttcaatcgattctcctgcctcagcctccgagtagctgggactacaggcacatgccaccacacccggctaatttttgtatttttaatagagatggggtttcaccatgtgttggccaggatggtctcgatctcccaaccttgtgatccacctgccttggcctcccaaaatgctgggattacagacgtgagccaccgcgcccagctccaaagtgctgggaaaattcaggatattatcttgtcagttaagattgcctgtaactcagtctcatttcccttgaagaaaatctggcccactaaaataaatagtttaacgtctgagaggcttttaacaaaaaaccacatttttatacctggtcagagtaacatcacgcaaatcactaatgtaaacatgaactaggtgttaaatgtcttctctcattgtccataaaattttttttattgctgatttgtggatccaacatagggatcattcattgcatctgattatattccttaattctcttcaaatctagaatagtgctgacaccagtttgttgaaggcaacaggccagtttacttgcagaaaatcccacattctcattttatctgattgctcctttggtgtcatttggccagttcctctagttttcaaatcaaggtgtaaacattactgacgtgtgtttcatactgcaccacatcaagagaccccaatatctggttcttcctccatagtattggtaagattggtgaagggggtaacaatttattcctccattaaacgttttctaccttatgatcagaaagtaatctatgtagaatctgtgtagtggtggcttttagcatttcattaatgccaatattcatctaatgcttttaacccagtataatcctttttgttttttctaagggtttcactcctttcgctcaggctggagcgcaatggcgtgatcactgcccactgtagccccgactttcctggctcaggtgattctcccatctcagcctcccaagtagctgggatgtaccaccatgcccagctaaattttgtatttttagtacagactgggttttgccatgtttcccaggctgatcttgaattcgtgggctcaagctatctgctcacctcagcctcctgcagtgctgggattacaggcatgagccactgtacccggccgtttttataatccttgaataatgtcgaatgggaattataaaatgatgttgcttgaaaaaaattctttcatacttaatttattagctatcattgttttgtaaagtagggctttttttttcttttttcttctttttttgagacagtctctctcttttgccaggctggagtgcagtggcgcgatcttggctcactgcaacctctgcctcccgggttcaagcgattcccctgcctcagcctcctgagtagctgggactacagacgcctgccacaaagcccagctagtttttgtatttttagtggagatggggtttcaccatgttggctaggctggtttcaatttcttgacctcgtgatccgcccgcctcggcctcccagagtgctgggattacaggcgtgagctactgcgcctggccgagtagaccttttcttaaacgagggctgtttgattactctgaatccagttcctgctgaggtgtaaccacttaaatctttctttttagttacgtgtctccatattgtaatagctgcttcagataatgactgacttgcagtccatatgctgtctcttcccccatctccctcgtcttgattactatagtagtttcgtcttttacatcattgccagctctttttttgcagcacagaaaggattatgttatctctcttttgttttggcttgattttttgaggttctcatagatttgtattgattcagtgtgtttcatttcattgtgattatgattcttactgctcaaatggtcatagtttgtcctgtgaggaccccttctagctggcttctgtatcatgttgacatgatgactccattagacttagctttttggcactgaaagatgtcccaggctcattttatacatttcctgcccatcttttgattggccattttacaaagaactttgctttcttggtattagagcttgaaattgagagtttaggagtgccattattccggagataatattacttctgcaacacttcagtagatagaaataaattaaatcacaagtctatattgatattctcaagccagttttagtatttgtgtgtgtgggggggaggagggagttgatgggggaagggagagacaaggtctcactctgtcacccaggctggagtgcagtggtgtgattgtagctcactgtagccttgacctcccaggctcaggtagtcctgagcctcaggtggcatgtgccaccacacctgggtgatttctttttagtttttgtagagatgagggaactccctttgttgcccaggctggtctcgaacttctgagcttgagcaggcctcctgccttggcctcccaaagtgctgggattactggtatgagcctggccagtgtttccgtttaatttccttgatttataaacgcgctctttctctgaaaatcttggttccttttaatttaacttaatttagttgtttaaaacattttcttgtagagacgagttcttgccatgttgcccaggctggtttcgaactcctgggctcaagtgatctgcctaccttggcctacaaagttctgggattacaggcgtgagccatattgtccaggttgtcttgggttcctaagatgaagctaaaatgagctactgagagaccaactttccagagtttattcaggaatagcagggaattgtaatcagggacacgtgtgctgtaaggaatcgtaggtgcatccagagaggttggggtaagaggaaacttttaaagacaaagaggaagtccaagtaagttgttttgaaacaaagactgttggttacaagggcttattgcaggagttgatgttggttcattggtagagaaagctgtgtcaggcaattgtgcaagcaggttatctgggacactgccattttgaggaattccttgcatagtgaggtctccatttggttagagcttgacattagtcactccattttgatactgataacttttgcattaatgtcattaacaatgtgataatgagtacttatttagcaaaagttcgtgggctgtatgtttccttagtaattgctcatctggaaaaagtcctttcatctggccaagtgttagaatatagaatattttttagttcaggtaaaatttacataaaatgcaatgtacatgtacaccttaaatgtataatttgagtcttgataaatatgtatatccatataaaccatacaccaattaatatattgaatatttccatcactataggggcaaaatgttctgatttttatcgccacaaatacatataaatggaatctcttgggtctcttatttaatgtttgagattcattcatatttgtgtgtatcagttaatcgattcttttttttttttattgttcagtagtatttagtggtgtcaatatgttaaaatttggttatccatttgctttttttttttttttccctgaaaaggaatctcgctctattgcctagctggagtacagtggctcaatctctgctcaccacaacctctgcctcctggattcaagggattctcctgccttagccccttgagtagctggaattataggcatgtgccaccacatccagctaatttttgtatttttggtagagacaaggtttcaccatgttggccaggctggtcttgaactcctgacctcaagtgatctgcctgcctctgcctgccaacgtgctgggattataggtgtgagccaccgcatccagcctatccatatactattaatgaacatttagattttcagtttttggcaattatgaataaagttgttatgaacaactatattgtcaacctgaaataattgaaatgatcagaatccagtttcaaagagtttttaaataagagtttttagatgaacatctgggaatgactaactggggaatatggactccagagcactgggatctgggcttcaaagttaaaagttaagggcctgggccgggcgcggtggctcacatctgtaatcccagcactttgggaggccaaggcaggcagatcaccaggttaggagatcaagaccatcctggccaacatgttgaaaccccatctctactaaaaatacaaaaattagctgggcatggtggcgcctgcctgtaatcccagctactcgggaggctgaggcaggagaatcgcttgaaccagggagtcagaggttgcagtgagccaagatcacgccactgtactccagcctggcgacagagcgagactccatctccaaaagaaaaagaaaaggtgccgcttatttatataggcaggaaacaaagacatttaataggattacaacattttctctgcaaggttggggtttatgagttacaacagtttagttacagattgttttcttttccatatagcttgtttgttttttctttccaagagtgtgtttaacattccatctttttattttttattttattttattattattttttttttggagatggagtctctttctgtcgcccaggctggagtgcagtggcgcaacctcagctcattgcaacttctgcctcctgagttcaagcaattctcctgcctcagcctcccgagtaactgggactatgggcacccgccaccacacccagataatttttgtatttttggtagagacagggtttcatcgtgttgctggtcacgaactcccgagctcagacagtccgcctgccttggcctcccgaagtgctaggattacaggtgtgagacaccgcgcctggcacattccatcttccaaaaatgtggtagtcatgaagtttttgtgtgaaagaggaggaaagagggaaattaatctgtaatgaatatcagcagttaagaggaagaggaaagacatcttccctggcactcactggttagtcatttacgacattttacagaacaatgtaggtaagaaataaggtaatttataatcagagaagcaaaagctacagctgcctaggttacagttgcctgtttaagtgactcaggtttcataatcacattctcttaaggctcaaaatatttaacaagttccaacagcctagattttgaattacttatttttgcaatatacatatcttttggggtgtgtatattttcatttcttttgggtaaatactcaaaggtatatgcgctgacttacagactgagtaattacttttttaaaatagtttcaagttttattttagatccaaggggtacatgtgcaggtttgttacatgggtatattgtgtgacattgaggtttgggacataaatgatcccatcacacaggtagtcagtacattctcagcccttgcactcctttccctctcctccctctaatagtccctagttttattgttcccatgtttatgtccatatgtacccagtgtttagctcccacttacacagtatttggttttcttttcctacgttaattcacttaggataatagcctccagctatatccatgttgctgcaaaggatattatttcattcttttcttgtggccatgtagtattccatgatgtatatgtgccacattttctttatccagcctactgttgatggcagctaggttgattccatgtttttgctattgtgaatagtgctgcagtgaatataccagtgcatgtaccttttttgtagaaagatttatttttctttgggtatagaaccagtaatggaattgctgggccaaacgggtagttctggttttttatttatttatttttatctgtctgtctatgtatctatctgtctattgagacagagtttcactcttatcaccgaggctggagtgcagtggtgtgatctcagctcactgcaaactccatgtcctaggctcagacgatcctcccaagtagctgggaccacaggtacatgccaccatgctggctaatttttgtattttttttttgtagagatggggttttgccttgttgcccaggctggtcttgaattcttggctcaggtgatccgccctcgtaggccccccaaaatgctgggattgtaagtgtgagccactgggcctggcttagttctatttttagttctttgagaaatctccaaactgtttttcacaatggctaaactaattacattcccaccagcagtgtataagtgttccctttttggggcagcctcgccagcatctgttagtttttatctttttagtaatagccattctgactggtgtgagatggtatctcgtggttttgatttgcatttttctgtttagttatgtggagcattttttcatgtttgttggctgcttgtatgtcttgttttttgagacagggtctcactcttgcccacgctggagtgcagtggtgttatctctgctcactgtggcctggacctcctgggctcaagtgatccttctgccttagctcccaaagtaggctgaggtgggagagggcatggaagctctgcacccctgcgctgttcctcaccctgtatacaacttcatctgtctgttcatctgtatactttaccatatccttataacgaaccagtgaatgtgtttgcccgcattctgtgagccgttctaacaaattaatccaactccaggagggagtgttgggaacccagctttatagccggtcatcagaagtgtgggtgatgaccttacttgtgtctgaagaagagaggggcagtattgtgggactcagcccataatctcagtgggatctaactccaggtagatactgtcaggattgaattgagctataggacactcaggtgtgtggtatatgctggagaattgcttggtgtgtggggaaaaaccttcacacatctggtcacaagcgtttgtgttaagtgtgagcatagaggaaaaacagtttgtcttttacagttgcttctcaggtaccccttttcttttccccttagatgttcattttgaaggttaagtagagatggcttttcttttgcttactggggtggggcagggggttgtggcatatctgctggttaggggctgttaggatgggtggatttcagttctggtttttactattttgtaactacaaatccttttcccaggggcacactcaaatgtttgattgtccctaatttcactgaacatgtttgattcctgactgaaaaatagaccagaggctctccccctttcttagggttctcttttcaacaactatttcttttcacctctctcctaaccagaggaggttcaaatatatttaagtgctttaaatgtaactttttctgcttggtctttgtgggtatcttcattccagttggttttcttcactttcatttcttttcactttacttcatattctgctaagtctcttataacccctcactgtgattcctatccccagctcccgctaacccccagcatttctgcaagtgtgaagtagactggattcctgaaggttttttttctccctctagattctggcagacattcaaagtttatggtatacgtgcaggccgctctttaaatgttcctggatagtcttttcatggtttgtaattctgctttgcaccactaactttcccaggatggccataggttttgtatgtttaagctgtttcataagcagatctgaaagcatgtctttctaataaatacaaggaatgttttgtgtttctttaagtgaaataattattctaagatcatgaaaaagtgctctgagaaccgaaacaggtagagatttttgtttgattgtgccaggatcagtagtgatgtctggcatttgattggtaagatgttaactagttaggtgctatatgcctgctgactcttgactctggcctagctattttaaaaaaaattcttttgtaattcttgaaagttttcaggtgttttttggaatacttttattattttaggtagtaatcttcagtgacatactatactttttagagagcaagaagtacttgttgatttcacagccttgggaaagatcctaaactgcatgtattcctatatcctttcctttacctaatctgcagtgctatactttgttagactcccagaaaaatggattgggtttttcagtgggcatatgtccaatttgctatgtttcttttattctagccttttttttttacttcctaattctcaatctcagagatttggaaaatagagaagcactgaagagatcttcagtgccttggggcttaaaatgatgagtactttaaattttaagacagccagtctcacaatatgaaaaaccaagaaagggaatggttggctgcctaggtggaaatcaagactgtttgatagaatgaccacaggtacagggcatggttttcagatttcttagtccagtaacacttcctgaagtatgatcaaactgaacattgattcacactaagcttacatgagattgataaatcagacttctgaactttcatcaataattctaatgattaataggacaaaaatactaatctcagctggtcagagcaatttcttaccattattaaattctatctgggaaagctaatgaagatcagatagttactttgtaagtggagtctggtcagaacagtggcatttaggtgatcttaagggatgctgtcatcaagctctggtagcatagaacagagcattttatattttctaggttattactgatacatgcgtgtcattcagaaagagcactttccttaccatatggttctctagacagaaggagcacttctttgtgtttgttcttttgtattgaatatttttttatccgtctaaaaacagcagttattatatttctatattgaagaaactaacgtataagaccagtttgttttatctcaccatttatattcttaagaagctttttaggattacttacttccttctgtgctttgattaaacagtcaaaacccatttctatgtttgaaaagtaggccgggtgcggtggctcatgcctctaatcttaacactttgggaggctgaggcaggtggatcgcatgagcccaggagtttgagaccagcttgggcaacatggcgaaaaccaatctctacaaaaaaaatacaaagattagcctggtgtggtggcgcatgcctgtagtcccaactacacgggaggctgaggggaggatggcttttgagcctgggaggtgaaggctgcagtgagcagagatggcaccatcgcactccagcctgggtgacaaagtgagaccctgtctcaaaaaaaaaaaaaaaaagtagttctatttcctgtcagcagggaggcagcatagcataattaaagtagctttaacttttaatcagactcatttaaagcctgactctgctgtttcccagccttgtaacagtgggcaaattgcttaaaccattttgagtttctgttttctggtaaaatggagataattgcaactctgcaggaagaactagaaaaaactaaatctaaagagttaggaggaaaaccaagaaaaccgatatcctggaagccaagcagtgtgtttctaggcgggggtgatcatctatatcaaatgctgatcataagcaaaaagaggtcagagaagtgaccattggaaataagaatataagatcactgggtttcttcttttaaaaaaaaattaaaaacaaaatatttttagagacagggttgtgctttgttactcagagtggagtgcagtggcatgatcatggctcactgcagctttgaactcctggactcaagtgttcctccctccgcagcatctcaaagccgttggggttataggcgtgagccattgtgcctggctactgggtttcttcttgatagtttttggtgaaaggttgaaaacacttacgaacttgaatgggtttaactgggaggagaaggcagagaacatacacaattcctgaggattgtttttgctatagagagaatgagagaagcaaagtagctggagcgagaaatgaacttaagactttttaatagaggaaagaatagcacatatatgtgtgctgaaggtaaagatccaggagggaggcataatgtgatgagaggaaggaagggattgccagagtaatgtccttgaataggcagaatgagggggtggatcgaattgcacaaatggcttacgtgctaagggcagggatagatgggcataggtgggagttcgtagaaagggcccttctggcattctgtttcactgcgaaagtcaggtcatcagctgagagggaggatggaggagtaggtgttagaggtttgaagacagaagtcatctaggagaaggggatagactaggaatttacagtattatttctgggcagtatacagagtctgaggaatgattgctgactggctcactttaaacttacatggtcataggcttttctccagctatgtttagctgcatgggtatacagagtaggtagacaattggttaaaccaggattatgatttatccaaaagaataaaagcgagacaagaacaagggctttgagggaatatgcatgggagtgatgttttatttcacctaaatattttagaatgtatctataatggacaagaatttaaaaaaatcacatacaaccgtaaaactttttttttttttttttgagacaggattcactgtcgcccaggctggagtgcagggacacagtcacatcttactgcagcctcaacctcctgggttcaagcgatcctcccacctcagcctcctgagttgctgggactatgggtgtataccaccatgcttggctaatttttaatttttttggtaagagatggggcccagggtggtgctggtctcaaactcctgggcccaagcctcacaaaagtgctgggattacaggcatgagccactgtgcctgaatcacaatacttgtttaatattaactgatatttagtctatcttcaggtttctctcattttcaaaatcagaaaaaccagatttgtttaagttggaattaaacaaggtctgtacattgcatttgattgctgtgcctcttaagtcatttattccatatgtttcattttactcctctttttcagaccattgatttgttcaagatatttggtcttttgtcatctagaacttctgtattctgcgtctggatgtctgtattcttgtattatttttactttaaaaaaatttttaattgtaaaattcacaacatgatagttactacataagcaagtgtaacgttctgtagtattaaatacgttcacatggttgtgtcctgtggtgttattttaaacacgttcctctagatcccttactttgtgtaaactagtatcagatctagagaggctggatttgattcaggttcagtttttaactttgttggtgaggggtcaaggacataggtggtttatgtgtacttctcatggtgtcttattgggaagcacgtaatgtctggttgtcctaacgatgagactgatcattgggtttaggtcttgtagcccaagggttctcaaccctggtactcgtccatggcctgttaggaactgggtcgcacagcaggaggtgagcggcacgtgagcaagcattactgcccaaggtccaccccgtcagatcagcagcagcaatagattctcataggagcacaaaccctcttgtgaactgcgcatgcgagggacctaggctgtgcgttccttatgatgcgatctaactaatgcttggtgatctgagatggtacggtttcatcccgaaaccaccccaccctccccaaatctgtggaaaattgtcttccacgaaactggtccgtggtgccaaaaaggttgggaaccactgttgtagcctgactatccatttaaaaattttccactgattttttttcacacttaatggttttattaaccattgatcattgcctagatccattattttcttagagattgtaaactgattattttctaattatgtaactctttttggatttattagctagaattctgttaaaaacagtcactcacctagtttctgccagaaatgcaggataaatgtttgattcttttattatttatttatttatttattttttgagacggagtctcgctctgttgcccaggctggagtgcagtggcacgatcttggctcactgcaagctccacctcccgggttcacgccattctcctgcctcagccttccgagtaactgggactacaggcgcctgccaccatgcccggctaatttttttttttgtatttttagtagagatggagtttcaccacattagccaggatggtctcaatctcctgacctcgtgattcacccgcctcggcctcccaaagtgctgggattataggcgtgagccaccatgcctggccgattcttttattttctaattttcaggtgactgagttttttgatttttagataaaattatgaattcatgaagttcatgatgactcagttgcagtcatttttctgatgttcagattgtctcatagttggtcagtggaagcttcttcaagctggcttctgtgtcccccacagctgctgcacccttgttagcttcacagcttgtttgtatctgtcttgtcctgtgcttggaataatcaatttctgcaagaagctcctagtttctttcagtgggaaatggtagagattgtaatatgggtgtccacttttaaaagatgtgggtcgggcatgctggctcactcctgtaatcccagcactttgggaggccaaggcgggcggatcatgaggtcaggagttcaagaccagcctggccaatatggtgaaaccccgtctgtattaaaaatacaaaaatgagcccggcatggtggtgcacgcctatagtcccagctacttgggaggctgaggcagaagaattgcttgaagaggttggagtgagccaaaatcgtgccactgcactccagcctgggtgacagagtcagacttcgtctcaaaaaaaaaaaaaaaaggtgttgtggcttttgtttatttgattttttagaatactgattggtttcttttcttaacaggcatgcccaaagaaaaatacgagccccctgaccctcggaggatgtatacaattatgtcttctgaggaagcagcaaatggaaagaaatcccactgggcagagcttgaaataagtggtaagacatggaagcatgaatttatggtatggaaattaagatatggtagtaaactgagttttctaatgccaatacaggaaagaaacattgattttatattttacaaatgtaatgtatttataaatgattgtattttagtaacttatcttagaagcaggaaggttcaatgaaaagaatatgatttgagtcaaagttcaaaagccattcattgaatattttctcagtatcagtgtcctcttacaaaatacataaatgtaaaataataacaaggatgaaatgaaaataacacatgtgaagtgctagtgcccagtcacgtatttgttctggtatttgattctctgataaagtaggattgagcttttgcattgtcaatgatagatttctggtggggtaggaatggctgatctgtataggttttgggtaggtttgtttctccttattttcttcattggcttctgagtctgagtcactgaggacagccttattcagaaacacaaaatcttaagagtttgaagaagatctcaaatttcccttccccttttaatgcaatctggacatattcaaagaaatatatgagccctcagatgtgaaggatatcctttccccagcatctctgccagtgggcacacagtctctttttaaatattttgaagatggtgaagggacattacttctcagggcaaccagtgctaatgaagttttgtgttactgttggcctattatgcttccccttactttcctttcagtttgttctgatttttgccttctaaaatagtacagaacaaattttgtcgtctttcacctgaccgcccttgatttttaaaaatttaatgcagcagacatactgagcatatgctgtgtgtaaaacattttacctggcgctggcccacgtgcgtggaagatctataaagtcccgctttttatggagcttatgacattagggagtgagagggagtgcacaagtataaataactaatagacaaaacataacaaatctaggtataaaagtgctatataacaggaagcaaaaaggaaataaggataatagcattcctcctttgtcagctcaaaatttctggttaacctgttgagtaaacttaaatgcctgcctttgcagccatagtagaggtcagtacacacacgggtctctcctgttttccctcttctgatttcttttttttttttttttttagtttttattgatcattcttgggtgtttctcggagagggggatttggcagggccataggacaatagtggagggaaggtcagcagataaacatgtgaacaagggtctctggttttcctaggcagaggaccctgcggctttccgcagtgtttgtgtccctgggtagttgagattagggagtggtgatgactcttaaggagcatgctgccttcaagcatctgtttaacaaagcacatcttgcaccgcccttaatccatttaaccctgagtggacacagcacatgtttcagagagcacggggttgggggtaaggttatagattaacagcatcccaaggcagaagaatttttcttagtacagaacaaaatggagtctcccatgtctacttctttctacacagacacagtaacaatctgatctctctttcttttccccacatttcccccttttctattcgacaaaaccgccgttgtcatcatggcccgttctcaatgagctgttgggtacacctcccagatggggtggcggccgggcagaggggctcctcacttcccagaccgggcggctgggcggaggcgccccccacctccctcccagctggggcggctggccggggcggctgccaggcagaggggctcctcacttcccagacggggcggctgccgggcagaggggctcctcacttctcagacggggtggccggtcagagacgcttctcacctcccagacggggtagcggtcgggcagagacactcctcagttcccagacggggtcacggccgggcagaggcgctcctcacatcccacacggggcggcggggcagaggcgctccccgcatctcagacgatgggcggccgggcagagacgctcctcatttcctagacgggatggcggctgggaagagacgctcctcacttcccagactgggcggccgggctgaggggctcctcacatcccagacgatgggcggccaggcagagacgctcctcacttcccagacggggtggcggccaggcagaggctgcaatctcagcactttgggaggccaaggcaggcggctgggaggtggaggttgtagcgagccgagatcacgccactgcactccagcctgggcaagattgagcactgagtgagcaaaactccgtctgtaatcccggcacctcgggaggccgaggcaggcagatcactcggggtcaggagctggagaccagcccggccaacatggcgaaaccccgtctccaccaaaaaatgcaagaaccagtcaggcgtggcggcgcgtgcctgcaatcccaggcactctgcaggctgaggcaggagaatcaggcagggaggttgcagtgagccgagatggcggcagtacagtccagcctcggctttcacaactttggtggcatgagagggagaccggggagagggagagggacccctcttctgatttctagaatgctggactttattaaaccaagttcagctcagtaagtaggtgtggtcatggagagtgaaatttctcttcttctcacctgtcagatttggctttctgtgccaggggagcccaaagagaaatatgcactaattttgtagttattctcaaagcacagtcagtcaccactcctatttttcccttttaattttttcaggattggcatttgactatatttacctctccttttttcagcccttattagcagtttttgcattacaattcctttgcttgtaaggaagtgtcccctatcttacagcattaggatacgcaagaaagcactcaggtcattgagatacatctctgaggctgaggagattctcctccaccctctcctccttccaccacatgctgtgaactccttggtgactttgagtcactgttctctgcttaccctgaactttgggaagaagttctgtatacacatatagggaaaaaccctcaacccatgttttttctttgctctcacaccaccacagtcatcaacacaaaagaagacttctgtgaccaaaggtgtgggtttcttttccccacacagcaagcagcagacaccagttaggtgccctccaattcaattccaacactgtcttcctggaggtagcatcagatcccacggtttgtggactcagtccccaagactgccctctcccacttctatcaccagtcccatgtttgggcctctagagctttgaccagcttcaggttggggttcccacgaccccctctttgggttcagttaatttgctggagtggttcacagaactcagagaaacatctacttacgtttaccagtttattataaaggatattacaaaggatacagatgaaaagatgcacagggcaaggtgtaggggaaaaagtgcagtgtccatgccctccctgggcacaccacccttcaggaggaacctcgtgcattcagctatctggaagctctctgaaccctgttctttcgggtttttatggaggcttcattacataggcatggttgacagctgtagaaatgtgattattagacaagcaaggcatgtctgctcagacttttcttgggctgtgtagcattccttcttctaaggtatggggcaggaccctctctggaatgacggtcttctgacccacagtgagattagagtcctgccttgggcaggggaaaggaggataggagaaggtcatagatcctgtttcctgaggccttaagcactctaacattataacaaagactatgggagttaggaaccaggaaccatggatgaaaacctatatatatatatatatatatatatatatatatatatcaccgtaatacaacataggaaggaagaggggagacgcctctaaagtaacctttcttaatttattgttattattattatttagagatgaggtcttgctctgttgcccaggctggaatgcagtggcatgattatacatagcttactgtatccttgaattcctgggctcatgtgatcctcccacctcaccctcctgagtaactgggactacagactcatgccaccatgcccagctaacattttaaaaattttccttagagataggggtctccctttgttgcccaggctggtcttgagctcctggcctcaagcagtcctcccgcgttagcctcccaaagtgctggtattacagacataagccaacttacttagcccagattggcttctttaacttatttatttcatttttatagatttaggaggtataagtacagttttcttttttatattttaacaatctgtttattatttatttatccctccatagaaccaccactcacaccaaggagattatttggagtgggtcaccacctggggcctggactctgaaatctaaggcttcctcctccctcactttatggcttaggtggtggcatggttcaggcaaaactcgtgtctccttttggatactgcagaagcaggacctaagcatacccataaaggtggccacacccatcagggttgattggcaggctggaagacaatattctcccaatgaaggcacttttacctctataggggggtgggaattggttggttggaagtggtggtgttgggacagggaagagttatttccatggaaaacttatttgcaggttacagagagaaatgaggggagtttgcctacactgggccatctgtggggccagtgggggctgctgtatatcttgtatatctttgctaccgaaaggggaaggttgacgtaggcattaaagccaaagaggcccttagcaattaggcccagtacccctgcgatgattttggagtggttttctttctcaacattgtcgataatggaggtgattaggtagaggatcactgctaagagggtttggaagaaatgactccagggccaattgatgaatggtattttggtgtgcagatcacacacgtagctgacaaagtagcagcaagtatcatttcagccaccaacagggaggaatagtctggtgtggaggcacttgaagtagatcaggatcaccaggcacaatgtaatcttagcaaacctggaggattcccttttgggtgagcaagaagttggcctcagcagcgggggtccgagaggccctcggaatccaccatggcatgggccggagtcgctggggtccgagaggccctcggaatccaccatggcatgggccggagtccctggggtccgagaggccctcggaatccaccatggcatgggccggagtccctggggtccgagaggccctcggaatccaccatggcatgggccggagtccctggggtccgagaggccctcggaatccaccatggcatgggccggagtccctggggtccgagaggccctcggaatccaccatggcatgggccggagtcgctggggtccgagaggccctcggaatccaccatggcatgggccggagtccctggggtccgagaggccctcggaatccaccatggcatgggccggagtccctggggtccgagaggcccttggaatccaccatggcatgggccggagtccctggcgacgcagaagatgtgctcactgattcgtggggtggaggacactgcacacccagccatctggctaggaagggggcgtctggggcagagggagtcacaagtacggttttcttaccggatatattgtgtagtggtaaagtctggccttttagtgtactcattgccctaatagtgaacattgtacccaaaaggtaactttttcacctttttcgccctcccgtgttttggaatcttcagtgtctgtttttccattctgtatgtgcatgtgtacccattgtttagctcccacttgtaagtgagaacatcggtatttgactgtttctgagttgttttgcttaggataacggcctccagttctgtccaggttgctgcacaagatatgctttcattcttttttataactcagtagtatttcttggtgtatatatacactgcattttctttatccagtcatccattgttggacacttaggttgaggccgtatctttgctattgtgaatagtgctacaatacacgagtgcaggttatctttttgacatgatgatttctttccctttggggatacccagtagtgggactgctggatagaatggtagttgtatttgtagttctgtgagaaatctccatactgatttccatacaagttgtactaatttacattcccaccaacagtgttcaagcgttcctttttcttcacatccttgccagcatctgttgtttttgactttttaatagtagcctttctgagtggtgtaagatggtatttcattgtggttttaatttgcatttctctgatgattattgatgttgagcatttttttcgtatttgttggcaatttgtcttttgaaaaatattgtttcatgttctttgcccacttattagggtttttttttttttttttttttttttttttgacagtctcactctgttgcccaggctggagtgcagtggtgtcatctcggctcactgcaagctctgcctcccacgttcacaccattctcctgcctcagcctcctgagtagctggtactacaggcacccgccaccacacccggctaattttttgtattttttttagtagagatggggtttcaccatgttggccaggatggtctcgatctgctgaccttgtgatccgcctgccttggcctcccaaagtgctgggattacaggtgtgagccaccgtgcctggcctagggttgtttttttcatgttgagttgagttccttgtagattctatatagtaaccctttgtcagatgtgtagttgccaatattttctctcattctgtagtgttaattatcattattattatttttgctgtgcagaaacttcttaatgtaattaagtcccatttatctatttgttttgagataagatatcattgttctgtggcccaggctggatggagtggtataatctcaaactcctgagctctagtgatcctcctgcctcagcctcctgagtagctgggactacaggtgcacacaaccatgcctggcttttttgttttgttttgttttggagacaggatctcactttgtcacccaggctgtagtgcagtgatgccatctcggctcactgcagcctcgacctcgtgggttcaagcaatcctccttcctcagcccctcaagtagctgggactacagtgcatgccaccatgcccagctaaaggcaagtttttatattttaattttttgtagagacaggggtcttgtgtttcccagcttggtctctaactcctggcctcaagtgatcttcctgtcttaattttacaaaacactgggataacaggcatgagccactgtgcccagccagcttctttaacttagtaatagatgtttatgttttctctgtgtcttgtcatggcttgatagctcattcttttttagcactgagtaatattccattgtctggatgtaccagtttatttacccagtcacctactgaaggacatcttggttgcctccaagttttggcaatttttggtaaagctactataaacatctgtgtgcagttctttgtgtagacattaagttttcagctcctttgggtaaataccaacgaggcatgattgctgaattatatgggaatagtgtgtttagttttgccaaaaagtaccaaactgtattctaaagtggctgtatcattttgccctcctaccagcacatccttttccggatttggtggtgttagtgttttggatttttttgccatcctgataggtgtgtagcagtatctcgttgttttaatttgcggttctctaatggcatatatattggccatcttttcatatgcttttttgccatgggtatatctgctttggttaggtgtgtgttcaaatcttttgcccgtttttaaattgggttgttttcctattgttcagttttaagagttttttttttaaacttttaaaaaatgcggatatgtcttttgcaaaaatatctcccggtctgtgggttgtcttactcttttgaccgtgtctttcacagggcagaagtgctgaatttaaatgggactttgggattctgtttagtctatatatcaaattaggaagaacatcttgacagtattgtgtcttcatatctgtgaacatagaatatctccatttatttagttctttgatttcttcagaattttgtggttttcctcatatataatttgtaaatatttagttagatttattcctctttctctctctttttttttttttttggtgtaaatggtgtatttttaattctgaattccatttgttcattgccagtgtataagaaagtgactaacttcagatcttttaagtattcgcttatttgtgatttaaataagttttaaggctgggtgcagtgtctcacaccagacccagcactttgagaggccagtgtgggtagattatacagtagaccagcctgggcaacatggtggaacatcatctttttttttttttttttttttgagacggagtctcgctctgttgctcaggctggagtgcagtggctggatctccgcacattgtaagctccgcctcccaggttcaagccattgtcctgcctcagcctcccaagtagctgggactacaggtgcccgccacaactgccggctaatttattgtattttttagtagagacggggtttcactgtgttagccaggatggtctcaatctcctgacctcgtgatctgcctgcctgggcctcccagagtgctgggatgacaggcgtgagccaccgcacctggccggaacatcatctttattaaaaaatacaaggattaatgtagttaattctcatttaatcccttcttaggccaggcgcggtggctcacgcctgtaatcctagcactttgggagactaagggaggccgattacctgagctcaggagtttgagaccagcctgggcaacacagtgaacctccgtctctactaaaatacaaaaaaaatttgccgggcatagtggcgtgctcctgtagtcctagctagtcaggaggcctaggcaggagaattgcttgaacccgggaggcggaggttgcagtaagccaagattacaccagcctgggcgacagagcgagactctgtctgagaaaaaggtatatatatatatatatatatatatatacaaaaaaattagccaggtgtggtagtgtgcaactgtggtcccagctacccaagaggctgaggtgggagcattactttactttagcccaggaagtggaggttacagtgagctgagatcgcaccactgtactccagcctgggtgatagagtgagaccctctctcaaaagaaaaaaaattgtctgggtacggtagcttacgcctataatcccaacactttgggaggccagggcaggcagatcatgaggtcaagagatggagaccattctggccaacatggtgaaaccccatctgtactaaaaatacaaaaaatgagctgggtgtggtggtatgtgccagtagtccctgctgctcgggaggctgaggcaggagaatttgttgaacccgggaggcagtggttgcagtgagctgagatcatgccactgcactctagcctagcaacagagcgagactccatctcaaaaaaaaaaaaaaaaaagtcagccaagcaggaggattacttggactcaggagtttgaaagcaccctgagcaagatggcaaggccccagagtgagaccctatctctttaaaaacaaacaaacaaaaaaaaactgcatttcctcctccttaaatttttttttttgtagttattcattattaggctccttgtagtttagttttcctttactgagcttttctaaattttttgttcttttcttgcttctatcattttttaaatatctttcacctcattttgaaatactaggtaatagttttttgggcatgtttggagtatgcttttatagcaacttattaaaataatttttttgggatttgacttcagtactttttctgttcttttttttttttttttttttttttttttttttttttttttttttttgagacggagtcttgttctgtcactcaggctggagtgcagtggtgtgatctcggcttactgcaagctctgcctcccaggttcacgccattctcctacctcagcctcccgagtagctgggactacaggcacccgccaccacacccggctaattttttgtatttttagtagagacagggcttcaccgtgttagccaggatggtctccatctcctgacctcatgatccgcccgcctcggcctcccaaagtgctgggattacaggcgtgagccaccgcgcccagcctgttcattttcatttgaattcagtttttctaaacttagaagatgtgactcagggtagttgtactaatgtctgtgctcccttttctgtagttttcagagtgttcacaactgtgggaacttgctttctgagactttctggttctgttcctctctctcatttttatctttttccttcatcttttttattcctatcctactaattttaattccatttttggagttttttctcagtgtggggccttgactggtcagttccgagggtccctggggcagagactgttggacgcttccattttagacttactgtggacaccctgtactcacttgtcactcattgggactatatcccccttggttgtagtgatgttctgaaactggtgctttccagtgtataccagtgggtttccctttttttagttccattaaacacatttacatttaatgcagttattgatatgattagggtcaaataagtaatattataccatttcactcataaaagtcttacaacaatatacaggcagtctctggctcacgatggttcgccttttgatagtatgaaagtgtcatgcattcagtagagaccgtaattggagtacccatatgaccattctatttttcactttcactacagtattcagtcattacatgagatattcaacacttgattaaaaataggcttagtgttagatgattctgcccaaatgtaggctaatgtaaatattctgagcacatttaaggtagattaggttgagttatgatgtttggtaggttaagtatattaaatacattttcgacattttaaacttacaatgtttttattggaccctaaccccattgtaagttgaggcgcacctgtatttctgtttctcctctcctggcctctatgctattgtagtcatgtatgttatttctacatatggtgtaagtctcaaaatacattgttattttactttaaacactcaagtaataggaaaattggttagtatttttccgtatacttagcatttccaatgtttttcatttctttctagtgcaagtttctgtaattttccttctgacaaaaagacgtaatggggtctgccagtgatttttttgtttttgtttattttttgtattttaggttttatgtctggaaaagcctttctgttgacctatttttgaaagaggtttttgctgagcatagaaatctagattgacagttcatatgtttcggtactttattttctttcttctttttaaattaaattaagaattttttttttttttaagatggagtcttactctcttgcccaggctggagtgcaatggcacaatctcacctcactgcaacctccgcctccctggttgaagtgattctcctgcctcagcctcctgagtagctgggattacaggtgcgcaccaccacatctggctaatttttttatttttagtagacacggggtttcaccatgttggccaggctggcctcgaactcctgacctcgtgatccacccgccacggcctcccgaagtgctggattacaggcatgaaccaccacaactggccaagaaattttttttttttttttttttttttttttgagacagagtttcgctctgttgcccaggctagagtgcagtggtgcaatcttggctcactgcaagctccgcctcccggattcacagcattttcctgcctcagcctcccgagtagctgggactaacaggcacctgccatcacgcctggctaattttttgtatttttagtgaagacggggtttcaccttgttagccaggatggtctcgatctcctgacctcgtgatccacccacctcagcctctcaaagtgctgggattacaggcgtgagccaccatgcccggccagagaaattttttttttttttggtatttttttgtttttgagatggagtcttgctctgtcccccaggctgaagtgtagtggcactatccggccagagaaatttttttagcagacggggtctcgctctgttgcccaggctacagtgccccctggctgtttacaggcactattgtgatacactgcagcctcaaactcctggcctcaagcaatccttctgccttcctagtagctgtgacgatttggaaggcgtatgtcatggtgagttcttccgtgttgctctgtggccttccagcgtgcattgtttctgagaaaaggtcattcttatccttgtttcttttatgtatgcctgttttctgtggctgccttaagagtctctcgccattactcttttaagcagtgtgataatgatgtgtcttcgtgtagttttcttttgttcttttatttctcttgtgctgcttaggttttgctgaggttttgctgagctcgtcggctctgggtttctggtttgggctaccaatttttttttttttttgagacagggtctcgctctgtcgcccaggctggagtgcagtggtgcaatctcggctcaccgcaagctctgcctcctgggttcacaccatcctcctgcatcagcctcccgagtagctgggactacaggcccgcgccaccacacccagctaatttttttatttttagtagagacaggatttcaccatgttgaccaggcttgtctcgaactcctgacctcaaatgatccacccaccttggcctaccacagtgctgggattacaggcgtgagccactgcacccggccgcttgttagtttttttctatatctgcaaatgcatagttattttgatttcctggtaggtatactaattacacctagttcttttagtgtttgctaatcacccacgtgatttcagaacacataaattgatttctcttgtctcttagcatttagcaataaaggatcctgggtattttataatgaaatcacttatcaaaacagggctcttaacataggtcaggataatcccagccttcctcaagtcactaagctgcttaaaagtaaatgcaagtttttgggtacttatgagtatgtacaattttgtggggaagaagtagatagatatgagattatcaaaaggtgacttccttttgttcattgacctcttcctgaaaattaggatccttaatttcttgtattgcgtagttcaatggtagagatatatctttctctagtacattatgttcttttacttctgttactaatcttttaaactctgaatttttttaaatttatttatttatttatttatttttgagacggagtctcactctgccgcccaggttggagtgcagtggcacggtctctggtcactgcaagctctgcctcctgggttcacaccattctcctgcctcagcctccctagtagctgggactacaggtgcctaccagcactcctggctaaattttttgtgattttaatagagacggggtttcatcgtgttagccaggatggtctcgatctcctgacctcgtggtacacccacctcggcctcccaaagtgctgtgataacaggcgtgagccagtgcacccggcctgcactctgattttttaaacaaaaatgaagtaccatgttttgaagtttgctttttttgcttcatttgttgtgaacatagttccacatcagtgtatgtaactatttcattctaaaagagaatatggctaaggaatgttacatgaatgaaacgtaattcagtatgctcgattcatgatcgtttatatttctaattttccccaacaatatatgtcttagcatacctgaacaagtgttttcataaggtaaatcacaaattgtggaattgatggggcaaagacgactcagctttaaaattttagtagatattaccagattggcttcaaaatagttgcatgtttcccaaaatgaaagaatgtgtctgtttcccccttcttgtcaatattggatattagtcttttttattttgctatcgtaaacatttttttattactgagtttgaagatttatttttaatatgactttttttttttgagagggagtcttgctctgttgcccaggctggagtgcagtggcacgatctcagctcactgcaagctccacctcccaggttcacgccattctcctgcttcagcctctcaagtagctgggactacaggcgcccgccaccacgcctggctaatttttttgtatttttagtagagatggggtttcactgtgttagccaggatggtctcgatctcctgacctcgtgatccacccgcctcgacctcccaaagtgctgggattacaggcgtgagccaccgctcctggccatgactttgttttttaagtgacctattcttatccattgttcattttcctgttgatttctttgttttcttttctctcattataaaactcacaggaaatcatgagggcaggcacatgctattatttaccattctatccccataccagcatggtggatactgaaaattgactgaataatggttagcttcccatataagttggtgtcttcaccatatagaaagaagttttacattttaatgaattcaaacctgacaactgttttcatatttgaattctagtgtttgagttatgctgataactattctgtttcatttctttcctggttttttggtacttagaaatttattccagaatcgtgtgtgtgtatggtaggcatccgagttctccttgtcttcctgcctctacctcatatatgatttattcctttacttggctttttttcctttcccttattcccagactttgtggttttctttctggctaccttctaccttcttgaattgtcagcttatttttctggcagatggaattatgatcaccctgtatgggaaaaggagctatacaaattggcaggctttgaaaatgaaccgccataaatccgtagaagttgtatgtctccattcaggagctctgtttgcttctttaggcatacccttcccctctcttgagtgaagagggcaaagacacagaaaacttagtagggaaccaggcgcagtggctcacgcctgtagttccagctacttgggaagctgaagcaggaggatcacgtgagcctaggagttaaaggctactgtgagctatgagcaagcacaccactgcactccagcctgggtgacagaatgagaccctgtctcaaaaaaacaacaaattgttttatattaaatgccttattcatattgaatatcagctgtgtgttttcagttttatgaatggaaaattaagtaaataaaattttgttctacaaatagcttgtggtatggtgtctgttctgtttatagcaaagtaagggaaataccttcttagattaagatagattttattatacagttttactgaagtttagttgacattcaaaattggcgtgtataaagtgaataatgtgtatattttgactgtgtacacccgtgaaaccatcaccacaatcaagaatgatcatattcatcgatcctgaaagtttgtgatccttccttccccacctctcctgtttctccattccttcccctatttctaagcaaccgctgttctgctttctataaccatagattagtatgcattttgtggaatttttgtataaatgatgttatacagtatgtacccttttttctttttttcatgaaaatggacaccttgcattttttttgttgtttttggtgattttggtctgctcttaccctctatacttatcctgtagttcatccatagtgttttgttggtttttagtagttcattcttttttattactgagtagtagtccattgtatggctacgccagcatttgtttatttgttctcctgttgaacacacttgggttgtttccaatatttgactattacaaataaagctgccgtgaacattcccctttgtgtgggcataacttttatttcctaaaaaatggaattgatcatatggtaagtgtatgtttaactttttaaaaaactgaatctggtttgcaaagatgtcttgtttcatattcctactagatgtctttgatccatgccctcaccaacacaagtcttaaatttagccattcttctgggtatgtagtgctatctcagagtggtttaaatttgcatttccctaatgactcccaattttgagcatcttttcatgtgattatttgccatctgtttatatcttctttggtgaagtgtctgttagatctttcactcggtttgaaaattatgttttatttctttctctctctttttttttagacagagtcttgcttggctaattttgtatttttagtagagatgggggtttcaccatgttggccaggatggtctcgatgtcctgacctcatgatccacccgcctcggcctcccaaagtgctgggattacaggcatgagccaccgcacccagcccaaccatttgattttaatgtggttatttctatggttaaatttaaaattcaccatcttgctatttttttattcatatcatttattctttgttctattttttcttcactctcttgttttgaaataataaagcttcttctattttttcttcactgtcttgttttgaaataatagagctttttttaaatcattccattttacctcctttgtttgacttttagcgataactcttcgatttattagttagggtttatggtgtcttatacttaccacagtgtgctgtcaagtactagtacacctctttacatgcagataatagcccaacagtacacttttgtttcctcctcccatccattatttctttgtgatgtgtcacttctgcatatgtcataacacccacgttatcttatttctaatattgctttaagtagtcaattacattttaaatagttgtagagaaaataatctcatacatacccacgtattcactatttctggtgttcgtttctgttaatgtagatttccatctggtattttatttcttctgcttaaagaattttctctaatttcctatcaggtagatcaactggcaatgaatcatttcaccttttctatacaggttgagtattgcttaactagaatatcccttgggatcaaaagtgatttggatttcagatttttttattttttatttttgaatgcttacatatatgtatgtgatgagatatcttggggttggaacccaagtctaaaacttgaaattcatttatggttcatacatactttatgcaaatagcctgaaggtaactttattcaatgttttaaattttgtacgtgaaaccaagtttatgtacattgaaccatcagaaagcaaggaagtcactatttcatgtcattgttcagaaagttgcaggttttggagcattttggattagggttgctcaagctttgtcagaagttaatttgccttcatttttggaagctatttttggtaatttgctaggttgacaggattttttttttccttacagtacattaaagtttttactcctggccaggcgctgtgcctcacgcctgtattcccagcactttgggaggccacagtgggcaaatcacctgaggtcaggtgctcgagaccagcctggccaacatggtgaaaccccatctctactaaaaatatgaaacttagctgggcgtggtggcgggcgcctgtaatcccagctacccaggaggctgaggcaggagaatcgcttgaacctgggaggcagaggctgcactgagctgagatcgcgccactgcattccagcctgggcaacagagcgagactccatgaaaaaaaagagaaaagaaaagaaaattgtgnnnnnnnnnnnnnnnnnnnnnnnnnnnnnnnnnnnnnnnnnnnnnnnnnnnnnnnnnnnnnnnnnnnnnnnnnnnnnnnnnnnnnnnnnnnnnnnnnnnnnnnnnnnnnnnnnnnnnnnnnnnnnnnnnnnnnnnnnnnnnnnnnnnnnnnnnnnnnnnnnnnnnnnnnnnnnnnnnnnnnnnnnnnnnnnnnnnnnnnnnnnnnnnnnnnnnnnnnnnnnnnnnnnnnnnnnnnnnnnnnnnnnnnnnnnnnnnnnnnnnnnnnnnnnnnnnnnnnnnnnnnnnnnnnnnnnnnnnnnnnnnnnnnnnnnnnnnnnnnnnnnnnnnnnnnnnnnnnnnnnnnnnnnnnnnnnnnnnnnnnnnnnnnnnnnnnnnnnnnnnnnnnnnnnnnnnnnnnnnnnnnnnnnnnnnnnnnnnnnnnnnnnnnnnnnnnnnnnncctgacttcaggtgatctgcccgcctcagcttcccaaagtgctgggattacaggcatgagccaccgcatcctgccctcattaagctttttgtatctgtgagtttagagttttcatcaaacatagacattttctgctgttttttctcgtgtaataccttgagatacaattcacacactgtacagctcacccatttaaagtgccagtttagtgggttttgtatattcacagagttgtgccacatttgccacaatcagaacattttcatcatcccaaaaacgaacgctgtacccatttagcagtccttcctctgacatttaggaacgaagtctagcctcagttctgtgtgaacttgggggttgctgcctccaccatcctttcaggtgtttttttccctctggctcaggtagtttctcacatgcatgtgttgatcaataccctgttgacaacttgagccagggagtggggggccccatcagatctccagacttctctctgttctcttctcttctctctgatgttctgcctcttgatttctaatcaccttggcttccctggactttctgtctctggaactcagggaggatcactgtcctctacctgggattcccctccttgggctgcctcctgtaagtgctgtccaaggagtaagctgagacagttatagggtctaccctgtttgtttcccacccttcaggaatgactctcctgcattggttggtgtctcatcttagaaatttgctgattcatgtatattatctgatacgatggttgtcacaggtggcatggtaaatttagttcctgttactcttatcttggttggaagtctcaaggtcgcgttttcttcagccaatagaaaattaatcagttctgaaagactggtatgtttttattacatttgtttcattctctctcagattagatcctgaaccagtaaggagattatggggaacattcttagattgtagaaaccattgacaatttatcaagaagtgtcaaagtgcagatttactgttgcattgaaaggttttatcattctgttcttagtcactgaatcttatgcctactactatttgattataaaggtctgacttactatctgaagcgtttctgggcaagtgtttttacttgttaccatataatacaaaatgctgcttagccatgtggttcttcatgcagttatcactagggtactcagttcttaaaactcagctaagagtaccttgtgttcctttttgtttttaggcaaaattcttgttttctggagatatgaacagcctctgagatagtagaatttgtgttattttgcataagtccaaaccagtcatgacgttcagatattggatttatcattactataaattaatcatatttccctctcatatctgagatcattttaaaggataaatttggccgggcacagtggctcatgcctgtaaccccagcacttttggaggccaaggcgggcagatcacaaggtcaggagatcgagaccatccttgttaacaccgtgaaaccccgtctctactaaaaatagagaaaaattagccgggcatggtggcgggtgcctgtaatcccagctacttggaggctgaggcaggagaatggcatgaacccgggaggcggagcttgcagtgagcccagatcacgccactgcactccagcctgggcaacagagcgagactccgtttcaaaaaaaaaaaggataaattatttttgtgctcctaaaaataaagatgcactctaagtagtattggtacattaactttttattttaacctgctaagtgaggagcttataacttaatcatagcaatgaatcgtagaataggtaagatttcctgttaaccccttctcacaagtttttggataataatttaagttactcataaaaacatctaaatcttactgaaatctacagaacaaaatgtagagaaaactatataatccgttcctgtatttttttctcttacaggaaaagtaagaagcttaagcgcatctttgtggtcactaactcacctgacagctttgcatttgagtgacaattccctgtcccgaattccttcagacattgccaagcttcacaatctggtgtatttggacctgtcatctaataaaattcgtagcttacccgcagaactcggaaacatggtatcactcaggtatgcagattcaacttaatacatactagctatatgacccctaaaacaaaatataggccgggcgcagtggcttatgcctgtaattctagcgttttgggaggctgcgagaggatcatgaggtcaggagatcgagaccattctggccaacatggtgaaaccccatctctactaaaaatacaaaaaattagccaggcgtggtggcgggcacctgtagtcccagctactcgggaggctgaggcaggagaacagtgtgaacccgggaggtggagttgcagtgagccgagatcacaccgctgcactccagcctgggtgacagagcgagagtccatctcaaaaaaaacaaaaacaaaaaaacatttgttgtgttaggaaacaaaactgttcatttaatggtatttgaataaaaggaaacataactatatcctttataactttatagttttgtttttgggaaaattgaatgtcagctaataataaattaagtagatcattggctgaattttttaattactgtattttgtgtaatagactttatttttgaatgagaaagtttggacagagagtgggtagactgcaaggtgcttatgttatcccacatacttcctcatgacaaacagggcaccataccatccttaacacagggtccaggaaaccattgccagttggtgaaacctttttgccatcccagggcttgtatgtttgatagtagtaaagcctggacttgaaggagctataattattaaatttgggggcctgtagcatgaaatatatagcatttggattcacatgtgtaagttcaggttggaatcttaactttgccatttatgagttgtgtgatcttggacaaccttcttgacccaggataagggatgtttgagataatgggtaaaaaaacactagtaccttgcctggcatatactgtgttttaagaaatggtaattgcagactgcatgtggtggttcatgtctgtaatcccagtactttgagtggctgaggcgggctgattgcttgagcccaggtgtttcagaccagtctggtcaacatagcgagaacctggtctctacaaaaaaaaaaaaaaatccccagataattagctgggcttcgtggcatgcacctgtagtccctgctacttgggaggctgaggtggagggatggcttgagcccaggaggttgaggttgcagtgagcagagatcatgccactgcactccagcctgggtgacagagcaagaccctgtctctaccctcctcccctctagaaaataagaaagaaaagaaatggtcattgctatgtttattttgatagagatgagggtctcactatgttgcccaggcaggtcttaaactcctagcctcaaaagatcctcccatcttggcctcccagagaattgggatttcaggcatgagccactgtggctggcccatgattattattattattttacttctgttttataaggtagataagatctaaccaagttaatataaagctaaattccatgtattatgttaatcccaatggaatattttgtactatttcatgttaactgactttttgacatggttccactggctttcctgctgccttctgccattagccatgtagtaaaaaggaataaggaccttttgaaaggtctttgcctctattgctcctactccagccttttgacttttttttaggtttaattgagtttgttctatgactgtttttagtcctctgaaacaaatttacttgaaggacctcctttttctttttctttttttttttttggagacggaattttactcttgtcgcccagactggagtgcaatagtgtgatctcggctcactgcaacctctgcctccgggttcaagtgattttcctgcctcagcctttcaagtagctgggattacaagcgtgtgccaccatgcccagctaatttttgtatttgtagtagagacagggtttcaccatgttggccaggctagtctcaaactcctgacctcaaatgatctgcctgcctcggcctcccaaagtgctgggattacaggcgtgagccaccgtgcccagcccgagggacctccttttttctgtatattgtatttggaaataaacaggagccagatatcagaacttgctcttcttgttgagtttacagccacacagaccttctggcttgctcagtaaccaagattcatttaaatgtcaaaaaccaaagattatagaaatagatttcttgcacacttaaaaactgacaaataggctgggcacgatggctcaagcctataatcccagcacactttgggaggctgaggcgggcggatcacaaagtctggagatcgagactatcctggctaacacggtgaaaccccgtctctactaaaaatacaaaaaaaaaaattagctgggtgtggtggcaggcacctgtagtcccagttactcgggaggctgaggcaggagaatggcgtgaacccgggaggcggagcttgcagtgagccgagatcgcatcactgcactccagcctgggcaacggagcgagactccgtctcaaaaaaaaaaaaaaaattgaaaaataaaactgcatgcgttacattgccactgtgtccgtattgggtctctggtggttctttccccgcgtgtccccccggctcacccttgaaggttcctttgatatttatatcatgattatctctgcaaaacaaatcatattaagaataatcatgaacagttaatacagctgctgttattttttaaatgcaactttagttgatagcaatcataagcttaattatgcagctgttacgagctcttttgagtcgttaacgaaatgatcattttagttctcttttaagaattcacatggtaggctgctttatcatttccactttcttaaatgtgtagtagaccccatgtgtactagaccagtgatactcagtgtggtctgtgacctggtgccagtttgcaaactgtcttgccagtctgcagtgagattaatacagcagttgaggaattttatatgtctgttaaatctaatactttttaaaaattgggtcttacattttgtccttttcccccattatttcattttctctagtaatttgtttcttgtattctctggcagtttttttttttaaaccacatgttatttaagaaacgcagtactagacattgaaatataacgtaacattttttcattcttaggtgcttatgttcctagaaactatgttgttgattttaactgttaaaggctaacatatttttctgacttcctggaatttttacatcaacagggagctccatttaaataacaacctgttacgagttctaccttttgagctgggaaaactgtttcagttgcagactttaggcctgaaaggtatgacttccatatttgtacttcttatggtttgtgtatatgtctttgaatctaaggaagccaagaagctttctgctaggggattcttttaaagactcattttcccccagacttcatcagtttcttagctatatcgcaatggttttatcttctctgttcagctgtagactatctactagtctttgttttctttttttttgctccggacccagcccttcttttctagcctctgttttaatgaaccctgtgttctggtgatacatccctgaggctatgctttatttcatcatgttataaacagctgtttttcttagattcaaatctcaaaaaacatggagcctctcatatagtacagaaaacaggaagtcgaaaatgttgaccatttgaacctgctgatgatcaagatttaagcatatttaaaaaaacttgatttatgaggacttgtgattatagggccataattgatccagcaagaactattaggaaataaatattttttaagccaacaatattgaaagttatattttgacagtatgtcaatgcctataaattttttatcatgttaagcagttcttcaccagccttgggtaggtgtgtctagcctactgtacagttgcttcttcaaaaaagtcactagatgaagtcgtcaagatttgcacccttaggccgggcacagtggctcacacctgtaatcacaaaactttgggaggctgaggtgggtggatatcttgaggccaagagttcaagaccagcatgagcaacatggcaaaacccaatctctaccaaaaatacaaaagtcagcttggcatggtggttcccacctgtagtaccacctacttgggaggctgaggcatgagatttgcttgaacctgggaagcagaggttgaagtgaggtgacattgtggcattgcactccagcctgggtgacagagcgagactctgtcttaaaaaaaaaaaaaaaaggaattgcactcttagtttcttaaaaatacagttatataaaaggttttagtcctgtaaatattttatatatcataaaagaacagtttttttttaaataaatagaaatatatgttttaaaatgtatggaaagtcatattcaacagatatcaacattgtaaatggtttgtaatgtttttttctgtgtgggctgaactagctaaggcttctaaatataaaggccagtgaaatgcaagatgaagatgcccttttctgttatatttcccagtctagctgtttctaaatttgaagaacagaaaagtactgtgtggcaaagtgtccatatactgactgccagaattaacagtgaatactttatcatttttgtgtataatttttttaatgcaaaagaaatggaacattacagaatgttgagaccctctttgttcttccagtcttcctcatggcggaggtatgtttttccaattcaaggttttcctaatcttacactatatattttacaaactgtaatttgtaattcgtactcactaaggcttttcacaaactttatttgaagttagggtcaccagtcacaaatttgcttttttttttttttgagagagagtctcttgtcgcccaggctagagtgcagtggcatcatgatatcggctcactgcagcctccttctccctggttgaagcaattcttctgcttcagcctcccgagtagctgagattacaggcacccaccaccatgcccagctaattttttgtgtttttagcagagacgagatttcacctgttggctaggctggtctcaaactcctgacctcaagtcatttgccctccttggcctcccaaattgctgggattacaggcgtgagccactgcaccaggccataaattttcatactgatttaatgtacaggaaagcctctaagtgtaaatgcctgcagcagtagggcagttctttatgactccttcatttttgatgatcccttgcttttccatttcagatgctttactttatcacctctagacatctgtgtttatttcttggaagtgtagtttcaaagagacatttgcttatctcacatatcctgctggacagcattacacatctgtaatagcagtcttcttttactggttttacttcctttggacaaatccttttattttttctgagcttttgcagtttacactttaattctaatgttgtgtcggaacattgggtggaatgatccgtttgggggtagagctgctgctttacttcttaaagcaattgtatcatctttgccctctgaaaactatcattgatttctcccggcatccgcttggaagagagaaaataatatcacttagttcagagtcatgtttgtttgctattatacgtcatacattcttgcagaaccaaagtatttctgcctcatgaatcagttcataccattttctttgaagttgttgcagaatggctggcaggcttcactttttccccccacatttttaaatactcttcaaaattgtgccgcagtactacagttaaaggcaggactgtgaccttaggtgcccattcactttttttccttaaactgtttattttgagatacttgtagattcacatgcacttacaagaaataatacagaacaatcctatcccctttacccaactccctccaatagtagcatctttcaaaactatagtttcacgttatcgtacatagaacagtcaagacacagaatattttgtgaaataagccagacacagacaaatacaacatgatctcatttatgtgtgaagtctttaaaagtcaaactcatagaagtagagtgtagaatggttgttcccagaggcttggggacgggggacagagtggaaaggagaggtgttggtcagagggtgcgcagtttcatttacacagggggaataggtctggtgatctgttgcatagcatagtaactatagttaataataatgtgtattttttaacagctaaaagaatggatattaaatgttttcaccacaaataagtattcgaggtggtggatatgttgattagcctgatttgatcattccacaatgcataactgtgtggaaacatcacattgttccccataaacatacacaattatatgtccatttagaaaaggatgtagaacatctctatcaccagaagatccttttgttacactcttacagccacacctactttgttcctgccccagctcactgcttctaagttttgctattttaagaatgctaccatcccgggcgcagtggctcacgcctataatcccagtactttgggaggctgaggcaggcagatcacgaggtcaggggatcgagaccatcctggctaacatggtgaaaccccgtcactactaaaaatacaaaaacaaaattagccaggcatggtggcaggtgcctgtagtcccagctactcgggagactgaggtgggagaatagcgtgaacctgggaggtggaggttgcagtgagccgagatcgtgccactgcactccagcctgggcaacagagcgagactccgtctcaaaaaaaaaaaaaaagaatgctactgaatggaatcatactgtatgcggtcttttgagatgggcttttccactcaggttaattatttggatatttgtcctggttgcatgtattgatagtttgttcctttaaatagacaaaagtagtagtctatgatataaatgtctcgtggttagtttaaccatttacctgctgaaggaaatctgggtggcttctaatttggggctgttacaaataaagttgctgtgaacattcagtgtgcaggttattgtgtgaatatagttattcatttctctaggataaatgtccaggagtgcagttactgggtcatttgagggttgtatatttaattttttaagaaattgctaagtggttttctgtagtgtaagtactgctttacattgtaccagcagtgcacgggtgattcactttctctgcatcctcaccagcatttggtgttgtgactgtttttatgttagccattctggtagatgtgtagtcatttcatggttttgatttacatttccccaataaagatacccaacatctttgcaggtgcttatttgtcatctgtaatgtttttcttctgtgacatttcttcttgtcattgtccatgttctaattagattatttgcttttttactgggagtcctttatatattctaggtacgagtcgttggtggaatatgtggtttacacatatttctctcagtatgtagctttttacaaggtcattgcacagcaaaagtttttaattttaatgaagcccagtttatcagttttttcttctgtggatcctgattcttgtttcaagtctaagaactctttgaatagctctaagtcccaaagattttcctcttaggttttcttttaaaagttttatggtcttatgttacatttaagtctatgatccattttgacttacgattgagttaaaagatgtgaggattagctcaaggttctttttgtgtgtgtgtggcctgtcgatgtccagttgctccagcagcattattgaaagatgatcttaccttcattgaattgcttttgcatctttggcaaaaatcagttgagcatatctgtgtgaatctgtttctggattttttattctgtttcattgatctatgtgtccatccttccgccaacatctgcaaaaccagttctgaggccccaggaaggaatcggctctttgagcctcagaagggtacagctgtgcgtggccacagggaacacactccaggctactggggtctagtgatgaggcacttttgtcaggacgtggtccacagagaggagaaaagaaatgttctttagtctcagaggccaagacagacgcatgggaggagagggagatggcaaggacctggataactggaggcgtgatgaatggagagcctggtgcaggatccatgccacgggaggaggcccctgtggagagtgagaccttgggcggttagggctggccggactgggccccctgctcctcacagtgtgacctaaagccgcggcctggtatctagtgctttccagcgtagcccaggaaggcgcgccctccttcggcagaaacaccttaaaaaaaaaaaaaaaaaaaacctgctattgctttttagacagaaacaatatggagacttttatttcattgagttctgctctttagtatttccttccttccttcttgtgtttgctttttttttttcctagcttcttgaggcgatagcttagattattgaattgaggcttctgtctttattgagacttttgtcttcatgcatttaatgtagaaattttcctcccaaccctgctttagaagctatgtccagcaacaaattttgatatttgtatttttattttcactagctcagtatatttttattattttgggacgaggtctggctgtgttacccaggttggcttccgactcttgaggcccaagcaatccccccacctcagcctctgaagcaggtgggactacaagcactttacccccggcttggttctcgatttttaatatgatttcagtgtggtcagaaagtgaacgttctgtgtgatttcaattcttttccatttgttgaagtttgtttgatggcctaggatatggtccatcctggcatatgtttcttgggtactggaaaagaatgtgttttctgtttttgggtagaatgttctataaatatctattagctcctgtatattaacttaatgtctgttaggtcgatggtagtgaggtttttgtcgtgttctgtcagttgtggagagagaagtgttaaagtctccaacaataattgtagactctgttttccttttagttctctcagtttttgcataaaatattttgtgcttctcttgtttggaagcacacttagaattgctgtgtcttcttgagggattgagcctttattattacataatgttattttctatctctggcaattttatttcctctgatgtccactttatctgatattaatataaccactcctgctttcctttgatcaacttttgcattatatatctcttgccattcctttcttgcctctattattacatctgaagtgagtttctgtggacagtatatagttgggtcatatttttaaatccattctaccagtcttttaattggtatatttagaccatttacatttaaagttaattagtaagttagggtgtaagtcgtaagtctgccattttatttttttgttttctgtttcttcatcttttgtctttttctctttgcttctgcctgcctatgggttactgaaacattttttagattccattttgatttttctgtagtggtttgagtgtgtctgtttgtatagatgtttcatggttcctctgggtatcacactagatgtataacttaccacagtctattgggggttattttaccagttcaagggaaatatcaaaccttagctctctttacatccttttattcactgccattgataacagttcagaatattttctttacataaatttagaatcacattagttttatgattttttttttttttttgagacagagtctcgctctgttgcccatgctagagtgcagtggcgcgatctcggctcactgcaagttccgcctcctgggttcaaacgattctcctaccttgccttccaagtagctgggattacaggcacccaccaccatgcccggctaatttttgaattttaatagagacgaggtttcaccatgttggtcaggctggtcttgaactcctgacctcatgatccacccacttcgccctcccaaagtgctgggattacaggtgtgagccaccgtattgggccaaaattttttaaactgtcaaacgtgatttagaaaacttaaggaaatctcgtatttgcccatatttttttgtttacctatattgttttcttcttccaaagtccttcttttatcatttcctttgtatttagagaactttttctagtggttccctttgggtagatctgctggcagcagattctgttagttttttgtcctctgagattgtctttatttctccttcattcctgaaggatgttttcactggatataagaatctgggtttgacagttctttcgacacctgaaaaatattttgctgcttccttctggcttccatggcttatcatgacaaatctttcgtcattccaatttgtttttctcctgcaggtaaggtgtcatttttctccggctgctttcaagatgttttttctttgtctttagttttcagaagtttaattatgatgtgtcttgctgtggattcctttgggtttttcttgtgtaggggttcactgtgcttcttgaatctgttggtttatatttattgccatattgtgagaatcttcagccattattgctttgagtactttttcagccctgtcctccgtgtcctcagcgtccaaggctctgatgacatgaatgttagatcttttgttatagtcccacaagccccagagactttgttctttttgttgttgttggtggtggtggtggtgttggtctgtgttcttatctatctatcaatcagtcaatcagtcaatcaagagacgaggtctcgggctggagtgcagtggcacgatcttggctcactgcagccttgacctcccaggctcaagcagctctcctacctcagcctcccaagtagctgggaccacaggcatgtgccaccatgcctggctagttttgtttgtttgtttgtagagacgagattttgccatgttaacaaagctggtctcgaactcctggcctcaagtgatcctcctgcttcagcctccaaagtgctgggattataggcatgagccactgtgcctagccttcatttattttatttttcagttctaatatttccatttggttttaaatgttttatttgcctgaactttgtttctttgctcagtcttcctgttttcttgtgtgttttgtgtgtgtgtgtgtgtgtgtgtgtgtgtgtgtgtgtgttttcaagcatgtttttaatttctcattgaagcatttttgtcatgattcctttgtcttggttgggtaattctgtttctgtcatctcagggttggaagttgtgtttatctttttgcatttgatatcttcgtgtcttggtgtgatgagctattttcatttgaaactggactcactcatgttatgaaactctagatcttgtttaaaccctttagtttggttttctttgcctagcactgctgtgacaagggaaccaggcactgtctccttactgccagtggaggtagaagttcaggttccacttggccttcgctgacacctgggagtgggggctcctcgttgcttctggtggaggtggtagttttggctcttcacgcggcctccacaggcaccgcactggcgtgtcctctttattgcagggagatggtgaaagtcttgactctccttggcctcctctgacaccacctcagagggaggaagggagctccatatcgcctcctttctttctcttgcagcagaagtctaccagcctctccacttgctcatgctggcatgggtagagatgggaccacgtttttttctttagtgttaagcttgagtacagtggttcttatctaaaacttttgtccttttaggcagcccttccctggtcctttggcttttgttgggattcttttgggtctgtacccattggtatttccatgttactggcttcttagctgcatgtctggcatatctgaggcaaaaagtgaacccagggaactcatccctgtgccattcgtcaggtcctgcagtctttggctattctgccttctctccttttttcagagttttgtgtttgctttacacataatatacagtgcttttagttgtacctagtgggaagaatagggaaaagtgtttttactccatctaccctaaagtaacttctcatttacttttttgttctttctcaggactcagtatagttttaattccagaattttattgttattgactttattcatatatattgttttctgtttccaagtagtgaagagcagattaattttcaatttaaaagaagtcctggccgggcgcggtggctcacacctgtaatcccagcactttgggaggccgagtcgggtggatcacgaggtcaggagattgagaccatcttggctaatgcggtgaaaccctgtctctactaaaaatacaaaaaattagccgggcatggtggcagctgcctgtagtcccagctacctgggaggctgaggcaggagaatggcgtgaacccgggaggcggagcttgcggtgagccgagatggtgccactgcactccagcctgggcaacagagcgagactccatctcaaaaaaaaaataagaaaaagaaaacagcatcactgtaggtctggttagaatgagctgtttacctgataccgagaagttttcagttgacttcattttctcaagatgtgtttcacaaagggtcctgataagcttcaggttgtaactgcttatctcacgggattgtgactcagtgaaaacatgaaaaggctgtggtgggtataaagaaccacacacacgtgagagaatggtactcttgtaattgccttcctgcaaatacctactttgcacttagagcagcacatttttctttttataattcttagaatcctagaatcttaaaaccgaaagatcttaaagataaatgaactttgccatttttcccatccatgcaactcagcttctttgaaggatactccactgcctcacagcacagggtgtctcaaatagttaacagtgtttgccaacctcttctattcggccttggcctttcctgttaaatttttttttttttttttgagacagagtctcgctctgttgcccaggctggagtgcagtggcgcgatcttggctcactgcaagctctgcctcccaggttcacgccattctcctgcctcagcctcctgagtagctggactacaggcgcccgccaccacgcctggctgtttttttttgtttgtttttgttttttttttcttttatatttttagtagagacgaggtttcaccgtgttagccaggatggtctcgatctcctaacctcgtgatccgcccgcctcggcctcccaaagtgctgggattacaggcatgtcttccttctgctctttgagtccagtcttttatgagagaataggaaaaaacacttcctttaggttttgatcattcttatctaccatatcctttagtttttcttcatttggtatggttaacatctttgaccattttatctgccttcttcaaactgcagaatttgtctggttttcttaaaatggcgctgtggcatccagaataatacacaatgcttgtgtaggatggataggaactttgctccatgaaaccctgcgctgcactgttgttatttgtacttttatttctcatgtacataagaaacccttctgagaggatttgagactcttgtaggtatatgtaaatcattgtttttgctctcattttggaacaaagcagttattgaatttacagatggctcatggccctgggattttttccccctccttagtgagttaattcttaagccaagtcagccccattttgttgctttgttcagtatgactttaaaaaatctaagtgcaagtgtatatttgtcattagggtgttttgttgttagctttgtgacattgtagagttttgattctctgatgcattacgctggctttcatccttcccttcactgtttcctctgcccacccactctcccagtcacctgcctgccccgttcgtgttttgctcactcttgtttgttataaccatctgtattattgaaagtgttggcaaggcagggtcagatatagagcactgctagtgcatttctgattgacatcagaccattaacattatgttttgaatgtgtatatagaacatggtatgaatcatttttacttatatcagaaactgaaaaaacaatattttctatagtctgacatcttactagtaactataacatagttatggatgatctgataattttgatacattttaaaattttgaaacattttattacttagtttcattttacttatttcaaaaatatttccaggaaatccccttacccaggatatattgaacctttatcaggaaccagatggaacaagacggctgctgaactatttgcttgataatttgtcaggtactgcaaaaagaagtaagtggttatttgtttaaacctttttattaggaagacgtgtaagaatattgcttaattctgtattttctattcaactagttacaacagaacaaccacctccaaggtcttggattatgttacaagaaccagataggacaaggccaactggttggtagtcttttattttttaactgttatttttgctcagtctctataagcctaacagtattgtcagcatgcttagattacaggtagcattaagacagaatgtttaaggttggtttggtttgggaggtaataaaaaagaattcttgctcacatgacctctatgtatactacattgtgctatatagaaagtgtgctataaagcagtgcttctcaaatgggcagtttatcccccagaggacatttggcaatgtctggagacaattttgatggtcgtaactggggagaagtgctgctggcgtctggtggatggaggccagggttgctgctcagcattctatagtacacggcacaggcccccacaacagacttcacctgaaatgtcagtagtgcgactctggttgagaaacccttctgtagtgtactgatgaaattcacttaaaatgaatacacccaaatttttctctatgagaagtttccaaatcctagcatgttccaaatggatttgacactaccgagttataagagagccaaacccttacttagaggaaagtggaactaatgactgctcatctccttttaacctaaattctatgtaaatagtttgggagctttcatggtgcgtgtaacaaaatttggtctgtgataccgttttcattttgcatgaattaacaatagttgtgctgtagaagaaaatgaggcatgcctattaaggatactacctatccagtttccacatcttacattaacagttggtagcatggtagaaggagtatagaaatgaggaatgttaggctcagagactgaagggctcacgagcttagatttttcacttccagactttctgtgcctacctctgtagcaggtagtacattgtattctaacttgttcacttatctatcctgcttgcattatccgtcttttatttatcccccatatgtggcgtacagtagcttttcagtgactatagattgaatgaatacggtcaaacttaacatttaagtgaaaaccattactgaaattaattatatatttttttctgccacatgtgtgaataagtaaagttatctttcctacagccttgttttctgtcatgtgctataatgttctttgtgataaatatgcgacccggcagttatacggctactgtccatcatgggcgctaaactgggactacaggaaaaaggccattattcaagaaatcttgagctgcaatgctgatatcgtaagtcttcaggtaagtcagacagaagacagtcaacctagcattgataaaggaaggagcaactaggaatacattacgctgacacatttgaagttttagcttcagtagttcttaaagtactgcttttttctgttattagtgaatcctgggagtactgcctgctttgctttgcagtgctatgttgcaaaataggcaaatgtgttaagctgggatttatgcgtttgccatgaccgctaaatactcaccttcctcctccctccagcgtccctgcactatttttgaattgggtggcaaagttactgaaattctagcgtggtcaagctataacttgcattgccgaccatgttgctagaacaattaaggcaccgtgtaaaaaggactgacttggtacacgaacattttgggttctcagtgcaactctcatagtcactcatatgatcttgaacatgttactttctgcccaagggtctgaagttatgatttgtaaagttcgtcgacctctgtggttcttgttccacctcagttctaagacataaggaaatacacatgcatagaagtgtgtctttcactcactgttcttaaacaacaatgagttgcccttggtacctagtacctgtaaaatgacaagtcgctgttccagttggtttcagataaatagtgttgaaaagatgttactttttttttttttttttttttttttgggtggtggggagacaggctctttctctgtcccccaggctggaatgcagtggcatgatctcagctcactgcaacctccgcctcctgggttcaagtgattctcagcctccgtagtagctgggattacaggcatgcaccaccatgcccggctaatttttgtatttttagtagagatggggtttcgccatgttggccaggcttggtctggaactcctgggctctagtgatccgcccgcctcggcctctcaaagtgctggggttacagacatgagccaccatgcccggcccggaaagatgttacattctttaatctgcagaccagtcctttgaaattatttcaagctctcaaactatacatagaagttaatatgcagactaatttttgtcttatgaaataactgtgctgtttacaacttttcaggaggttgaaacggaacagtattacagtttttttctggtagagctgaaagaacgtggctataatggattcttcagtcctaagtctagagctaggacaatgtcagaacaagaaaggaaacatgttgatggctgtgcaatattcttcaagacagaaaagtaagtcatcttattttttaaaaagaacgttttctcagtatttgcagggtgggggccaagggtgtggaaactaattggcaaatgagagaatgaggcactatattattactgaagcaaagaatactgtttgacctagggggtttttgtttgtttttaatcatcagaaataaccttgttttggagacatgcttaaagtactgctgtttcttcaggtgtttactagggtttaactcccaattgttaattgaaataccatgtagttaaaattccctctatgacggtacagggattcttaaacccatactttagaaaagaattgtttaaaaattacaaggtagaatattccaacataaaacttaaacagaagatgactacattttcttcagttgtaaaaatatttcaagttgttatttgtatcaataacagactgagagcaactttaaatggatgtgggaagcttgatgctgaacgtggaggattttccgtaatgtgatttaagtgccatcgtatctgttaaggaagtttgggaaaactgcgtttcccacaaagctaacctcttggtattcccaactctgtgtgtgtgtgtgtgtgttgtttttgttttagatttactttggttcagaaacacactgttgaatttaatcagctagccatggcaaattctgaggggtctgaagctatgctgaacagagtcatgacaaaagataacattggggttgcagtactgctagaacttcggaaggaatcgattgaaatgccgtgtgagtgcccttcacttcctgtaaaattgaccagctctgactagacatcttcaaaagaatagaaaacagaaatttcattgtgtattcatggtcttgtctaacacctgaagaaactcagtgagaagttgtctttcctaaaatgtatctctttttctctaccacaaagcttaacatgagaaagcattgcccattaaagtattagaagccttgaaaagcattaaaaaacctttttttttttttttgctcctaagaatttttcatataaaataaatgttgaagtaaatattaattaaaataactgctcaggggtaagaactccatacacttttgtaattttttggcagcaaggatattctgtaagctaacttcttttcctgatctatttaaaataatcattttattagctgggtgtggtggtgggcgcctgtaatcccagctacttgggaggctgagggagagaactgcttgaacctgggaggcagaggttgcagtgagccaagattgtcacactgcactccaacctgggtgacagagtgagactcctcaaaaaataaataaataaataaatataaataaataaatacataaaataattattttaaaggtcttgagttttggataaatggaccacttcaaattgaaagcatatttcaagtgaccattatgctgggagccgaaacttgtgtcacttgaggaacagttggaactggagaaatttaatgtgaagtatagaaaaaatggaaataggacttaacgattgtcttaaatctaagaaagagggtttagatgtaattttgtgaggctcgatttaggacatccaaactaagaccaaaagtttcaaggagacagaattttaaaaatcaagctgtcccaaatagggctatttttgtacaagtagtgaatgccctgtgctggaagcatcagcccaggttgagatgtgtatttctcgggtttgttgtagggcacattcagtcatccggtgggaattttaggtgtcttttctattctgggactctgagagattatttgctttcagacgctgtaagaatatatgggctgatgggcgggttttgtctctttctttgtttcgtttttatctaatgtagctggaaagccacatcttggaacagaaaaacaacttattcttgtggctaacgcccacatgcattgggaccctgaatactctgatgtgaagttggtacaaactatgatgttcctctcagaagtgaagaacattattgataaagcctctcgcaacctcaaatccagtgttttgggagaatttggaactattccacttgtgttatgtgcagatcttaattctttgccagactctggtaagaaaataatgtgattttatgtagaatattttttgacataagatgatttagtaatgttttgtttctgatcattccaaattaagtccaaataaaaattcagtttgtaatggcagctatgagcaggttttaaacatcatgttggggtggaggggccattttgaagatgaaacgatattatggaaacttgaggagaaggatgttaatcatcttgaataaacacataagcaataacgtgaaataactctttaaagaacgtatgtagttccattttattactccaaagtcagagataattatggttattaagacagcctctttgggattccagcgtgtggtaatataatcatagtttaaatttgagttaaaattatagaatctcaattttgcatgtatttataacttgattagaaaaatacacctcaggtggaaaatgagctcctttatttgcacacatatcagtcaagcgattttgacaaagagcaaggatcttgatttttattaaaatgtagaatacagaaagcctgatctggagcgctctttccgtggatagtatacaataaacagtagcccttgtaataacaaactgtttctttctttttgtgtttcaactcatttatacacacaggaatactcttccttggacgtgaatgtacgcatgaacacacacacacgcacatttggaagcacgttcttgacatcacaatagatagagcccttaggaagaaagaaactggctgggtgccgtggctcacgcccgtaatcccagcactttggggggcccaggtgggcagatcagttgaggccagcagttcgagaccaacctggccaacatggtgaaaccccatctgtactgaaaatacaaaaattagccaggcgtggtggtgcacgcctgtaatcccagctactcgggaggctgaggcacaagaatgacttgaaccccagaggcagaagttgcagggagccaagattgtaccactgcacttcagcctgggtgacagaacgagactataaataataataatatgataataaaagagagagaaagaaaaactgagttaaaattcaatttcagggaaaatcaaagctatctgaaatctgtaattatttcatctcatcaagttatctggggattactgcccctgaagcagttgagtagtagtctctgacaatttctctacatgctttctactttctgtgtagctacaaagtatctgaggagtaaagagaaaatctggtcaaacattaatatccaagacccatttcagcattgagaaatacagtattataatagcaggcaggtcagaaaatgtccagccttgctaatttgtgaataaaatgtaaatgaaagtatattttcatagcccatcttatgcttagtaaattgggaaaatacttcaccagggatgtggacgtttggcctgtaactagctggtggtattctcttccatagttggcagcattataaaatggcacattcagtcctaatcttgggattttataccaagtaaataattgagcgtaagccagaagtctgcatactaagatgctgatcgtggtgttatctttaattctttgtaaaaagtggaaacaacctgcattttacaaaataagtaaccagtaaatattatccaccagcccaattgcattgtgcagccattaaagaacgataattgggaagacacatgttcataaagcaaattataaactattcaatactctgtgatgacaactgtgtaaaaatagatttgggcaagtcctggcaaatgtaaaaggaaacattttggaacgtgggaatatgtatagtttaaaacttcttactattgcatgatcttttaaaattactttttgtatatatttgacaataaaaaaatttgtcttcattgtaggtgttgtagaatatttgagcacaggtggagtagaaacaaatcacaaagactttaaggagttgaggtataatgaaagtctcacaaacttcagctgtcatgggaagaatggaaccaccaatggaaggatcactcatggtttcaagttacagagtgcctatgagagtggcctgatgccttacacgaattacacatttgatttcaaggtgtgtcttgagactgataagcttttcaaacctgtcttttactggcaggtgttctgatacatcattatgtctttaaaactgtggctgtgtgttcaggctggaatgaagcagtcttgaattcattgacagcaatgttctttgttttttgtttgagacaaggtctcactctgttacccaggctggagtgcagtggcacagtgatggctcactgcagcttcaaccatgccggctcaaacgatcctctcacctcggcctccctagtagctgggactacaggcgcctactaccacgcctggctaattcttgtattttttgtagagatggggtctcgctatgcccaggctgatcttgaactcctggcctcaaatgattcttccacctcagcctcccagtgtgctgggattacaggcgtgaaccactgtgctcagccagtaatattcttttattactcttttttagaagtccatgtgatcagtgtcacatccttactttgtagatatttattctaataattttcaggataagaagtcacatgaaataatctgtaaaattcctaagttgactttttcaccttttggggacaattatgtttcttatattctcattactaatagctagatatgcagcaccataattatctagtttgagtggcatttgtggtaagatgttccttctcttacattttaatttaactgaaagtaaactcttgcatgccaaaatgtgatttatattagctatttttaagtgtttctaagatacatcttttttctccccctagagacagtcttgctctgttgcccaggctggagtgcagtggcgtgatctcggctcactgcaacctccacctcccaggttcaagtgattctcatacctcagcctcccaagtagctgggattacaggcatgagccacctcacctggctaatttttgtatctttggtagagacggagtttcaccatgttggccaggctggtcttgaatacctggcctcaagtgatccacccaccttggcctcccaaagtgctgggattacaggcatgagccaccgcacctggtcagacttacaccatttttaacgttagtgattgtttagggctgtcactttcttgtgttcaactgtcctttttctaaaaagagatatggtctcactcattttgcccaggctgaagtacagtgatgtgatgataacacactgcagcctcaaactctcgggctcaggcaaccctcctgcctcagcctccccgctaacttggactacaggtgtccgccgccatacccagatcttttttttttggtaattttttgtaaagacaaggttttgctatattgcccagcccaatcttgaacccctggcctcaagcaatcctcctgccttagcctcccaaagtgctgggattatagacgggagctaccacatctggctcagctgcccttttaaactactttttgcatttctgctttcttaaaaatttcttaactcccagctttctatttctaagctgctggaaaagtaatcatttagattagactgtcagagtgtaaataagagtttagatagtatctcaggagcctttgcaccttagagcatagaaagtaaacccctgtttatcctcaggtgccccttcctttcaggttcttcaggagacattgaagagaaagcatgggtagcagccacagagtgggaatgcttagcgttttctttctctttctgttgctgatgcagtggcaggaagaagacacttgaatgtgcttcagtacatttggccaagagcatgtagaggggaggaccagaaccatcagatgggaacagtttagtagatgccatggcggggtgctgctgagagaaaagggggtcaggtagagacagtcctgccctcatggagctgaggtgtgatgagagagacaagtctcaaccacacaaatgagtagataattacaccttgagatggccattagcaagggaagtgaatctgtggtgagaggtagggtagtaagtaggtaggagcaggattcaggaaggtctttggaaagcagttgaacctgacattgaaagattaagaaggaattgacctcataacaagtagaagaaagtgttccaggcagaatggtggaggggggcagtgtgtgtgtgtgtgtgtgtgtgtgtgtgtgtgtgtgtgtgtgtgtgtgtccgtccgtccgtccgtcctggggcaggaaagaacttggtacctataggtcccctcacatcctcacccctttctcattccaaaggctagtgtggaagcagggaaagtggcacaaattaggctaggaaagagaagcagaggctgcatcctgaaaggccttttaggtcttgttaaagatccagataagaagaatgcttcattctgctagatttgacattttgcacggggaccatttggtgtatgtagtacagacctcatcctacaagctagtaagtttcacttgttctgttctgttcaccaaacatgacataaaggcatgtcttgaaagcactgaggattttagtgttgtcttatacggtgcttatctttttttctgttgtttttcagggtataatagactacattttctattctaaacctcagctgaacaccttaggcatcctgggccctctggaccaccactggctggttgagaataacatcagtggctgcccgcaccccctcatcccctctgaccacttctcactttttgcacaactggagctcttactgcctttcctgccccaagtcaacggcatccaccttcctggcaggaggtagtcaagcaccttcagaggacagccttgattcacttgtaaacttgtgaaaatctgaacataggggagtgaggtatggccactgaggatttttgcttgcttaagaatgatttggactttcaatctgattatttgataaggatatagtatgaaagccaggtgctagcaacagacaaattctgagcccaatatgctttatactgctagacagggattggtgtgtttgcacctgtctttcatttgtcataagagattttcctatttcttctacccaatagaatattttcatgcctggaaataggaaaatgtgtgaacagcgtattctcttcacacagaaatctgtagcactgcttttttgaggccagtagcaacatccagagatcattcttccatactttactccctcctttttcagacttgtttgtaaagtacagaatctgaatttagcctttatgattgtatatgatccacagaagacctgatttatgaaattttgtactaaaatcatttggaaatgattgtattgtaaactgaggctaaatttttttttaaacctgtttcatgtgttataaaggccagcttgtaaaagaagctgcaacagactttctctgctcatgatttgcactcttagggttttgttagcccttttgtactactttctttttaaattgagaacatggttctttacatataaatctgcttcaaccttaggatgttttcagaccagaggcaacttattcatgaatttttatgaaaactatctactaggacagataagctgaacagtgatgatctgtagacatttatggactgaatgtaatggttgatatatgtacattctgatatttttaaatctttaactttttaaagttaaaaacctacagctgcttaggtccagcttcttaactctttttgagacacttcctgtcctatctccactgtgcctgcctaaatttgttctcaccaagcactgcctgtgcatgcagagaaaatctgtgcatcctcttttatatttttaaaatactgtttaacatttgtgagaattttatgaaaatgcttttgtatgagctgtggctttttcccattgtgaagcattgaatatcacattttggaacatgttatagggtgagtccctggatctttgctcaccagatccaagcactgcttctcggtgtcattgcagtgtgctgcttgtcacccagaatactactatcatgtgaattctttttgtcgtcagtgtcttttccttagtctttttgttgttgttgttgttgttgttttaatcattccttttttaagaagaagtaattttccatttatgaagcagtatgaattagatgtattttcaaaacaggtccctaagacaattcttcagatcatttttaaaatgactaagtcattttagtatgtcaagcaagataaaaattacatcataccgtctattttgcccatagtgccatttagagatgaaaaccagctttaactttgcaaagtgaacatgtacatggtctgctctcatttattcattcttctctcaaaagtcaaatgaatgcagagggagcttggtcaaactgcttttgtttcaactgcaggcaggggagcaaaaggacgccatgtgagcattaggaaaaaaaatactcactcttactaacaatttttatacagaaaatgagtcattttggaaatgattcttatgttttttttttttctccttttagaaaattctccaaaaggttttgatgttgaatcttggtcttggacctgttttttcctttgagggttttttgttttttgttttttctaggatttcattgtgatgttttggttttgttttttgctttttgtttaagttgtgctgacaccaaacacatccagtttataatcagtatattggaaagctggtattgatgtagaaccagtgcataactttttatggggttttgttattggtttttttttgtaaagtgtgaataaaaggtatgtttactcatttttcctgaacactgtgttggtaatgtgcatcatgacaatttccagtgaaggtgagctggagctggttggactaatgagactgaggaagcagcttttcctacgatctgcattatgtaatcacaggtccagagagctttatggaagcgggagaggaggagcacttactcatgttgtatttgttaatggaggatgtcatcttttcatagatgctggaactagagtgcacttgttagatgctaaaggtttgagctttacacaaaatgtcttcatctgtatttgttattgtctacaatatatttgaatttggggcagcatattaagatgtaatggcctgttatgtcttgaaaatacttgttttgcctcttccaggcatactgcattctgtggatcagtttgaacagcttctccaccttatttggacagtgataaattgaaccaagagtgtagatttacaagtgtaaccttcaaaagaggaagaactatttggggtctgtaggtaatgaacagtcacaccaaaatagactatgatgcttttgttaagaaaggtttcatgttttagatattttccgtgtcctaaataattttcaataatctataatccctaaaatgcaataaaaactagtatgttttcacggtgtatattttttttcaaaaattctgtaacaaatatatttaatgtgttgccataatgtcatttcagtatttttgctggataaatccattttagaaatgtcttacaaaaagtttagggcatgttttctgttttaaagaccagaagtttgaaggcacccaaatccttgtcgccaatctcctgaagtacagctttaccatattagtggtcattatttatgctttgagagtttcaatattgttcgtcaagttaacttatggcataatttaagctaaagttgtagaaatgaattgttgagtgcaactttcatagtcccaaagataggcagagaacatctccagaaatgtgtgtgtgtgtgtgtgtgtgtgtgtgtgtgtgtgtgtgtttaatatgatttagtgacaaccaggaaaacttacttgggattattagcactttcaaacttagggacattattaaattggatggaatgcacttctaaatgtttaaattaaaatttcaaagctctttcgagattcaggttctcaataataatattcaagttttagagtttcactttgtactatttaaatttatggaactagtttccatactgacttgtaaggttttggggtcatatataaggactaaagccaagctaggcaaaacaatgacagcaccgttttttcagtgaagctctcagaatgtccagtacagatgttgcagataattccaagaactccttcagcaggtgttcttcaccattcgtaaacagtattttaagatgttcactttgctcttctttttggttacatacattttaataactggtatgttgaagtagtgtctaaaagtatctagtctttattcacagtacattatattgtgtgatgcactggactaactcttgtttaccattcatgtaacaaaacccagcacattatctgcactataagctcaaagaatgtcacatccgcccagacagctctttgatgagggtgatgggaactgaataaaccatacggactggcagtaacaagggcttttactgttctgttcagtggaaccttcttggtcaaattgtaattagctagcattatatttatatacagggtcttttttctttaccgatgtattttcctactcatagccaaccaataaattcagtatctgtttcaaatattttagaagtgtagtttgtatagctgtagtactgaggtttgaggaaaaataaatgttgatcagcagaccacgtatttaaaattctgaatcttctgggacagggttgtaactcagccttccaaagggaagagtgcagggggacggggccatgatatggggaaatggtgtaaactaatgtatttctttattggctgttattctgtataacactcatatctttgccaaagttcaattttatatttaggcaactgatggtccttttgcatttaggattttcgttgttgttaccttatacctcatgatataaggaatgggctcatgtgtcttccgtcttttggaaggaggttgacatattttaaataaatgcttttaaatacagtagcaaacattgtgttggggttataataattcattaaatgtcttgttgcctgtattttgttgtatgtgtaaactctaaaaacgtgtgacttcctaagtcttccgatgtcaccttacaattgagaaaacaacatgagttcctttgcttttagaacgacttccatagcagacgtacatttttatgtacatgtgggaaaaaccatgcaaaatctggacagtttagataatatttcctttgatctccagtttttaaagtaggcatgttctacttaatccttaatacagtgatgcacattagggggatgtatgctgagaaatgcatccttaggtgattttgccattgtgtgaacatcagattgtatttacataaacctaaatggtgtagcctattacacatctaggctgtgtgcttagcctgttgctccaaggctagaaacctgtgcagcatgttactgtattgaacactgtaagcagttgtaagacaatggtaaatatttgtgtatctaaacatggaaaagacagagtaggctgggtgcggtggctcacacctgtagtcccagcactttgggaggctgaggcaggtggatcacgaggtcaggagatcaagaccatcctggctaacacggtgaaaccccgtctctactgaaaatacaaaaaattagccgggtgtggtggcaggcacctgtagacccagctactcaggaggctgaggcaggagaatggtgtgaaacctggaggcggagctttcagtgagccgagatcgcaccgttgcactccagcctgggcgacagagcgagactccgtctcaaaaaaaaaaaaaaaagtgaaaatacagtataaaaagtggtatgtctgaggctgggcacagtggctcacgcctgtaatctcgttttgggaggccgaggtgggcggatcacttgaggccaggagttcaagaccagactgcgcatcatggcgaaaccccatctctataaaacatagaacaattagctgggcgtggtgagacgcctgtggtcccagctacttaagaggctgaggtgggagaattgcttgagcccaggaggtggaggtttcagtgaggagattgtgccactacactccagcctcaatgacaaagtgagactctcaaaaaaaaaaaaaaagatacctgaataggcagctctaatatatcttatggaccatcctcatatatgtggtccatctttgaccaaaatgtcattatgcacagtgcatgactgtatgtagttttacctctatgataagtttttgttcctccatataattgtcaaaaaagtaagtataaagttaggttgattgtagtggctcatgcctgtaatcccagcactttgggaggccaaggtgggcggatcagttgagcccagaggttcaagaccagcctgggcaatatggcaaaaccccacctctacaaaaaattcaaaaattagccgggcatggttgtgcatgcctattgttccagccactcgggaagctgagacaggaggatcgcttgagccgggaggctaaggttgcagtgagcccagatggcaccactgcactccagcctgggtgacagagcaagaccctgtcttaaaaaaaaacaagttaatgaagtatgtgccatgttacttgataaattccaattaatgttctttaaaagaacaagtacctaaagaaacgtgaactgaaatatatttagaataaagtttttaggtttttagataacgagataacaatgttatatctaccgagagttccctttttagactattatttaggtattcaaattgattctaaaataagcttttggctgggcgcggtggctcatgcctgtaatcccagcactttgggaggctgaggcgggtggatcacaaggtcaggagatcgagaccatcctggctaacagtgaaaccctgtctctactaaaagtacaaaaaattagccgagcgtggtggtgggtgcctgtagtcccagctactcgggaggctgaggcaggagaatggcatgaacccgagaggcagaggttgcagtgagccgggatcgcaccagtgcactccagcccaggcaacagagcaagactgtctcaaaaaaaaaaaaaaaaaaaaaaaaaatcttttacacatattataaagataattttaacataatgagtggttatatgttagaagaaacttgtagaagatagttttctactagaattttaggataatttgagaaatgtttttgtaagtaaatttcccctgaataatattttaaatagattgttacataaatgaatctaaccagctagtctatagctaggggttgggaggactgctggattgcaaagtagtttgaaaacgagtttctacagttttagcacatttaacatttttaatcaaatgaacaaggaaatgtcagttttctcattttctttgaatcacaaacttcagatcactctaatctaccgaaaagctattaaatgagtttggtctgttacaagaaattttgcttgctctatcaagtgcgacctgaggcaggcttcaagagctttaattgccggatacgttccagcttaccagcaaagggaatctaagctgctgggcttacagagttacccactagtaagttgcctaagcttacttaaaattgagagatttacaattgtcagactctgtgcttagtttggaaataaagatttataggcataatccttgacttccaagttgttcgttgaccttatatctagtgcattggatgctgaagatgtaataggtgtggaggaagaaacttgggctactgggaaggttgctgtagcagcactgtgcaggatgcatgaaaaggggagatgaatacttggtgtcagactagtcagctggtttctggtgtggtccagttgacagctaagctgaggagggcttgcagagcagtaagcctagaaaggaaagggaattttgaaatgtttaggaaagggaagtaataatctcaattcctgcctcgtgtggatgaaaagacagataaatgagttttgtccagtcagtgctttcattatgtaaaccctgattcaaaatcttatgtctgccaccaaggcccccatttttccttcacccatctgacaaaagtatttagttgaagaatcttgtttctcaagctggattttacttcattccccattatcatttattcagattttagtctgcaggagaaatccattgtgcccctactaaacagccattagttccagaaaatgataaaaggtagcatttgatgctaaattaattcttttagcctgtttccctttggctttttctattactgaaaatagtttaaatgtaaaaagactgcctttctgaggttgctggtaagaccaagcattgggaggtatttaagtagagcaacatacaagcagcgaagggagggatccaagaattctcagctctgcgaagctcccctcatgcaaaggactcgcgctgtgtgttgttcagtgtggtggcctctagccatgtgtggcttttgagcatttgaaatacggctgttgtgactggtactgaaaaatatattttttttttgtcaagcaaaacaatgatttttataggatcacatttatcttttaattgttgcattgtgtaagagaaccattgccttgcttgcttgtattacacataaacacattgccagatgatatcaaagaattgacttcattctaacagtattttgctactaaccaaagtaacattatagtgtttatctaaatgttatatgcagttactgtgcctatgtaaatcctaattagtagttaaagtgagatgtatgttcttatttttctaatttaaaaaatatagacggggccaggtgcggtggctcacgcctgtaatcccagcactttcggaggccgaggcaggtggatcacgaggtcaggagatcgagaccatcctgcccaacatggtgaaaccccgtctctactaaaaatacaaaaattagccaggagtggtggtgggcaccttagtcccagctactcgagaggctgaggcaagagaatcaggtgaacctgagaggcagaggttgcagtgagccgataccgtgccaatgcactccagactggcaacagagggagactccatctcaaatatatatatatatatgtgtgtgtgtggtgtgtcccaagtaactgggattacagtgcacgcacggcaccacaccccactaatttttgtatttttagtagagacagggttttaccatgttgcccagggtagtctcgaacttctgannnnnnnnnnnnnnnnnnnnctgtatgcacatatatatacacatgtacacatatatatacacaaatatatatacatacaaattattaaatttaaaatcagtggtggctcaagcctgtgtaatcccagcactttgggagcccgaggcgagtggatctcctgaggtcagcagtttaagaccagcctggccaacatggtgaaaccccatctctactaaaaatacagaaatcagcccagagtgctggcaggcgcctgtaattccaggtactcaggaggctgaggcaggagaattgcttgaacccgcgaggtggaggttgcagtgagccaggaccgtgccactgcactccagcctgggcgacaagagcgagaaaaaaaaaaaaaaagtttaaaaatcatgtatttgctaatgattatttgctgaattgtgaaggagttttaatgattcattgtcctattgattccaatttaagattcttttgcaacaaaaggaatgctaacgtgtatgcaataatctaaagcagaaaatgtcagagtctgtggcgcacattttctcaccaatatcacactgaatatgaatgaactaaagttgaagctccaaggaagggaaaagcttatttgtgatgttcacagacaggtacaagaatttatgttgaaatcgaaactttataatgcaaatccagaatatggctttgacacattttctaacatttaaaattttaattgtaatttaacattttataaattgcaaaaactacaagtaaaatttgaagaacactgttgatacatagataaatttagagtagctgccaagcgtggtggctcacatctgtaatcccagcacttggggagggcaaggcagaaggactgctcgaggttgggagtttaagaccagcctgagcaatacagggagaccctgtctcagaaaaataaaatttagagttttttaaattatgcattacccctttgaatttgatgttcatattctagagtcaatgcaagtattcctgagtacttagagagaaacaaataggtttgctacaaagttcagtagattcctataaaacagaaatagcaggtttgttgatatgggtccagaaatgtttttaaatgattttggggatttgattcaattataaaacaagtataattgttgcaactttggtatgtgaatcaatttttaagattcaactatatgatatttataggagatgcactttagatgtaaaggttacaaataggctgagagtacaaggatggaagaagatgtcatgcaaacaggaactataaaaattggagctatcctaacgtcagacaaaatagactaggaaacaaaaaatgttcctagagatgaaggatatatcttctaatgatgaacaacagcaaacaacaaagccccaaactacaggaagcaaaagctgacagattggaagggagaaattgacaattcagcaataataaatggaaatttcagtacctttctctcaatagaacaactaggcagaaatcgatgttaataggaaacaccaactgaacctgatagagaagtaaaacaataccagaatatacatttctcccaggtgtacatggaatattctctagggcagatcatatgggatgctataaaacaagccataataagctcaaaaggattgaaaacataccaaatatattatccaatcaatgaagtgaaaccagggaagtttgaaaatattttgaaataaatgaaaagacaatataccaaaacatgggaagcagtgaaagcaatacttaaatttataaacacattttaaaagaagattttggggccaggcgcggtggttcacgcctgtaatcccagcactttgggaggctgaggcaggcgggtcacgaggtcaggagatcgagaccatcctggctaacatggtgaaacctcgtctctactaaaaatacgaaaaaaaaaatcatctgggcgtggtggcgggcgtctgtattcccagctacttgggaggctgaggcaggagtcccagctacccaggaggccgaacttgcaatgagctgagaccactgcactccagcctgggcgacagagcaacacgccatctcaaaaataaaaaaaagatcttaaatcttttcaacttaagacactggaaaacagtaaaccaaacccaaagcaagcagaaagaaggaagtaattagaactagagcagaaaatcatgaaatagagaatagaaaaacaggagagggccaggcgtggtagctcacacctataatcccagcactttgggaggccgacgcgggcagatcacgaggtcaggagctggagaccagcctgggcaacatggtgaaaccccgtctctactaaaaatagaaaaattaactggtcgtggtggtgcacgcctgtagtcccaactactcaggaagctgaggcaggagaattgcttgaacccgggaggcagaggttgcagtgagccgagatcgcaccactgcactccatcctggcgagagagggacactttgtctccaaaaaacaaacaaacaaaacaaaacagtagagaatcaaagactgattctttggaaagatcagcaaagttgatgagcctttaaagagactgaacataaaaagctacttgaattactaaaatcaggaatgaaagggagacattactaccaacctttatagaataaaaaggattattatggaatgctatggacaattgtatgcccatgaattagacaatgtagatgacatggatagattcctagaaagacactaccaaaactgactcaagaagaaatagaaaatctgaatagatgtacaacaataaagggattgaattagtaatgaaaaaaaactacaaaatgaaaagcataggccctgatggcttcactggtgaatcctatcaagtatttaagctgataccaattcctcacaaacttcaaaaagtagaagagggaacactttttaactcattctgtgaggtcagtattaccctgatatcaaaaccagacaaagatatctcaaagaaaactacataccaatcacttttaaatatagatccaaaagtcctcaaaaacatactagcaaaataggattcagcaatatataaaaaaggattttgcaccatgaccaagtgggatttatccaattaatgtaatgtattgtatcagtagaacaaaggacaaaagcgtaggatcatttgacaaaacttactctccaaaaacaaacaaaaacgagaacaacttcaatctggtaagaggcatttacaaagaacctacaggtaatatgatacgtaatgatgacagactaaggctttcccccaagaaagcatggaattcatgttcttggattgaaggataatattaagatggcaatactccctaaattgatctacagattcaatgcagtctctatcagaatcccagctgactttttgtttgttgcagaaattgacaatctaatatttaaagtcatatggaaatccaagggacctccaaaatagccaaacagtcttgaagagggtcaaagttggaggactaaagcatcctgattttaaaactagttacaaagctacagtaatcaagacagtgtggttctagcataaggatagcacattggtcaatagaattgaatttaaagcccaagaaataaacccttacatttctggtcaattgatttgtgacaaacatgccaagatatctcaattggggaaagtgtagcatcttcaatgaatagtgctgggacagctgaattcaggcatattttggagatattgtgggctttgtttctggccactgcagtaagcaagtcgttaactttttggtttctcagtgcatgtaaaagttgtttacatgatagtatagtctattcattatgcaatagcattatgtcttaaggaacatgccttaattttaaaatactttatcgcctaaaaatctgagccttcagtgagtcataatcgttttactggtagaggatcttgtcctcagtgttgatggctgctgactgnnnnnnnnnnnnnnnnnnnnnnnnnnnnnnnnnnnnnnnnnnnnnnnnnnnnnnnnnnnnnnnnnnnnnnnnnnnnnnnnnnnnnnnnnnnnnnnnnnnnnnnnnnnnnnnnnnnnnnnnnnnnnnnnnnnnnnnnnnnnnnnnnnnnnnnnnnnnnnnnnnnnnnnnnnnnnnnnnnnnnnnnnnnnnnnnnnnnnnnnnnnnnnnnnnnnnnnnnnnnnnnnnnnnnnnnnnnnnnnnnnnnnnnnnnnnnnnnnnnnnnnnnnnnnnnnnnnnnnnnnnnnnnnnnnnnnnnnnnnnnnnnnnnnnnnnnnnnnnnnnnnnnnnnnnnnnnnnnnnnnnnnnnnnnnnnnnnnnnnnnnnnnnnnnnnnnnnnnnnnnnnnnnnnnnnnnnnnnnnnnnnnnnnnnnnnnnnnnnnnnnnnnnnnnnnnnnnnnnnnnnnnnnnnnnnnnnnnnnnnnnnnnnnnnnnnnnnnnnnnnnnnnnnnnnnnnnnnnnnnnnnnnnnnnnnnnnnnnnnnnnnnnnnnnnnnnnnnnnnnnnnnnnnnnnnnnnnnnnnnnnnnnnnnnnnnnnnnnnnnnnnnnnnnnnnnnnnnnnnnnnnnnnnnnnnnnnnnnnnnnnnnnnnnnnnnnnnnnnnnnnnccgcagtgagctgtgatcgcatcactacactccagcctgggtgacagagtgagactccatgtctaaaaatatcaggcatttacaattatgcttccaagtgtgatcttgagccttaaggtcttactcttacatcatcagcatcttcttttaacttggccggaaacctgacttcaatgacattaacctaattatacatctgagttatctatcacagaagatgcacagaacggcctcagtatcgcaataccaccagtaagagaagtttaaaattattttcacagttcctcttgtccttggggtggagccaccgcagggcggagaattcaattactacatttttacattacttagaatagttccttggtggttaggcccccgcttagaaacccagttaagtttctttcttttcctaacttcaatttttagaggctgctttaaagaatttgtgtttggtcttttgtgacaatataaaatatttttaaaatagtaaccattttataacatttcatccttgggctgggcgccatggctcatgcctgtagtcccagcactttgggcatggcattcttgcctttgaggggtcgacttcagttgtcttatacgtccctgctgaagcatgtgtaccttttccctgtgatatacaaaccctgggtctgggagttgacggtgtggggatgcaccgcctcaaggccatccgagacatagcttctgttttcaagtccccattaaatgtttctttgtgagatactggacttgtcagactctttttgaccccttagctcccttggtctttgggggcaggtctgcatatacctgctcactgaagagca

SEQ ID NO: 2755 - DNA, 2992 bp, Homo sapiens
gtagcactgcttttttgaggccagtagcaacatccagagatcattcttccatactttactccctcctttttcagacttgtttgtaaagtacagaatctgaatttagcctttatgattgtatatgatccacagaagacctgatttatgaaattttgtactaaaatcatttggaaatgattgtattgtaaactgaggctaaatttttttttaaacctgtttcatgtgttataaaggccagcttgtaaaagaagctgcaacagactttctctgctcatgatttgcactcttagggttttgttagcccttttgtactactttctttttaaattgagaacatggttctttacatataaatctgcttcaaccttaggatgttttcagaccagaggcaacttattcatgaatttttatgaaaactatctactaggacagataagctgaacagtgatgatctgtagacatttatggactgaatgtaatggttgatatatgtacattctgatatttttaaatctttaactttttaaagttaaaaacctacagctgcttaggtccagcttcttaactctttttgagacacttcctgtcctatctccactgtgcctgcctaaatttgttctcaccaagcactgcctgtgcatgcagagaaaatctgtgcatcctcttttatatttttaaaatactgtttaacatttgtgagaattttatgaaaatgcttttgtatgagctgtggctttttcccattgtgaagcattgaatatcacattttggaacatgttatagggtgagtccctggatctttgctcaccagatccaagcactgcttctcggtgtcattgcagtgtgctgcttgtcacccagaatactactatcatgtgaattctttttgtcgtcagtgtcttttccttagtctttttgttgttgttgttgttgttgttttaatcattccttttttaagaagaagtaattttccatttatgaagcagtatgaattagatgtattttcaaaacaggtccctaagacaattcttcagatcatttttaaaatgactaagtcattttagtatgtcaagcaagataaaaattacatcataccgtctattttgcccatagtgccatttagagatgaaaaccagctttaactttgcaaagtgaacatgtacatggtctgctctcatttattcattcttctctcaaaagtcaaatgaatgcagagggagcttggtcaaactgcttttgtttcaactgcaggcaggggagcaaaaggacgccatgtgagcattaggaaaaaaaatactcactcttactaacaatttttatacagaaaatgagtcattttggaaatgattcttatgttttttttttttctccttttagaaaattctccaaaaggttttgatgttgaatcttggtcttggacctgttttttcctttgagggttttttgttttttgttttttctaggatttcattgtgatgttttggttttgttttttgctttttgtttaagttgtgctgacaccaaacacatccagtttataatcagtatattggaaagctggtattgatgtagaaccagtgcataactttttatggggttttgttattggtttttttttgtaaagtgtgaataaaaggtatgtttactcatttttcctgaacactgtgttggtaatgtgcatcatgacaatttccagtgaaggtgagctggagctggttggactaatgagactgaggaagcagcttttcctacgatctgcattatgtaatcacaggtccagagagctttatggaagcgggagaggaggagcacttactcatgttgtatttgttaatggaggatgtcatcttttcatagatgctggaactagagtgcacttgttagatgctaaaggtttgagctttacacaaaatgtcttcatctgtatttgttattgtctacaatatatttgaatttggggcagcatattaagatgtaatggcctgttatgtcttgaaaatacttgttttgcctcttccaggcatactgcattctgtggatcagtttgaacagcttctccaccttatttggacagtgataaattgaaccaagagtgtagatttacaagtgtaaccttcaaaagaggaagaactatttggggtctgtaggtaatgaacagtcacaccaaaatagactatgatgcttttgttaagaaaggtttcatgttttagatattttccgtgtcctaaataattttcaataatctataatccctaaaatgcaataaaaactagtatgttttcacggtgtatattttttttcaaaaattctgtaacaaatatatttaatgtgttgccataatgtcatttcagtatttttgctggataaatccattttagaaatgtcttacaaaaagtttagggcatgttttctgttttaaagaccagaagtttgaaggcacccaaatccttgtcgccaatctcctgaagtacagctttaccatattagtggtcattatttatgctttgagagtttcaatattgttcgtcaagttaacttatggcataatttaagctaaagttgtagaaatgaattgttgagtgcaactttcatagtcccaaagataggcagagaacatctccagaaatgtgtgtgtgtgtgtgtgtgtgtgtgtgtgtgtgtgtgtgtttaatatgatttagtgacaaccaggaaaacttacttgggattattagcactttcaaacttagggacattattaaattggatggaatgcacttctaaatgtttaaattaaaatttcaaagctctttcgagattcaggttctcaataataatattcaagttttagagtttcactttgtactatttaaatttatggaactagtttccatactgacttgtaaggttttggggtcatatataaggactaaagccaagctaggcaaaacaatgacagcaccgttttttcagtgaagctctcagaatgtccagtacagatgttgcagataat

SEQ ID NO: 2756 - protein, 92 aa, Homo sapiens
MCIMTISSEGELELVGLMRLRKQLFLRSALCNHRSRELYGSGRGGALTHVVFVNGGCHLFIDAGTRVHLLDAKGLSFTQNVFICICYCLQYI

SEQ ID NO: 2757 - DNA, 5535 bp, Homo sapiens
cagcgttgtgaatggtcatctcgctcgagctctttggatttgttgttactgtgcatgcccaaagaaaaatacgagccccctgaccctcggaggatgtatacaattatgtcttctgaggaagcagcaaatggaaagaaatcccactgggcagagcttgaaataagtggaaaagtaagaagcttaagcgcatctttgtggtcactaactcacctgacagctttgcatttgagtgacaattccctgtcccgaattccttcagacattgccaagcttcacaatctggtgtatttggacctgtcatctaataaaattcgtagcttacccgcagaactcggaaacatggtatcactcagggagctccatttaaataacaacctgttacgagttctaccttttgagctgggaaaactgtttcagttgcagactttaggcctgaaaggaaatccccttacccaggatatattgaacctttatcaggaaccagatggaacaagacggctgctgaactatttgcttgataatttgtcaggtactgcaaaaagaattacaacagaacaaccacctccaaggtcttggattatgttacaagaaccagataggacaaggccaactgccttgttttctgtcatgtgctataatgttctttgtgataaatatgcgacccggcagttatacggctactgtccatcatgggcgctaaactgggactacaggaaaaaggccattattcaagaaatcttgagctgcaatgctgatatcgtaagtcttcaggaggttgaaacggaacagtattacagtttttttctggtagagctgaaagaacgtggctataatggattcttcagtcctaagtctagagctaggacaatgtcagaacaagaaaggaaacatgttgatggctgtgcaatattcttcaagacagaaaaatttactttggttcagaaacacactgttgaatttaatcagctagccatggcaaattctgaggggtctgaagctatgctgaacagagtcatgacaaaagataacattggggttgcagtactgctagaacttcggaaggaatcgattgaaatgccgtctggaaagccacatcttggaacagaaaaacaacttattcttgtggctaacgcccacatgcattgggaccctgaatactctgatgtgaagttggtacaaactatgatgttcctctcagaagtgaagaacattattgataaagcctctcgcaacctcaaatccagtgttttgggagaatttggaactattccacttgtgttatgtgcagatcttaattctttgccagactctggtgttgtagaatatttgagcacaggtggagtagaaacaaatcacaaagactttaaggagttgaggtataatgaaagtctcacaaacttcagctgtcatgggaagaatggaaccaccaatggaaggatcactcatggtttcaagttacagagtgcctatgagagtggcctgatgccttacacgaattacacatttgatttcaagggtataatagactacattttctattctaaacctcagctgaacaccttaggcatcctgggccctctggaccaccactggctggttgagaataacatcagtggctgcccgcaccccctcatcccctctgaccacttctcactttttgcacaactggagctcttactgcctttcctgccccaagtcaacggcatccaccttcctggcaggaggtagtcaagcaccttcagaggacagccttgattcacttgtaaacttgtgaaaatctgaacataggggagtgaggtatggccactgaggatttttgcttgcttaagaatgatttggactttcaatctgattatttgataaggatatagtatgaaagccaggtgctagcaacagacaaattctgagcccaatatgctttatactgctagacagggattggtgtgtttgcacctgtctttcatttgtcataagagattttcctatttcttctacccaatagaatattttcatgcctggaaataggaaaatgtgtgaacagcgtattctcttcacacagaaatctgtagcactgcttttttgaggccagtagcaacatccagagatcattcttccatactttactccctcctttttcagacttgtttgtaaagtacagaatctgaatttagcctttatgattgtatatgatccacagaagacctgatttatgaaattttgtactaaaatcatttggaaatgattgtattgtaaactgaggctaaatttttttttaaacctgtttcatgtgttataaaggccagcttgtaaaagaagctgcaacagactttctctgctcatgatttgcactcttagggttttgttagcccttttgtactactttctttttaaattgagaacatggttctttacatataaatctgcttcaaccttaggatgttttcagaccagaggcaacttattcatgaatttttatgaaaactatctactaggacagataagctgaacagtgatgatctgtagacatttatggactgaatgtaatggttgatatatgtacattctgatatttttaaatctttaactttttaaagttaaaaacctacagctgcttaggtccagcttcttaactctttttgagacacttcctgtcctatctccactgtgcctgcctaaatttgttctcaccaagcactgcctgtgcatgcagagaaaatctgtgcatcctcttttatatttttaaaatactgtttaacatttgtgagaattttatgaaaatgcttttgtatgagctgtggctttttcccattgtgaagcattgaatatcacattttggaacatgttatagggtgagtccctggatctttgctcaccagatccaagcactgcttctcggtgtcattgcagtgtgctgcttgtcacccagaatactactatcatgtgaattctttttgtcgtcagtgtcttttccttagtctttttgttgttgttgttgttgttgttttaatcattccttttttaagaagaagtaattttccatttatgaagcagtatgaattagatgtattttcaaaacaggtccctaagacaattcttcagatcatttttaaaatgactaagtcattttagtatgtcaagcaagataaaaattacatcataccgtctattttgcccatagtgccatttagagatgaaaaccagctttaactttgcaaagtgaacatgtacatggtctgctctcatttattcattcttctctcaaaagtcaaatgaatgcagagggagcttggtcaaactgcttttgtttcaactgcaggcaggggagcaaaaggacgccatgtgagcattaggaaaaaaaatactcactcttactaacaatttttatacagaaaatgagtcattttggaaatgattcttatgttttttttttttctccttttagaaaattctccaaaaggttttgatgttgaatcttggtcttggacctgttttttcctttgagggttttttgttttttgttttttctaggatttcattgtgatgttttggttttgttttttgctttttgtttaagttgtgctgacaccaaacacatccagtttataatcagtatattggaaagctggtattgatgtagaaccagtgcataactttttatggggttttgttattggtttttttttgtaaagtgtgaataaaagtttccagtgaaggtgagctggagctggttggactaatgagactgaggaagcagcttttcctacgatctgcattatgtaatcacaggtccagagagctttatggaagcgggagaggaggagcacttactcatgttgtatttgttaatggaggatgtcatcttttcatagatgctggaactagagtgcacttgttagatgctaaaggtttgagctttacacaaaatgtcttcatctgtatttgttattgtctacaatatatttgaatttggggcagcatattaagatgtaatggcctgttatgtcttgaaaatacttgttttgcctcttccaggcatactgcattctgtggatcagtttgaacagcttctccaccttatttggacagtgataaattgaaccaagagtgtagatttacaagtgtaaccttcaaaagaggaagaactatttggggtctgtaggtaatgaacagtcacaccaaaatagactatgatgcttttgttaagaaaggtttcatgttttagatattttccgtgtcctaaataattttcaataatctataatccctaaaatgcaataaaaactagtatgttttcacggtgtatattttttttcaaaaattctgtaacaaatatatttaatgtgttgccataatgtcatttcagtatttttgctggataaatccattttagaaatgtcttacaaaaagtttagggcatgttttctgttttaaagaccagaagtttgaaggcacccaaatccttgtcgccaatctcctgaagtacagctttaccatattagtggtcattatttatgctttgagagtttcaatattgttcgtcaagttaacttatggcataatttaagctaaagttgtagaaatgaattgttgagtgcaactttcatagtcccaaagataggcagagaacatctccagaaatgtgtgtgtgtgtgtgtgtgtgtgtgtgtgtgtgtgtgtgtttaatatgatttagtgacaaccaggaaaacttacttgggattattagcactttcaaacttagggacattattaaattggatggaatgcacttctaaatgtttaaattaaaatttcaaagctctttcgagattcaggttctcaataataatattcaagttttagagtttcactttgtactatttaaatttatggaactagtttccatactgacttgtaaggttttggggtcatatataaggactaaagccaagctaggcaaaacaatgacagcaccgttttttcagtgaagctctcagaatgtccagtacagatgttgcagataattccaagaactccttcagcaggtgttcttcaccattcgtaaacagtattttaagatgttcactttgctcttctttttggttacatacattttaataactggtatgttgaagtagtgtctaaaagtatctagtctttattcacagtacattatattgtgtgatgcactggactaactcttgtttaccattcatgtaacaaaacccagcacattatctgcactataagctcaaagaatgtcacatccgcccagacagctctttgatgagggtgatgggaactgaataaaccatacggactggcagtaacaagggcttttactgttctgttcagtggaaccttcttggtcaaattgtaattagctagcattatatttatatacagggtcttttttctttaccgatgtattttcctactcatagccaaccaataaattcagtatctgtttcaaatattttagaagtgtagtttgtatagctgtagtactgaggtttgaggaaaaataaatgttgatcagcagaccacgtatttaaa

SEQ ID NO: 2758 - protein, 555 aa, Homo sapiens
MPKEKYEPPDPRRMYTIMSSEEAANGKKSHWAELEISGKVRSLSASLWSLTHLTALHLSDNSLSRIPSDIAKLHNLVYLDLSSNKIRSLPAELGNMVSLRELHLNNNLLRVLPFELGKLFQLQTLGLKGNPLTQDILNLYQEPDGTRRLLNYLLDNLSGTAKRITTEQPPPRSWIMLQEPDRWTALFSVMCYNVLCDKYATRQLYGYCPSWALNWDYRKKAIIQEILSCNADIVSLQEVETEQYYSFFLVELKERGYNGFFSPKSRARTMSEQERKHVDGCAIFFKTEKFTLVQKHTVEFNQLAMANSEGSEAMLNRVMTKDNIGVAVLLELRKESIEMPSGKPHLGTEKQLILVANAHMHWDPEYSDVKLVQTMMFLSEVKNIIDKASRNLKSSVLGEFGTIPLVLCADLNSLPDSGVVEYLSTGGVETNHKDFKELRYNESLTNFSCHGKNGTTNGRITHGFKLQSAYESGLMPYTNYTFDFKGIIDYIFYSKPQLNTLGILGPLDHHWLVENNISGCPHPLIPSDHFSLFAQLELLLPFLPQVNGIHLPGRR

SEQ ID NO: 2759 - DNA, 5753 bp, Homo sapiens
gcctcagcagcgggggtccgagaggccctcggaatccaccatggcatgggccggagtcgctggggtccgagaggccctcggaatccaccatggcatgggccggagtccctggggtccgagaggccctcggaatccaccatggcatgggccggagtccctggggtccgagaggccctcggaatccaccatggcatgggccggagtccctggggtccgagaggccctcggaatccaccatggcatgggccggagtccctggggtccgagaggccctcggaatccaccatggcatgggccggagtcgctggggtccgagaggccctcggaatccaccatggcatgggccggagtccctggggtccgagaggccctcggaatccaccatggcatgggccggagtccctggggtccgagaggcccttggaatccaccatggcatgggccggagtccctggcgacgcagaagatgtgctcactgattcgtggggaaaagtaagaagcttaagcgcatctttgtggtcactaactcacctgacagctttgcatttgagtgacaattccctgtcccgaattccttcagacattgccaagcttcacaatctggtgtatttggacctgtcatctaataaaattcgtagcttacccgcagaactcggaaacatggtatcactcaggatatattgaacctttatcaggaaccagatggaacaagacggctgctgaactatttgcttgataatttgtcaggtactgcaaaaagaattacaacagaacaaccacctccaaggtcttggattatgttacaagaaccagataggacaaggccaactgccttgttttctgtcatgtgctataatgttctttgtgataaatatgcgacccggcagttatacggctactgtccatcatgggcgctaaactgggactacaggaaaaaggccattattcaagaaatcttgagctgcaatgctgatatcgtaagtcttcaggaggttgaaacggaacagtattacagtttttttctggtagagctgaaagaacgtggctataatggattcttcagtcctaagtctagagctaggacaatgtcagaacaagaaaggaaacatgttgatggctgtgcaatattcttcaagacagaaaaatttactttggttcagaaacacactgttgaatttaatcagctagccatggcaaattctgaggggtctgaagctatgctgaacagagtcatgacaaaagataacattggggttgcagtactgctagaacttcggaaggaatcgattgaaatgccgtctggaaagccacatcttggaacagaaaaacaacttattcttgtggctaacgcccacatgcattgggaccctgaatactctgatgtgaagttggtacaaactatgatgttcctctcagaagtgaagaacattattgataaagcctctcgcaacctcaaatccagtgttttgggagaatttggaactattccacttgtgttatgtgcagatcttaattctttgccagactctggtgttgtagaatatttgagcacaggtggagtagaaacaaatcacaaagactttaaggagttgaggtataatgaaagtctcacaaacttcagctgtcatgggaagaatggaaccaccaatggaaggatcactcatggtttcaagttacagagtgcctatgagagtggcctgatgccttacacgaattacacatttgatttcaagggtataatagactacattttctattctaaacctcagctgaacaccttaggcatcctgggccctctggaccaccactggctggttgagaataacatcagtggctgcccgcaccccctcatcccctctgaccacttctcactttttgcacaactggagctcttactgcctttcctgccccaagtcaacggcatccaccttcctggcaggaggtagtcaagcaccttcagaggacagccttgattcacttgtaaacttgtgaaaatctgaacataggggagtgaggtatggccactgaggatttttgcttgcttaagaatgatttggactttcaatctgattatttgataaggatatagtatgaaagccaggtgctagcaacagacaaattctgagcccaatatgctttatactgctagacagggattggtgtgtttgcacctgtctttcatttgtcataagagattttcctatttcttctacccaatagaatattttcatgcctggaaataggaaaatgtgtgaacagcgtattctcttcacacagaaatctgtagcactgcttttttgaggccagtagcaacatccagagatcattcttccatactttactccctcctttttcagacttgtttgtaaagtacagaatctgaatttagcctttatgattgtatatgatccacagaagacctgatttatgaaattttgtactaaaatcatttggaaatgattgtattgtaaactgaggctaaatttttttttaaacctgtttcatgtgttataaaggccagcttgtaaaagaagctgcaacagactttctctgctcatgatttgcactcttagggttttgttagcccttttgtactactttctttttaaattgagaacatggttctttacatataaatctgcttcaaccttaggatgttttcagaccagaggcaacttattcatgaatttttatgaaaactatctactaggacagataagctgaacagtgatgatctgtagacatttatggactgaatgtaatggttgatatatgtacattctgatatttttaaatctttaactttttaaagttaaaaacctacagctgcttaggtccagcttcttaactctttttgagacacttcctgtcctatctccactgtgcctgcctaaatttgttctcaccaagcactgcctgtgcatgcagagaaaatctgtgcatcctcttttatatttttaaaatactgtttaacatttgtgagaattttatgaaaatgcttttgtatgagctgtggctttttcccattgtgaagcattgaatatcacattttggaacatgttatagggtgagtccctggatctttgctcaccagatccaagcactgcttctcggtgtcattgcagtgtgctgcttgtcacccagaatactactatcatgtgaattctttttgtcgtcagtgtcttttccttagtctttttgttgttgttgttgttgttgttttaatcattccttttttaagaagaagtaattttccatttatgaagcagtatgaattagatgtattttcaaaacaggtccctaagacaattcttcagatcatttttaaaatgactaagtcattttagtatgtcaagcaagataaaaattacatcataccgtctattttgcccatagtgccatttagagatgaaaaccagctttaactttgcaaagtgaacatgtacatggtctgctctcatttattcattcttctctcaaaagtcaaatgaatgcagagggagcttggtcaaactgcttttgtttcaactgcaggcaggggagcaaaaggacgccatgtgagcattaggaaaaaaaatactcactcttactaacaatttttatacagaaaatgagtcattttggaaatgattcttatgttttttttttttctccttttagaaaattctccaaaaggttttgatgttgaatcttggtcttggacctgttttttcctttgagggttttttgttttttgttttttctaggatttcattgtgatgttttggttttgttttttgctttttgtttaagttgtgctgacaccaaacacatccagtttataatcagtatattggaaagctggtattgatgtagaaccagtgcataactttttatggggttttgttattggtttttttttgtaaagtgtgaataaaagtttccagtgaaggtgagctggagctggttggactaatgagactgaggaagcagcttttcctacgatctgcattatgtaatcacaggtccagagagctttatggaagcgggagaggaggagcacttactcatgttgtatttgttaatggaggatgtcatcttttcatagatgctggaactagagtgcacttgttagatgctaaaggtttgagctttacacaaaatgtcttcatctgtatttgttattgtctacaatatatttgaatttggggcagcatattaagatgtaatggcctgttatgtcttgaaaatacttgttttgcctcttccaggcatactgcattctgtggatcagtttgaacagcttctccaccttatttggacagtgataaattgaaccaagagtgtagatttacaagtgtaaccttcaaaagaggaagaactatttggggtctgtaggtaatgaacagtcacaccaaaatagactatgatgcttttgttaagaaaggtttcatgttttagatattttccgtgtcctaaataattttcaataatctataatccctaaaatgcaataaaaactagtatgttttcacggtgtatattttttttcaaaaattctgtaacaaatatatttaatgtgttgccataatgtcatttcagtatttttgctggataaatccattttagaaatgtcttacaaaaagtttagggcatgttttctgttttaaagaccagaagtttgaaggcacccaaatccttgtcgccaatctcctgaagtacagctttaccatattagtggtcattatttatgctttgagagtttcaatattgttcgtcaagttaacttatggcataatttaagctaaagttgtagaaatgaattgttgagtgcaactttcatagtcccaaagataggcagagaacatctccagaaatgtgtgtgtgtgtgtgtgtgtgtgtgtgtgtgtgtgtgtgtttaatatgatttagtgacaaccaggaaaacttacttgggattattagcactttcaaacttagggacattattaaattggatggaatgcacttctaaatgtttaaattaaaatttcaaagctctttcgagattcaggttctcaataataatattcaagttttagagtttcactttgtactatttaaatttatggaactagtttccatactgacttgtaaggttttggggtcatatataaggactaaagccaagctaggcaaaacaatgacagcaccgttttttcagtgaagctctcagaatgtccagtacagatgttgcagataattccaagaactccttcagcaggtgttcttcaccattcgtaaacagtattttaagatgttcactttgctcttctttttggttacatacattttaataactggtatgttgaagtagtgtctaaaagtatctagtctttattcacagtacattatattgtgtgatgcactggactaactcttgtttaccattcatgtaacaaaacccagcacattatctgcactataagctcaaagaatgtcacatccgcccagacagctctttgatgagggtgatgggaactgaataaaccatacggactggcagtaacaagggcttttactgttctgttcagtggaaccttcttggtcaaattgtaattagctagcattatatttatatacagggtcttttttctttaccgatgtattttcctactcatagccaaccaataaattcagtatctgtttcaaatattttagaagtgtagtttgtatagctgtagtactgaggtttgaggaaaaataaatgttgatcagcagaccacgtatttaaa

SEQ ID NO: 2760 - protein, 380 aa, Homo sapiens
MLQEPDRWTALFSVMCYNVLCDKYATRQLYGYCPSWALNWDYRKKAIIQEILSCNADIVSLQEVETEQYYSFFLVELKERGYNGFFSPKSRARTMSEQERKHVDGCAIFFKTEKFTLVQKHTVEFNQLAMANSEGSEAMLNRVMTKDNIGVAVLLELRKESIEMPSGKPHLGTEKQLILVANAHMHWDPEYSDVKLVQTMMFLSEVKNIIDKASRNLKSSVLGEFGTIPLVLCADLNSLPDSGVVEYLSTGGVETNHKDFKELRYNESLTNFSCHGKNGTTNGRITHGFKLQSAYESGLMPYTNYTFDFKGIIDYIFYSKPQLNTLGILGPLDHHWLVENNISGCPHPLIPSDHFSLFAQLELLLPFLPQVNGIHLPGRR

SEQ ID NO: 2761 - DNA, 58155 bp, Mus musculus
  misc_feature (1)...(58155): n = A, C, G or T/U
catgtctttaatcccagcacttgggaggcagaggcgggcagatttctgagttcgaggccaacctggtctacagaggagttccaggacagccagggttacacagagaaaccctgcctcaaaaaacaaacaaacaaacaaacaacctgaaagaacaaagtgactgttgaggatgtagattcctagacccccggccttgctttaaacctgcttattgaaacctgtgggcatcaggtaggactatgtctgtctgtctctttttctctgtatgtacagtagagatcaagcccaggctgttgaaatctgcacctgtcttgttgttgttgttgttgtttttgaggcagtcttattaacccttgaactttctatactagaggctaactgagcttctggtcctcttgacattctttcagccatgcctagcagcccttgctcctctttcttgatcccagtcaattttttaaatatatttttaattaggtattttcttcatttacatttcaaatgttattccaaaaatcccccatgctccctcccagtcaattttttgcttgcttctctctactgttgtcaaggtcaccaggcaccgccatgtttctgaaccttaaaatctttctatgttttgtttgtcaaggcagggtttctctgtgcagccctggctcttctggaacgctctgaatagaacagctgacctcacactcagagatctgcctgcctctgtgcccccaatgctggaattaaaggcgtgcgacaccatgcctggctgaaactccctacacaggtcaggctggcctcagccatgcagagtcactggagttaaaggcctgaaccactatgcccagtttcacaataaaacatcctgtgatccttcagcagtttggggctgcttcacacctttcttccagctctctggatgcttcttaaatggtttactttctagatttattttatttctgagtcagggtctcatgtagcccaggctgtcctcaaactctgtatgtagctgaagatgacccagaacttctgtttctccatctccacctcagcatcacagcgggtactcagcagcactctggtttattggaggccagggattgaatccagggctttgtgtgtgcccggcatgcagtctaccaactgaaccacaccctcagccccttctttctctctttcttaatgatacctttgttgcgggcttctcttccagatcttattcagtgcccaagggtatcacccgtatgccttcttctacacttctatgatgttctcagaaagccccacaactttaaatagcatccatcagccccactttgcccaagttgaagctgccatgtctagctgcctgtgagaggtctaaaggtggatgctcaacaggcacctcagacgtaacatgtccaaagagaagccccctcccctcctcaagccccctccttccatttcttcgttttaagtgatggcaactccatcttcccattggcttaagacgaaattctggtagctgtgccttatttaacacaaacattttacttgtatttatttatttgtatgtttgtgggcatgtgtgggtttgcatgggcctgcacgtgccgcagcttcacgtggaagttggaggacagcatgcaggagtttattctctctctccaccaagaatatttgggaaattaagcttgggcagtgaggattggctgtacccgctacaccatctcaccaggccttctaattttcttaacgcttctctttctttaacagaatcagcaaattctgttacaatacatacagaacccgcccaaaacacccatcctcacggcaactactcaggttcatggtagtagcatcctccatcctaaatgctcttcctgcttgggtcttgagtgtgcagtctgttctccatgtgacagcctagtgacctgtaaaatctagtgttggatcacggcactctccattcaccccacccccacccccatgtcactcagcaaaagccaaattctttacaaggtcccacagagccctacaaagtctcaccctttacagatggcacactctgccaagagcacatacctgctagcctcttaactttgtttgtgccatgtattcaagtactctgatacctatggattcctcttgagtgtaagatctttaatatttttgcaatgctgagagttgaatctagaaccttaggcagcctaggctgacctcaaatttgccaggatgaccttgaactcctggctctcctccaccagcccccccatccccccgtaggtggtaagagagttggtgtgagccaccatactgaagcccttgaagtaagttctatgaattacaaagaaatctaattttactgaaatgcaactctcaagatattttcaaaatgtgtaacacactaatatgtgtgctttattaaattacaagtgcagcataatttgaagtagtgatgtgtaatggcattctagggtattagtaacaactgtaatggttgtaaaatacctgtgattcctaccaggaaccatgtcacaggtgcacttaatatcgaagatttattgtccttatttataattgaagaacatgctgcattttactgatggaaatgaagatgtgaccgtttcgcccatcaaaagtcaaggcccctgaattctacccacagacttatggaggtgagtacccctaaactccaggttaagaagctttggttcataacgcaccctctacacacacacacacacacacacacacacacacacacacacacacactcacttggcatcttctcagatcatcagatttaaaactgtaccccttagatatgatgccgtcttctggcctctgcaggcactgcacatacacaaaacacagacatacatgcacacaagacatccataaacataaaataaaaataaatctaagtcgggtagtggtggcccatgcctttaatcccagcactcgggaggcagaggcaggcagatttctgagttcgaggccagcctggtctacagagtgagttccaggacagtcagggctacacagagaaaccctgtctcgaaaaaagagaaaaagaaaaaaaaatctaaaaaaaattaaaattgtaccttatactgttgtgatttgcaattgaacttttcactgtagcacttaattatcttcaaacacaccaacacatatctgtaatcccagcatttgggattgcagagaatttgagggtagcctgggttacacagtgagtttgaggctagtcttggctcacaattgattatttgtttacttgtctgtttgtttgtttattttcagggctggagagattgctcttgcaggggacaggagttttgttcctagaattcaggtcaagtagctgacagagcctataatttcagctctagagtttctcatgccctcttctggtctccacaggtaccttgcattcacacagatatccacacacaggcacacacatacacataactaaaactagaacacaattaaaatttttcttcctccctttctctctctctctctctctttttttttttttttttgctgagaggtggggcaggctattccgttcaacctgttatgtcttggttaagttgaattctctgtgtagcccaggctagcttttaactcttggcaatcctcctgtctcagcttcccaagttctgagattataggtgtgaaccatgatggctggctagacagatttcctatttgtttaattaagctatgtacataatgaattaaaatcagtctcactgttattttgttagcaggtccaacgttagccttggacagtaacacaaagctctacggaatccaaggactgaaggggatttgggttctaagccagtggcatttcctaaggactgtttaggggccctggtttggcccccagttagaaaactatgtcaaggactaaatagagctgctgttctcgcagagatcaatcataatgtgactaggtaatagcatgacttttctccggcgtgtagtaaaagcaaagggtaatgacaccagtgccaaggtcacctgcacttaggtgtcccctcaccactgcgggccttagaaactatcgagtttctaaggcttttctcaagaggctaatgggcttttgtgggaatgaagtggaccagcttgcacacggggcacagaaggaaacacatgcgcaggaggtattccttccctcatcatctctctaggtcattttacggttccttgacaagacatttttccattccagttcatgggctcccaatggccaaggcaaacagcttgtcctgtcctctcctgcacagacatcccaccccatcccccaggccaaagaccaaatctgtgggtcactttagactctgcctctgtgtattgtgtctctaccttcatgccggattcatggctgacagttatcgggaccttgaccactgtttctgaccagttcctttcctagtcctctttctgtccacactggagttcttgtatgtatcctcaagggaaaggctgagagacagcattgtcctcttgttcttgcctaacgtgggttcaatcataagcaacaacagcaaaaagaaaaggcaggggctagcgatggggctcggtagttaggaacacttgctgcactcccaaaggacctgagttcaggtctcaatcatacacattaggtggctcacaagcatctgtaaccccagctacagaaagcatcccatgcctctggcctgcctcacctgcctgcatccctatctgcccatgtgcagacacataattaaaaataggtgcacatacaactacacatcattaaaataattggggaagaaaagagtttataagaaagaagacatgagcaaagcactcacgtgagctgcactcttagcctggtcctgccttacttagagggaatgtaaatttacatattcacatacatgggtatgcgtgtgctcatgtggtctctgtaatcttctgctcaccaaggtgaaaacagatccagagagatgtattcactgatctgcctcacacagccttctgagcagaaaagccaggattagaagccattaacctctcggttgggcactcccagcctccaacacgtgttagcagacattgaccttggcctgggaaaatcttctcagtggacctctgagaaccagagttagggctaactgtgaggtgctgatgagccagcccttcctcttgccagacaggcctcttttagactttgtgaatgaaggccaaagaagagaagttctgctggtggcttccttgagttctcctgctgcagaaagctcttggttcctcatgtccctctttgttgcagagacaatctccctgtcagaggatctgagctgttttgagtttgttcattattagatttatttctcctataagcaaatgtgttcacaacattccgtcggggaatcttcttaattgtcacataaatgtcatcttatgtaaattgaatatttatctttgcatgcaagggggtttgggggtggaggggaaaggaaaaataaacaaacttcagtcttggaaagggaaagggatttgaaactcatccacctgccttcaaaaacaaaggtgagttgggggggaaatcattggattatcttggaaggggtagaatacattggcaagggtgagaagagatgccttagggatgctggagatgagagatgccttagggttgcagggccaggcttccccaaacctcagtccaaagctagccaacctccccagctggagcattcccaggaggcaaaaggttgccccccacgtgcctacccctccaggaggcctgcccttttccttcctagagagaaggtgagctccccaggcacagcgggttgggtgggtgtggcccgcagctcagggaaccgacccaaggctccgccactgccggctagccgcccgacagcccgcccgcctggcgagcgcaggctcttcttccagaaactgcgaggattggagagcactgtttgtgcaccacaaggtcaagtcgggaagtggagtcggaggaggaggggcgagaacgagagggtggggagaggggcgccccgcttctctgccaagtaccagccctgggaagttgcccctcggtttttaaccctttgcggctataagatgcacgaggcagaaggaagggggtaccccggggcaaactcctcctgaggctaggacatgttgccaccctgctagccacccacccatcacagtgcgcctcaccccccctccggaaatgcagggcagcaccaggcgccaggaggcacccgcgagggggagggggcaacaagcccaagaagggaccccctccccttaaggacagcccctctcttccggaggtcgcccacaatttcaactttccctgcctaggatgctagtttgcatttggtgtgggnnnnnnnnnnnnnnnnnnnncccagccccttgcgcgcccctcccctgcactcctgccagcactttctgctcacttctggcgctgcaaaaaacgccacgcgatttattcgatttcgattttaaaaccagtgattccgaaaccgggcggagggcgagggtcttccagcaccagagtccctgggggtggggcgggcgagctgggtactccgtgcaagcctcgtttcctccgcgagtgtcgcctccaagctgttatttgcaaagaaacgtctttttgacgcagggagaaatggcaaattttaagtacgtcattaatatggcgccaaaagatttttttaagtataagcttgcttttttttttttttaaaggttgtggggggctccgcctgggtctggggcgcgaagggggcggggtgtgagcagaaagtgtgagtgagcgagtggaggggcggggtatgtgtgtgagtgtgtgaagtgtgagccgacctgatgggacttgcacgggctcagccggcgctcgggcccggccctggggacagggcgggttgggggcgccccggagtccacgaggagtccgggcccgcgtgcaggcgggcgggtgaccgtgtagggcacccccccgggggggccgcaacgctacctgggactgtcgccggagccaaacaactgggaaggggggggggaacacgacaggggggtgccgggagcggagatccgagtgaattagaaaaaagtggnnnnnnnnnnnnnnnnnnnnnnnnnnnnnnnnnnnnnnnnnnnnnnnnnnnnnnnnnnnnnnnnnnnnnnnnnnnnnnnnnnnnnnnnnnnnnnnnnnnnnnnnnnnnnnnnnnnnnnnnnnnnnnnnnnnnnnnnnnnnnnnnnnnnnnnnnnnnnnnnnnnnnnnnnnnnnnnnnnnnnnnnnnnnnnnnnnnnnnnnnnnnnnnnnnnnnnnnnnnnnnnnnnnnnnnnnnnnnnnnnnnnnnnnnnnnnnnnnnnnnnnnnnnnnnnnnnnnnnnnnnnnnnnnnnnnnnnnnnnnnnnnnnnnnnnnnnnnnnnnnnnnnnnnnnnnnnnnnnnnnnnnnnnnnnnnnnnnnnnnnnnnnnnnnnnnnnnnnnnnnnnnnnnnnnnnnnnnnnnnnnnnnnnnnnnnnnnnnnnnnnnnnnnnnnnnnnnnnnnnnnnnnnnnnnnnnnnnnnnnnnnnnnnnnnnnnnnnnnnnnnnnnnnnnnnnnnnnnnnnnnnnnnnnnnnnnnnnnnnnnnnnnnnnnnnnnnnnnnnnnnnnnnnnnnnnnnnnnnnnnnnnnnnnnnnnnnnnnnnnnnnnnnnnnnnnnnnnnnnnnnnnnnnnnnnnnnnnnnnnnnnnnnnnnnnnnnnnnnnnnnnnnnnnnnnnnnnnnnnnnnnnnnnnnnnnnnnnnnnnnnnnnnnnnnnnnnnnnnnnnnnnnnnnnnnnnnnnnnnnnnnnnnnnnnnnnnnnnnnnnnnnnnnnnnnnnnnnnnnnnnnnnnnnnnnnnnnnnnnnnnnnnnnnnnnnnnnnnnnnnnnnnnnnnnnnnnnnnnnnnnnnnnnnnnnnnnnnnnnnnnnnnnnnnnnccttctgtctcccgagtttcattttgttgatacgcagcacgtccgggtgccgaaccgggctgagccgatgcacatgaccccgcactgggctcacgtgcagccggtccagtcctagacaccttccgggggccaccgcctccgccctgcgccccctttccaggctgggtgcacgagggagctgcacgcgggggcagcatgctcggttcttgggttcagaggcattgcacaaattagttttttttttttttcttcttaaggggcgggggacaacgttcccaggtgagtgctgggtgcgcagtccaggcagccagggtgcatactggggtagtggacagcagctctccggtgctgcgcgggagtccggtgggggagaggcaccgcgagagtggaaatgtaccggcgacggccggagcggcgggtgcgcgctcgcggggcgacggcagggggcgtggcccttgtttaccttctcccaactctgctggttcgcgtcccgcttcagggacgactctgcagctcccccctcttccctccgcccttactaaaactctgggtggtacctaagagcagcagacaagtggagggccctgcctgggacacacgcacctgaccccaaaatgagtgacattgcagcccccgcccccaccaaacattgctgcagtccttctgccggatccccggccccgccccgcccccggcagtggcatcttcccggctcacctccttcctccctctccctccctccttcccacccacttgcctgcgcctgcggagcggctctcgctcgcccactccccgcctgggtgcagacttgtggctccccatggtcccttcccgcccatccctgggctctgagacatccccttctccgagcaaggggtgatcctgggtcagcttggagactcgtagcttttctgccggagggtgaggacatctgcaaaaccggcttggaggctttcctctaccttccagagaggcccagccagctcagcccggtccctcttctgcacacctctgccccgctcagtacccccgcccccaccccgggctcannnnnnnnnnnnnnnnnnnnnnnnnnnnnnnnnnnnnnnnnnnnnnnnnnnnnnnnnnnnnnnnnnnnnnnnnnnnnnnnnnnnnnnnnnnnnnnnnnnnnnnnnnnnnnnnnnnnnnnnnnnnnnnnnnnnnnnnnnnnnnnnnnnnnnnnnnnnnnnnnnnnnnnnnnnnnnnnnnnnnnnnnnnnnnnnnnnnnnnnnnnnnnnnnnnnnnnnnnnnnnnnnnnnnnnnnnnnnnnnnnnnnnnnnnnnnnnnnnnnnnnnnnnnnnnnnnnnnnnnnnnnnnnnnnnnnnnnnnnnnnnnnnnnnnnnnnnnnnnnnnnnnnnnnnnnnnnnnnnnnnnnnnnnnnnnnnnnnnnnnnnnnnnnnnnnnnnnnnnnnnnnnnnnnnnnnnnnnnnnnnnnnnnnnnnnnnnnnnnnnnnnnnnnnnnnnnnnnnnnnnnnnnnnnnnnnnnnnnnnnnnnnnnnnnnnnnnnnnnnnnnnnnnnnnnnnnnnnnnnnnnnnnnnnnnnnnnnnnnnnnnnnnnnnnnnnnnnnnngtgtctttatgcccgagggtacattgcactggttatcccgggtctctgcagatttccaaacttcacccttgcccctagcacccccccccccacctcatctgcaggattccgaggtacaaagttttacccagaggcagtttgcaagaggtcaatgggagggattatggttgttctcagagatgtggcttagggaggggcggggccccccatttagaaatgaagagttctgagcccggaagaaggttaggatgctcccttaacatttatatttgcaaacagaccggagcttgggagctgggttctcctcccagagtggcactgtctctcctgtcactggtaaaattcccagtaggacatttggcagaagatcctggcagaggtttgccaaccgagcctggccctgtttcctgggttcccagggtgctgacttctttttcccctcgcctgatttctttttcccccccttagggccccaggcgaacacaccagccctccaggccctccggtcccatcttccttgggcgggttaggactcgcagagcaatctactaagcaggcaaggaaaataagagaatgaactgtaaaggggggaaggaatgagtaataaaactgacctagtcaagaataagcttttatgtttaggctatgttatttgctttttaggtcgcaggctgcaaaagcaggctttgatccgaagtgggcgaataatttattgagaaagtttgcatggtgtgtgtgtgggggggggggtcgtgtttgatctgaagccctctcctcggttgttccaagagctgttggctgctattttgagtgggaaagcatttggttccacagtaaatgccttttagaggggagtcctcaccctacgcagcaggacttaacagtgaatgttggctttgaaactgtttggccaagggtctccccaacactcttggagatgaagtgtttaaggacagagttgtttgggctctggatacagcaaatgtttccagagtgctttcccatccagcgtgcttttcccctaaattgcctgggtaaatggccggtgactcctatccaagaggctgtcaaagatctaagctgctaggttctcattggtactctgtatgtgggggtccccgggtccctattgtactttattatctcagtgtaagccttagacactgactcccctaggtttggggctgcaggcaggatattcccgttatttataaccagtgtttctattagacttagaaggtggttggttgcctcagtgcccccgccaaatgcttcactgtatatgtacagcaggctgtctgcaggtctctcggatgggtgtttgggttgcatgagaggttgccagaatagagttgggggtgggggtaactttgacgtgtcatgtcccccatgcagtgggacacttagacacttaaatggcaggtcttagctcaaagcttcggcacctcctggaagttggttctggagctttaggcagccctctaagcttccgctcagaaatctcattggaatttagaaaacttcatctgtgccgtaagccttcctgcagtcttgagccctttgaccgtggagtcagccagcctaggtttgaatgtagtttccagctgtgttaaaggcaccagaggtcttagtttacttatcagccagtgggattgataataatccctatctgtaggtgagcgtaggaagtaatagattgtattaaaagactaaacctgggtctaaggatatagctggtcaagcccttgtctaacaattccaagccctgggttctagcaatataatgaatggaaagagaaggaaaaaagaagaagaagaagcagcagcagcctaaagtgagtggtagcacacggcacagtgttaccannnnnnnnnnnnnnnnnnnnnnnnnnnnnnnnnnnnnnnnnnnnnnnnnnnnnnnnnnnnnnnnnnnnnnnnnnnnnnnnnnnnnnnnnnnnnnnnnnnnnnnnnnnttaggaatggtccactgaaatgtgccctgtggggagaagagtaaggttgaggaagtattgaaaggtaaattaggtagaacctgtcacactcggctctccttggttgggtggtagaactggcctgcatgattgacacctgtaggcactggaaactggggcctgggtgggacaatgaaggtaggcagtggagtggcaggagagagatcccagcgcctctcaggcttggagaagtagagttgacagtcacagacagcagccctcttgccctgtgtgcacagaatcattttttgtatccgcagttattgtccctgagaaggcattaaagctaatgagagatgggaaagagtggggctctgacccctgtttgaaacagtttaagagtgtgcaagctcttgttttctgaaagtctggccttccctgcacaaggaggctctgaggacaggttttccagccgaaatatcattaaattgtattagcatcttattacacacacgccttcgcagtccgcctcagacagggagtttttgtttctctctgagagattgtgtctggaatggtaaattgcctgcttgaaggccccctccccttcttcttcttcttcttctttttttttttaaagaaggatggagtcctggtgtgtgtgtggggggggggggcaggtctggtggcccctggagaggagagactggaggccaggttggggtgttttaactgccccagggagtggctgcagtagctggcctgaaagacccactgttcccagggtcagctgggagggcgttaatggaggcccagggtgtttatttgaatttatttgcagagacatctttaaaagagactggcattgggcagtagtgttccagggccagaactttagtggggggcgggagggggggtggctaaggccagtggcctgtgctgccaagaaaacatctgccaccaaattgctgccctattactgagttgacattggtcattagccaggagcccaaccacataaagctgcctggaaaatgtgtagggtcaagactgggaaggaggactgtgcaaacaggagggaatcttgggctagggtgtcagtttctgccagtagcaggccagccagctgggctgtgtggtcctgacactccatgagggaggaacccgtagtgtgttcagtactccccactatactgggtgcagtgtgagagttcctggccttcacacaaggatctagccagacatgctctttactctttcccaacagggacagttggcaagtagctcaacacgccgacgtgcgtgcgctctgtaaacggggatgggacagctcatttctctaaatagggtaatggtcaaaaacccacacaggcagctggcacaacttgtgcccaggtctgtggaagcaggaaaaacctttagcttggaagaggaaacagaaagaggccagaggctgtagctcgttggtgagttcttgccttatatgtaagaggtcctaggttcagtccccactgttgcaagagcgatgccactgtccctcaatgtagtgagggaggggatcgtcactgaactttacgtaggcagggtccagatcggtttaggaaggaatatgtagagatacggagatccagccttgggtcagctggaagcctgtgaaagagtttacagggttgggagtgaggcaggatttaagcttggaagttctctttgggtgctgtgtggagtttggattctgtgaaggaggtagtgaaaggaaggaaatgaacttagatggacccaggtgagaggtgaggtgggcttgaaccagtcggatgagtgtagagttgggaaaagtgggtgtgttcggaacttgcagaggagacatagaacccatgggccactgttccattcagggcacgctggttacccatcgtccaaaggagagcttccctgtgtgtttccatactggggtggtatcgcaaatgcagtggagccagaagaatggcaagaaaagacgtttcttgcttagactctctctcctttacagatggattacaggaccgattcttgtccctcagaagcgagtgtcatgtgtcacagaagtcatctgccggagcagaaacttgacttgggagagctggggggggggggggggattagagtaggaaaacccgaagccaggcagactaagcagctccatcacacacacctgtttgctgtctacccttctctcgccagtgggccacacacaaggctcattgatgggcctgcgtgtaggactaccagctgacaggttacctgttggtttttgggcaaggactcagcagtgtaagaagggtgtgggcagctatagtcactgcctgtgctttccaaggggccggcctctgtagggttatccgttctggcccaaggctgccgtgcatttactagctagcatcaaggctgccgtgcatttcctagctagcgtccgtgagctgcttcagtcttcacactcatttactcattcactctcgccagctgattcccgccaacaaatgtgtttagtttggccctttcagggtgttcttcaaattctgactcagttgccagcactttaaattctggagatgtatggggaagtcagatccagtttacctcctggggaaaagtaactcttggccaacacctctggccttgtgagtgttgggggctaagatttgacccccagcactcctaaatccatggctcctgctcctcctcgatggaggtcccacccaggggcttgtgcatgccgagcacttggctggctactgctgagctctacctttagcccccagccagctcttagtgttgcaggagatcctggtttggaggtactgttgctctcgttgttgaaacagggaattgtgggagacattggattggcgaacttacagccacacagtgacagagctaggttgggccaggtgtgggctacggccagagttcttttcaaagtcggcctatctcagatcctggatgccacagagggtgatggttttggttctgggcttcctctctgctgcaaagaggtcatgaagtctgatggtcagggattgggtcttttaagtctgttgttataaaactctgtcacctagcccctgaggctccttttcctcatgtcatagactcttaagttagagagacaattggcatagctaccgggggannnnnnnnnnnnnnnnnnnnnnnncccccccccccacgcaccttcataagaggtgaggttcctacttcttgggttgcttgcactgccaagtttctctcagttctttgccctttaggaaacactaggcagcaagcaagcagcctcattaagctcctcccattctagtgggggggagaccgtgggtaaaaggctcctcactgaggtcgagggttaagcaggtccactcggaggtctggatgattgtccttcccacttagatatgtcagggtctctgtggcactgcgggaagatagaggcatctcctagcttgacaggaacaagctagaggtagaggtgtcgagaggcagatagatgggttgtactgtagcgccttctccctaagaactagaactgagtgggaacatggtggaaagcaccctgggccaggtatcaagccactccaggtgttctcctcctccaagcaggctctgccgttcaggctcctttcggacctgaggaagaagtgggtaggcacatccttccaggctgaagcggattctttatgcagaaggagttcagggtaacctcaggaatcagacctcaccctctgggagtcagcgttcatcttccatttgctggttggcagtggaaagagacaggcttcctctgtaagtggcctgagtcttacagctcatcaagctgctaggcactcaacaccgtggacaaggttgtgagagagctgcccttagtggcttaaaagttagatggcataggtgggattgtacagtagggttgtattttacctgaggatggacctgctgccccgtttccacaccccaatagccaccaagcacaggatcaggtctcaatgatggtttgtgccttactttgacagcaaaggtcctagaaggatctttcttacttcctcttctccctcttccctgtagggaacactcactcaggaagtatggggaactggggcttgaggggtcgtcgtcacctttcagtttgtgcctcctggcctccctgcagtcctctgacaccaatgggcagacttctgtttatctgagttccctggggcctcctttcccaagtgctggcactgtgggtgtgtagagaaaggatgaggctggaagagggtcagggcttgtccttcctctgcctgggagcgcaagctgaggattttccctgatgtctgggaagataatatcccttttcaacctttgttgcagatggaagagaagaggcgaaaatattccatcagcagcgacaactctgataccactgacggtgaggccttcctacttgactctatggggatggggacagtggttaagtaaaactgccaggcccaaagacctggtaagagggcgctgaccctccattcagctcagcccagggctacaagggtgaaaagtcaagttgggttcctctgcccctgaggtggtcagtccttgcccttatctgagcttcaccgtcccctttagtctacggccctatcctctaggtaggccttcctctccttggactagactaactcttctcgggacacatgctgctggtccttatacaagaaaataaatcctttagcttttagaagtctctacaaaacagaactgaaacctgttgccctttattgttatagttagttagttatcataataagtaacttcctaaccagtggtaaaccctaaccagaggattcttatctgctgtgttaccagctaaagtctggcacacagtaggtgttctataaaggttggctgaagaaattaacgaagaagcccagctgtaatggaagattggcagtagtatgttctaagaggtagatttagataaaggggtgggtgtgtcagttggatgtctagaagtggggaaaaggttccattgtcaaaattcgaatgtcattttgggagcagagaaaaaggtgtgtgtacaataagagcgttcttcctggttggtggcaaaaggtagccattgcccagtggcccaggaagccattcctcagcctgttggattaaagaattccatctttatgggcaggaaggggcatgcagccaggaagatcccatcttgaagtaactacttgggtggatccctctaagaaggaagccacactgctggggaggctgagcctggagccctgcatctctaggtcacatctgctgccctgtgtgtctggctcctcccttccatcccctttgctgcatgaagagatcacaatatctgtagagttttgtggacacccatctgccactcctaacctgcaaagtcatgggcatttgggccatggagaagaggcaggttggacccagacttgaagttgtcccctttccatcagctcccaccactgtccccatccgtgactgttaactcctgttctcataaaaaaccttggctctggggctggctatagtgggacacttaatcccagcacttgggaggctgaggcaggtggctctctgtgagggaggtcaaggcctggtacctatagcctggtacccatagcaagttccagaccagccagggctacgtaatgagactctgctcacaaccaaaacagaaaaaccctgggtcttcctcctgaggccattgccctatagtctagcaaaggccttggactgtacagtcatggctaactgaagaatccctttggaccatcctaaagctatagatatgttatcctttagttagcctttagaggacaggtcatcttctatcctgttaatcagcttcatattactgtcatgtaaggtaattaatttaacaaagggcaggtttactgagcccacagttttgggactttcagtgcctgagcaactggctctgacactctctgaggtttcaggttcttaaataagctgcaccacctcccagtagcattatcctgaggactaggtgggagggtggggggctgggggatgccagtgcttcccatcccccccccatgtccccctgtcttcctacctcaattaacctagtcagaacagtccctcagaggcttaggcacaggttaactgatttgtcacgggagtgtctagagacttaatcttctagattattcccatcaaattggtatttaacagtaactgtttcacacccacctcttccaggcttacagattatttattggtggtggccagtaatcaggcggctcacttgggtctagcctggtaggctccaggtctgttccgattcatactcccctaccctgcttctgtaactggaaagggcatccaggagtgccatgatacacctaacctggggcagactgcagaaagggcatgcacggaatgttctggcattccttgaccaagtaggaagcagagtctcaaagagaatagggacttctttggagccacagaaacagctggtaactgctgttgatttcttaagccagtggtgagtgaaggagccttcatatttccattggtctggaaagattggggcccagggaagggacagtgcctcccaccttctgatcctacaagcaggtgctcaccctaagacttcccatcccctatgtgattagatgctgtttctggctctccaggagccctcacggcctatcttctctctgcaggtcacgtgacatccacatcagcatcaagatgttccaaactgcccagcagcaccaagtcgggctggccccggcagaacgagaagaagccctcagaggtaggcagcagcggtggaaaggttcggggaagaatgtggttgggatggagaggcacctgtggggagtgagagaaagaaaaagctgagcagatgcatgaaggccacgtgttcttggcaaagggcctgtgcccagtgccagaggtggtcagtgtggcaggatgggacgaatggggacaccagtatatgcttctgacagtacggcacgtgtacctgcatgttaagcaggctaatgccttcacctcctgatctgcacgtagaggcgtttatggcttctgtggagggagtccttggtacatgacctcacagcaagacctggcttcttgtggccaatgaaaagttccatgcaggagctttatctcttcccgctttgcacttcactggcaatgtcactgggcagagatgaggcccttggtataaatgtggctgtgagaacttccaaggctgtgcatttccaacctggtccttacaacgtgtaactggtgtaaggactgtgcttacatggatgtggggtcaaggaccaagccacaccctattttctcctgttactttccactgagccatctagtttttacaagcccgtagatatgtatttgggctggacctccagtatactctttaagtggtctttcctagagctttatattttaaaaaattgacttcttgcctcccaagatgccttgtttgtgccttttccctttggggcaggggggttgggatagggaccctatgagagtggtttccattttccttccaagttacaataacttgttagtttgtgtgtgtacacagagggacacacgaatgcacgtgtgtgtgtgtcatggcatgtatgtggaagacggaacaaccaggaggagttgggtctttctgccacttaggtttcaagggtctaatttaggcccctaagcgcctttgcctgctggaccgtttcagtgccagccctgatagcttccaaacctggttcgagtggttgtggatgaagatagctctgagagtgttatggaggaaggagctggatgctggggctgaagagcgagagtagttgtgactcttacataccctcctcctttcttttttttttattagatattttctttatttacatttcaaatgttacgccctttcctagtttctcctctgagacccccccatcccctgtccctccccttgctccccaatctacccactcctgcttcctggccctggcattcccctacactggagcatggaaccttcacaggaccaagggcctctcctcccattgatgaccgactaggccatcctctgctgcatgtgcagctcctatcctcctccttagctgacctcttgggagggtagagtgtgccaaatacagtgtaggaagcaaaatacggataggatcttggaaggctctgcctcttcgcggatgaacaataattggtcacctttatttggccctcctggtccttggaggcaggaactgccatgctcatgtaagacttgaggaggtgacctctgacattccagcctttctccagctcccttaggcttctgcatattggcatgagatgggaaactccggagggagctatcctttcccctgccctgcctcctgtgctagtgggggatggggcaccttctccactggctgggaccaaccctgggtggaaacaggtgtcagcaaggctgaaaagaaagaacaatttgcatggggcagaaaattcccctgcctcttgggttttccagcccagaggctttgtacctaaaaatagacttgaacctctgtaaggcaccttctggggactggctgtgtatagcccgtgcccagaccaggaaccctgcaggtgtggctgtgatgtccacccaggaggactgaagagccttcctcgtcttgaatggcagccaagtctttcctcccgcagcaggctggagagcagccggggaggttttccctcatcccctgagtgagagggttgagccgtggccggtataaattcttgagttatggtggggcagagaagaaagcatcaatgaaagcttccaaatgatctggctcgtgagagggcggagagaaaagctagcgcttggctgcaagagtgtgtgcatactctgatgaatgaactggagcagagggccttgctatggagcctggcctaagaggcaaaggctccaggcatcctaacaaaggggattcttgggagccctgtctgcccagtgccctatgggataactgctggtcacactgtatgctctcactgaggcagactggtacagagacccccttctctggtggctgtgggtcactctgtttttattccttaagtgtgcccaggcatccagtagggaacttgaggccccaaggtacttagtattgcactagaagtgggcatattgtaaactgtaaaatagctgaggggtgggttttggggaaacagatacccttccttgcctatctaggggcttctgctcttcacactaacatgggccagggccaaagaacactgaccaagagtcaggaccctggacagggctgaagcaagctttcccttatggcttgttacccaggcccctccttgagccaatgggaaaggggagttctaggctgagttaagggtctgcctttaaacagtggaagggaaggtgggaacagaaccaaggtttcagccttcttttcttaggcattttgtggaactcccacaaagctggtctgtctcttggaccttaaattcaagaaggggggagggaccccagtctgagaaactggcactgtgtaaattctgccacagccttggagttgtcttgcccagaaacgttggcatcttaccactgcatccttagtggatcacggcttcatagaatctgaagtaagtggcagcctgagaccatctttgatagcccagcaccagccctctaccttggggcaacacttagtaggtaaggaccttcctcctggggaacaagctgagacctcagccttaatttctccaagtgaggttccaggcttcttgtcgtcagaaagcttcttaagtggcaggcggtagtggcctgcctacctgttctccctggatagtgtccagttatctccatgacacatactacccttgtaatggatgggtttcttctaagccagagtgctacttggggtgctaaggatggtcctgggagagacctggagtcctgccctgtggttggtaccccaggttatatatatcttcctcatgccttgaggctgcagggcgggtaagcagtggggatttcccctaagccacttgcctggaggtgagacgccaccatgcatcaggaagtcagtcagtgagcctctgctgctgagttagggcagcatgctctgaggctgcctgggaggcatggcgggaggtgggtgcgttaagaagtgtgtctactggggaagtccagcctgtgttgccttgtctctgaggagcttgggatacttaaccagtgactttctctctctctctctctctctctctctctctctctctgtctcaagatcaatgtctagagacctatacctagagcctgttatagagagagggctaatttttcctgatagccatggaacctgtgggagggtgtcttagttatcctactgctgtaaagagacactgtgaccaaggcaacttataaaaggaagcatctaattgggggcttgcttacagattcagagggataatctgtgaccatggtggcaagcctggtggctggctcgcagggaggcaggcagagttggagcagaagctgagagcttacatctgatgtgtaagcatgtggcaaaaagactgggcctggtgtgggcttttgaaacctccaagccaaccccccagtgacacacctcctcctccaaggccacacctcctaatcctgcctaaacagtttcaccaactagggattcaatatatgagcctagtattcaaatatatgagcctaggggtgcagggggcattttcattcaaaccatcacaaagaggaaagttccagagagagtgggatgggtggatgtcaagatacgttggccacttccggttgtctcagaacaagaaaggtgggagttgggatcccatgttcccatcttctgtagattctgctgacgaatgagtctctagaggagagaagaggacaacctttggacattctgcagagcccctttcctgaagcccagctccctgccctgggcaccggggctggccaagaaagtgaaaacgccctttgcagccagcaataggatgttcccagatgtgtcctaaaaagctgtgtgaggacacccctgtcccagcagtgcagcttcgtgttttaaaacaaaatgataacaacataaaaaacagtcagatctatcccaagagaacaatgataacggccagtttgttgggtcaaaaccagaaaatgatcccagaggcacagagatggcgcctagatgtttgggattagatagcctcagtgaaagccgtggtgagggctggggatgcagctcagctggtagatgctggcctcccatgcatgaggtcccgagtttgatccccagtcctgtttaaatgtcatggctggaaggttagaagttcaaacttgcagggctatcagaatggctcagggagaagtagctgccaagctatcctggccacctgagctgagtcttcacagtggaaggggagaatcaagcccaaaacactgtcctctggcttccacacaagtgctgtggcacacaacgcacagatgactgcatgagaaagtctgagtcctccttggccgtacacaagttccgagctaggctgggctacatgagaccctaaaatatgccaacactgggcaggagtgttctacagttaggagaatgattacagagtacaccctggaccctaggtttaatccccagcactgaatattctgggtctggtggtgcttgcctgtaattcctggattcaggaggtggaagcaggaagatcagatattcaaggtcatcctccactatgaagcaagttagaggccagcctgggctagagaccctgattccaaacaatcaatatagtgtctcgtgtgtcatcatcatacacagagcgctcacacacataaaccagagaacccccaaagaaatttcctgctcgtccgtccctattagatccagatttccagccatttgggtgggggtggggtgtatgctcttcctccggggccaggcacttgctctctgagactttacttgggtgggcggagccgaggggtgagtaagggccaaatccacttctagtagagtcagagatgcagctcttcccgccagctggagaagcctccaggcctctgggacttgtcttgcaaaggaaatgtatgtcataaattctctttaagagcaggaagtgcagttattcctcatgaaactcaagagaaggagatgtcgagtggtttttcaatttttttgagcacctgaccagttggctccgtggtagtttgaagctggagctgagtggacggtgactattccccaacgcctgtctgggattgcatatctaatatgtaatgtaaatttgctcttggctggaaaactgtatcaggttccagccctgaaaagattacttggaagttgaaatgaacgtctggctgtctcaggggtggtgaagacctgaagcaagtggtttatcaactcctgagccttctccacaactgggagagggggtccggtgtgagcctggacggcgtagggaaagaaagcgtctggcacaagagctgttacattacagaatgttacttctgacaaggcagggcactcaagaaacaactgtcatttaagataaggtttccagggctggagagatggcccagccctggctgcttctgccgagaacctgagttcgatttctagcactcaggttgagtggcttatagccatctgtaattccagttacaaggcactgaacacttttctagcttctatgggtgcttattcacaaagggcacgcacgcacacacacacacattctcattctctctctttctctctctctctctctctctctctctctctttctctctctctctctctctctctctctctctctctctctctctccctctctctctctctctccttggtatgaacagctagctatacttcagggaaatctcagggtggtctggtttcgtttttgtttattttactcactcattccacaagcttttctttgggagttactatacattgagatgttagagaatagatacaggacagacgggacatacaggacacatccttacgtgactgacatcaacgtgtgcgtgcctgtggtttggtttagtttattgagacggggtttcatgtagcccaggatggcctcaaactcactgtatagccgagggtagtcttgaacttaaggtgtttgtgcctctacctctcatgctgtggatacaggcatacactgctgcatccagtttctgtggtgctggggaccacgcccagggtttcctgcacactaagcaagcgctctattaactgagctccatccctcgcccctgtgtaactgtgtctgtgctgagtctttcataggtaaccagattccctcagccatccagccttcgagaaagggaagcagagaactgagtttccaggataacgtgtttcaggctgcagacccacgcttggtggtataggagtctctgtgcctcctggcctagtgtcagtgtactttgaaagttgcccagtgtcattgttagttttagggaggtcactttccaactccatagacacttgctcagagcctgttttcagctctttctgggcagcctgtggtcttgagaagaactgtgggtcaggaccatgttatgagctcccgagtaacgccctaacatgtaggaagagcagggtctttgttcccctgtagggtcatctttacacccctggcccttgggttggttggtgggctttcggcatcccttatacagttagagaaagctacagttaatatcactcagcagctctgcataacttggttgctaggcagcagacatttaaagacaaccaaaagaaagaaaactggtaaacattcctgccctgagaaaactgcttgttttccagcccctcgacttcccttgccacagtaagaattctgttcgttagtgtccattttattctatatttagttttcataaattattcagaggagtttttaagaaaatcattaggctttctccaagcctagcttctggtagttcaaacagaaaatatgtagattaggaaacaggccaccatgttggcagtcaggtgtcaccctgttcatgaagactactgagtacccagcagctgtagcctgcaattgaaaccgagctgttaatctgtggcaacatctggaggcagcacctagcatgtgcaccccagatgttgaccaatacctttggcccagccagacctcactgagatgctctggctgggaagatgcaccagaaagccaggagcatccagcagcaggggctctggcagtactggagacaaagcttaagacttcgtagaaccactgagggccaggctgagcaggggagggtgatgagggagatgtgcaaagggttaaaggtgttcgggtgactgcaatggcagctgcagccacgggacctgggaggttccattttcgtcctcacttgttgcagttaaaagcagacaaaagcaacttaaagaagaaagaatttggttgtagtgggcaagccatggccatagaagccttctgtggggtctcacacagcctcttactatgtaatttaggatgaccttgaactggttgtgtctgtctgtctgtctgtctttgtgtctgtatatatcagtcccatgcaagtcaccgaatacaggtggaggtcagaggataacttctgtaagtcacttctctcctttaactctgcttctagggtttgaaggcagaacatcaggcctgtttggaaagtgttttaccttcagagctgccattcttacccgaccttgaacttctaatctccctacctctacctcttgagtgcccagattataggtgtgcattctcactgtgcccaatttcagtggtgctgggaattgaacccaaacctgtggtcatactaagtacacacgatgcctactgagctacatccccagctgaaaaatcctgacgcacagctcttaagactatctctgccttctgagaggtagctgatacctctcaggagcaagtgctcctgtttgtgttttcctgagtcctgcctaaaagaggcactagtgtcccatcacctgttcaatcgtgatggggacaaaacttagaactgtcttatcacctagcctacactgctaaaggaccccaagttgagtcccaggtcctttcctgttctgaggacttgggagtctaagtcaggaatgcctctctgccactgagacctggtcattccaactgtgacacaagcttttcactggccaggagatatcaggccctgagaaatgggggctgcttagcactcagaagcctcatgcaggtccatgtggttgagtgtctccagctctggggtctctctggtttgatctcactctgtaagtgttcacagcacatgcaaggtccctgtcttaagtgccaggtgctgagaacacacctaacagctgagcaatgcatgacagaggggaccagaaacatctcacaagtaaagcagatgacgtcactgtgtatgagtgattagaagagggtaccctgcggtgccaaagctgatggttgaggtcactgaggaggtgacagttaaggcacattccagggtgaggaaaccgcagggtggttttattttttgagacaaggtctcttgctgttcttgctagccttgaaccttgtagaagaggatggtctagaactgatttctcttgcctccattcctgaatgctgagattacaagcatgtctcaccacatcccattttatgtggtgctagaaacaaagcccagagctttgttcaggtcgggcaagcatcttagctacatccctagcactttggttattgttgaattagtctccctgtgtagatctggctggtctggaactcactctgtagactaggcagtcttgaggcaatcctcctgcctctgcctccagagtactggaaccttggccattgatttatttctttctaaccacattgtctcctcagaggttgatttctagatgtggtgtcccagttcgctgagtccctggggcatcagagccgcagggtctgggatgtcccactgagaagttagagggagtcctacatcagctcagaccctggttgtactagcctgtttttaagcctggaaagaaataacccagtctctgcagcgccaagccacaccctctccagaagccccagtggggaaagcctttcacaggcctcaagccgctgccagaggcctcttgcctctcaggctgcctgagtttgcactcttgtctttagctgtcttgctgcttgctaataagatatgcaaattatcagggctgtgaaatcctagccccgttccatcttctgtttaattagcatttaatctaatctggttttaatttttttcacactggcaccctaattaaatgttagggtgttagtcttaacaattaaattatattggcaaatagagtcttcaagaaacttgacctttttttcaagtcagaaccctctgcaactagatacagatattaattagattctgtgagatgctgcttctgggtccattgatgaacccattttgctgtttgcctgtggttatggccctccattccgcaaggcacacacagccggtgagctggtcccggtaagcagtgggttacaactgagtgggtttatcaagggtttgtcaggagggtccagagggtcaagtgaactggccaagcccctgacttacacttcagcaatgggtgttgactttgcaaaagggctggggtgggaggtggggcttaggcctagagggttcttgcttgaagtggtttctcccttctcagtgatgtgtgtacgcgccctgaacttgtgcttttcaagtgatgaccactgggaaagatgggacttgaataagtttattctcaggtagagattcggaggagcacacacacacacacacacactgtagctgtcttcagacacaccagacagaagagggcatcagaccatgtggttgctgggaattgaactcaggacctctggaagagcaggcagtgctcttaaccactgagccatgtctccagtcctgggacagacttaaggacaaaggaagacaaaagtctttctctcctatcactatcaaccaagggttgctctaaggtgggatgcagtgtctttgagggaacttggaagcccagttcatggaaatttctcactgggctgccccaagtccccgcctcttgctttaccctttgtgtaagatccaggtcttccttctcggaagtagagtgccttgtattttatacgtagggttgtgcctctgggtacagatctgtagcacacttgtaaccctcctgaggagagtccccaggacactcagaaagcagtagcactgagttcaagggagacctttctactcttagaggttctgcttgtgtgtcaggctgtctggctatgggagccaagaggtcagattgggaccatggggctgggaaagataaggaggctgctttcttttggtgagggatctaccagtcctggctgtctttcttaacctgtctctatgctgtgatacagacaacaagttgccggaaatctttccttttaccgtgtgggtcccagatactgaactcaggtcatcgggcttggcggcaggagccattacctgcctagccattccactggccctactgtgtgctgccttatttacctgctcctctggcctacgaagccgtcctctctgaagcatcctgatatctcttttccctcatgtctgcaggttttccggacagacttgatcacagccatgaagatcccagattcataccagctcagcccggatgactactacatcctggcggacccgtggcgacaagaatgggagaaaggggtgcaggtacctgctggagcggaggccattccagagcctgtggtgaggtgagccaggtggccaggctaggaccatcaagggcaggggatgaacctgaggtagctttttggtgaggggtctaccagttctgagattcgttcctagcctgtctctattttgtggttaattctcttgccgaacaacaacagacattggtccagagacactggttacttacccatgaggctttgggtttgtactctgccctgaagccagatcgtgtggctccagatcgcctcattccttcaggaggatcttgaaccagaagtaaaatccttcttgtgtttctgaactaagggtgacacctgatttccttatgggtggagaaggtctggtcaatgattcttagaaaactcgggatgggacctgcatgtcgccgatgtgacagaaatggctaaggttagaatgttacccttgcacccgttggcagagcggatgagggaaatctccagttttgttttgggttttgggttttgtttttttgttttttttttttaaaccatcaattaccatgaaaataagccatgttgttctttaaagatatatttagaggacagagctggtgcccatcacccaatagagacttaagaagcacgcgccagtgtcagcctttgaggtgtctgtcctactagggccgggtcagaatagaatccccaagggcttcatagcctacaggtcttgtgagcagggactcttgtcagaatgtaaccatagacggtcttgcctcaaactacagaatgtagtcaagtgtttgattctgcaacctgaagggactggcagccctgtcccaccagctcacctgaattgatcagctcgtgttaattccccctcctggtgttggcagcctcatcactttggcttgggaccaaggagaccaagtagatgacacttggggcaaaggtcacggttatcccctcctttgacattggcaccattgcttgctagcagccacatgtatgaagagcctgctttgtgccagccctgtgctaggcttgcaggttaggaaggctcagtccaacttaggtactctgggacagatctgaggccctttgacaatcaggatgggtggatggacagatggacgatgaatagatggatgatggacagatggataatagacagatggatgatgacagatggatccccttctggggcctgtaacatgggtcaagatcctactgggttttgtgccctgaccttgtctctgaagcagcctgctcctctgtgaaacgccacgctattcataccagtggtcacctgacggtgtaggagtcagggttaagtgagaattctcaggccaagttgtcactatgtgcagcatgacaactgattgcagttgcccctcccctggtggcttgacttcattaagaccatgtatagggttctttatcggatgacgtggagaggaaccatgctgtctggccgcctgaggttccagcatccttcatccggttcagttgtttcgtagctatcttttttttttttttttttttttttaatgtgtcccaggctggttttgaacttggtgtgtatccaaggatgaccgtcacatcccgtttacgtggtgctgggatagaccgcagagctttttcctgtgctgggcaatcattctactaacagagtacatgcacagggtcctcatggctgggcgtggctggcatgaggtagacatgcagagcctccctgtactgagagcagacgtgctgagatgggcaaatgtgtcctttcagactttaaaactcagggggtcgtcacacccctgttttccagcttcccaccaatctgggtgcctccccactgcacagcctcctggaagcctttgtagcagctaccatgagggatactgagcgcctctcgccattcttcagggaccattcttgtagggtacacaatactgtccccactttatagatgaggaagtcaggaaattcaggggaatttcctatggggcctagtaggccgctgggccaggaaatgacagaccacaggaacaaaccctgggctgtccctgtgaggcctagggtaagagtattaggcatactctgactactcttcccccagacaccatgccagcccaactcctctgcctcaaatggcctttgggcacttgtgcttacctcatggtctaaaatctgcccctgaggatttgcactgtccctttagacttggtccatggcaaaagaaacctctggcgtctgtctacatctctgggatagcctctgctctcccctgtaggtcttgaaggagctttccttccacactgtccagctcattctgtctgctgtgtctgaggaagaggtgttggcttagggtcaggtcagttcgcgcctgggagaagtgctctttctggtgtgtgtccctcagctctggctccccaaagggacagccaggccacaccagtgaagcaagcaggtgtgactggtatttggcagtaggtggctgttcagacagggatgctcaaacgcttgactaagtgtatgtttagggcacacaaagctggattgtgacaaaattacaggctgtgcttttaagagacgctcatttgaagtgacagtttcttgggaaaggcagcatttggttgtactgagggctttggtgttggcttctgtttgagatagtttacttggcgtgggaggagggtcctgccatcattgttacctatgactcttctcatgtgggtggtggcactaacctttagcctttgaccccttctcattgtcctcatgacttccaagcctacagtcttttctctctgcttatacccctggctccctgtacccagcatccttcctgtcccctttctgacaccagggcatttcctgaagccaggggccctccctgaagctcagcccttgccctttgtgccatcttgaaccctccctcccctgctcaggctgagctgagtcacagcccttggcaagccctggctccgaccccaggaggcctcctgggcaagtgtggggcctctcaggcctggcagggctggccagatggaggccaggctccagacaataaccatggcaaccagtgggtatgggaaggcctggcattttgaactggcctcagaatctgacgggtagcacacagatgtgtggaggaccccacccacctgaggcaaagtgccccttattttccacttcggggggggtagaaaggtgattgacatctagcagtcttcacacacacacacacacacacacacacacacacacacacacacacacacacacagagtcagcctaccacctccaccaccaccacctgcctagcactttggctaagagctttctttgttaatccctgccatcctctcaccaaatgcctatggtagattatgttagtagtattcctggggactggagggaacagacattcaagggtggagctttggtgcctgcagcaggtttcctggtcccaagggaaaactgatctggcatgggatctgagacagtgttggagcttggaagtttggagaggcaagctgaagcagtaagaaacaccatgcctgtgtggttcatggggaggttcaaggtgtgtggccagcatgtctcagtgaccatgcacctctaatccagaaagcccgctccagggttctatagtagagtcccatggagctgaaacacctggggaaagcagccagacttcaactcaagacctgtaggctgttggtgaggaagggccagagattatgaagccatgcaatcaatctttggtcttagcctggaggggtattgccaaagggtctagaatccagctggctctgtctcacttgtccctgagtagctggcacagggcattaaccagaatggcacttgggacacctcctgcagaccaggcagggctggtccaggttgggaataatccccaactgggcaaagcagatgctactgtggtgaaccagggtcccatgtcattcccacatggtcctcactctgccttacagcccttaggacgtactgttcctgaagatccacagttaatagagtctgtaaggcagactggtaacaaggaaagaaatgggaatggaggtggatatgaggggatgggcgtggtcgggcatcagcatctcacacccatcttacccttgggcaaccagttcttcagctgggcagcccgaggaggacaagctaaggcctctctctttatcactaccattctgtttcccaggctcctcccaccactgaaaggcccccccacgcagatgtccccagatagccccacacttggtgagggtgcccatcctgactggccaggaggcagccgctacgacctggatgagatcgatgcgtactggttggaacttctcaactcggagctcaaggagatgggtaggtgacgctcttcaccaggcacctggttgcagatgtcagggaggatcttcctccgggcccctccagtatctatacccccggtggctgtgactggggcacatcccaacagccttaccgacaggtgtgggattccttgcctctgcctcccaagtatctacagctgtcaggtagaggtgaaaaataccgtgtaattcacgggactcgatgtcatgtgaataattcgtaagcatcgggctaatgggcatggatctctcagatgaagcctattgatatgtcccagaaaagaccagcttagccgttatctgtgtgtgcacatagttgatacccacacagtgcatgcaagcaggagattcctcatggatccagctgtatcccagacacaccctacatcgtatacacatgtgtgtgagtggtaatggcagactctagacaatgaggtggccctgatgggcaggaacctgtgggattgggtgggtctgttgtccctgatggagctgaagcccagatcaccattgtaaatggatggatggagccttccccttgacaccactgataacatttgccctgttggctgcaaagcttcctgagctgctgacggtgttccctgccatcctacccacagagaagcccgagctggatgagctaacgttagagcgtgttctagaggagctagagacattgtgccaccagaatatggcacaggccattgagacacaggaggggctgggcatcgagtacgacgaggacgttgtctgcgacgtgtgccgttcccctgaaggcgaggatggcaacgagatggtcttctgtgacaaatgcaatgtctgtgtgcaccaggtgggtgaactctgtcactctctcccatactgaaccctgctgaggctggttgtcctggatacaggaacatgggcacaatggaccagtatccctaaggagggctagaagcaggcctggcagtacctgggacatccatggcctgcttggctcagtcctgctggccagatcgaagcaagtgtccttcgggtagtctgtcttctctgtctctctcaggtccttccctcagagaaccaccccctcacatcctgacctaacaaaggaacagcagcatcaggtagtgatggagacccaagctgcccagttttaaaacgtggttctgctttttataacatatgaggcttagggcaaagttcttaacttctctgtgggccccgttttgttaactgtgaataaatgtgagcagtcagagcagagaagaaagactaagtgggtgggtgcttgcccaatattcaagagatcttgggttcaaaccccagcactacccccagtacccaaaagaaagtaaattgtttatgatggcttttgcgtagtgaaaaatagtagaaaaatagcctgtgagatgtcagcgggtaaaggcactttttttttaaaaaagcatagtcacgtcaattcaggacccatatcaagatggaaggagagaaccaactcacagagtggtcctcaagcctacacctgcatgccctgccatgctctatcccagcaagcttaggaaatacagacagcacgtctatgctagagtatttcttactgttgatattgtgatagagctagccagactcccttttcttttttgaggttatttttattttttgtaagggctgcgtgcgtgtatgagtggattcgtgcggaggccagaggccagttaatccctctggagctgacgttaaaggtgattgtgagctgatgtgggtgctgggggctgaactccgctcctctgaactcagcaagtgcttttagctgttgagccatctctccagcccacagttatcttttctttatttttaaaaaattatcttactaacttatgtgtatgggtgttttgcctcatgtatgtacatgtgtgtgtctgattcccagagaggagaggacattggatcacctggtattagaattatatagtggttgtgagccaccacatgggtgctaggaactgaatttgggtactctgcaagagcggcaaatgctcttaactgctgagccatctctctagcccgtagatcccctttctagatcttggggcctgaggctctaggtcttctgtatctttaggccttgtttccagaagtcctgacttggattgggggctccctttggcctccaactttgaggcacatgtatccactgtcgttgaactagaaagatcctgggaaactgagaagcagggacttgagctacctagcagctcctgggtccctgtgtctctcctacacccctgggatggtgagatggggcaccactgtttgcacaaagaattctgcataaaaagataaaagtctggacttttgacttgggaactttagaaccaagtttgtatccaatttaagaagcagttgaggggctggtgagatggctcagtgggtaagagcacctgactgttcttccgaaggtccagagttcaaatcccagcaaccacatggtggctcacaaccatctgtaacaagatctgaccccctcttctggagtgtctgaagacagctacagtgtacttacttacatataataaataaataaatctaaaaaaaaaagaagcagttgaggcttttcctaaagcctatgctggttagaaatgtttggctaactcaggtcttccagccaagagcagccccgacttccccaaaggataggattgtactccctcagggaatctctgtgccacccagtgtatagcctagggacagagattgccaccattggcaagtcactgagcagacacatccaatttgtcagtgcccctgacctataaccacccactctgttcccaggcatgctacgggatcctcaaggtgcctacgggcagctggctgtgccggacctgtgccctgggagtccagcctaagtgcctgctctgccccaagcgaggaggagccctgaagcccactagaagtgggaccaagtgggtacacgtcagctgtgccctgtggattcctgaggtgtgtagctttcagggagtaaaacatggtggagggagtgtgtcgagagctcaggttgggcctggcagaatttatgtgacagaatataggaaaagaaggagctcttgggttcccatgaagacttagaaagacagtgtcttagttagggttttaccatgaccaaggcaactcttacaaggacaacatttcattggggctgacttacaggctcagaggttcagttcattatcatcaaggcaggaacatggcagcatccaggcaggcatggcgcaggaggagctgagagttctacatcttcatctgaaggctgctagcggaataggaatactcccttccaggcagctaggaccatggtctacaaggccacacctactcctacagggccacacctactcctacagggccacactttctaatagtaccacttcctgggctaagcatatataaaccatcacaaaccggtctaggaacaactgggaacattgtctgtggaccttgtcataggtctggttcccaactctgaggcactgggaaattcaggagggacaatttgaggtctagaccttagtcatgcaaaggggttggggtggaggctcagattatggactccatcaaacaaagttttggttaaaatcagaatgaaaccagccttggtgatgtatgcctgtaaatccagcacttgagagatgggagtagaagatcaggagttcaaggccatcatcagcttgaatttgatgctagcctgggctatataactctgtcacaaaatcaagcaaagggcagatgatcccctagtttagaaggtaacagtagtaggacgttggctaatgggcctgctcctgtggctgcagaggtggcctgtggctggggtcatatggaagggccatggacagcaggctgggtccacagtagccatcttcactgaggctgtggtcagctcttctatattgaggtgcctgcccagtgctgtccgtgcctagaagcaacctaggagaccctgccagcatgtgactcttcccttcctagttctctgtcctcctagggcctaccttgccatttctggaatagtggttatttgtgtcagattttcatcttgaaggccctttctcctggttactgcagggagatcgacctattgaggactgtacgcttgggggccagcaaggcggctcagcaggttaaaggtgcttgctgctaagcttgacaatctgagttcgatccccaggacctacatagtggaaagggaggacttacccctgcaagttgtcctctcacctccacacctgcgctgtggcatacaagaactcacacgtgtacacatgcacctccttgcctcaaagtctacagttccaggtgcatgcttctcttagccagctacattcttctatatgcccactctggggcaggttccaagtgagcaggtacttgattagggcaggatcggggactcagaccatcagctctgcatgtgtggagacgaggaggacttgggacttgtgagttgaatgcacagctctgtctgctcactgtctggctatgactgacaggatcccacctggggactgaggcagctgtctgtattctccccaggtcagcattggctgtccagagaagatggagcccattaccaagatctcgcatattccggccagccgctgggccctgtcctgcagcctctgcaaggagtgcacaggtacctgcatccaggtatgtggcctgcttccttctgctggtaccagacagatgcactaaggtacctaaaataccagtagttaccaccatatagcccctgtggctgcatcactgatggacctgagaggcttaggacaaggttcgtgtgggagcttcacccactaggaaggtacattcatatgtccccaggcttccaaggaatggggacagaccccacccatggaatactaagaattggctttccccgtgagagcaagtgtctctgggcttaatgattcattgaccttttagactgtaaccctgacattcgagaggaatgaaatctgaactcctctccagctcggcaaatgggccttcctgaccaatacaggggcttactggtctacctgggatggcggctcccatcttgctgatcgtcgggatcacccgagccattcaaaccacacgaagcttttagcacccatggctctgattgagatgtgaagagagctgtgtgcttgcttttctcacacagcagggtttgccggtgcttctggtctcagctgtggggtggaagccctcctttgtccctcccatctccccaagaacacagttggccttgctagtatgcctccaccccgtttatccgacctccagaagggctctggatgctgtagcaatggaacctgatgttggggacactgttgatgaactgtttccagcggtccagtccacatctagggctgggaggaatggtcggtccagcctttagctgcttagataagagaaggcaggatccaactgctctcagagaatagcaccaggcagactcctggcttggatgacaatacagtagaggagactgtgaccctcttcaggctcccccacccaaaccccctctaatcccaaagtcatttgtccacggacaacacgcatcttgtccccacgaggggcgcgtcatctccttgtgattcttggctccttcagtatgtctgggatttgctctgtcacctttcccaggtgtcccatggctcctttaacactgtgtgatgtgggagcctgtgccattttatgtagtgtctccccagcattgtgtgtgctcctcggtgccttagatggcccttatgttgtcccctggctctcctttaatgcctgacgttgcccttcctctctctctctctctccagtgttccatgccttcctgcatcacagcattccacgttacgtgcgcctttgaccgaggcctggaaatgcggactatattagctgacaatgacgaggtcaagttcaagtcactttgccaggagcacagtgacgggggccctcggagtgagcctacttctgagcctgtggagcccagccaggccgttgaggatctggaaaaggtgaccttacgcaagcagcggctgcagcagctggaagaaaacttctatgagctagtggagccagctgaggtggctgaacggctagacctggctgaggcactggtggacttcatctaccagtactggaagttgaagcggagagctaatgccaaccagccgctgttgacgcccaagactgacgaggtggacaacctggcccaacaggaacaggatgtcctctatcgacgcctgaagcttttcacccacctgcggcaggacctggagagggtaagtagccctggtgggtcaggggccttacctcttactccatgtgccctgcccagtttgagcctttggtaggctccaaagactcagggggctaccacagacccctccaaggacaggtgccacccatctgaacatctagaaagaggtgggagagcctacctggaactctgtgaagtctcttgggagctttagacagaggaaatcctggtggccgggggtggggggggggagggttgttctggccaggcatgtttgtgctggccagaactgggagggcaggggtgggtggtgagtgagactcccatggcctgccaggcagagaacagggattgggagagactcccatggcctgccaggcagagaacagggattgggacagatgtcacacacttggcattgccccacagaggcattccaggcctggcctgggtgactgagccacacacacttccgtctttactctaggaggcaggacagaattgtggcttgtggtatatttggggctgagggagatggacatgtgtgtgttgggggaaggaggaggtttctagaagactgaagaagaaagctatcaaagatagcaataagacccagctccaggggtccagcctcagtccctctgggggctacatgttggtaactttgactaacaatgcaaaggaccaagtgctcttatgggggtggggcaggggttctctgcaaggccccatagtggcagtggcctggccagcaggcccagtctctaaccatggcccagggccaatagctgagagtagtccacctttgcctgggcaccaggccagcttggtcctgctcctgcattgaagggacagggcagggctggagttagaggccttgggtggtctggccctgtactgattctgggccctttcccctaatgggtgactttctgtttccttttccttgaactggaagtaaggatccaactgaccttggggtcagcgttagggggtcatacaaggacagtggcctccatctcttggagtcacacaaggatagtggcttccactgttagttgtgttgtttgaagctaccttctcacctggtagcccaggctggcctcacccattcctcccaagtactaggatgataaggatctgagcccgccccgccccttccttacttcagattggtatttttattactattggccccataagcagttcagctcatagaagagaggtgaagccttatattctgagagtgggctccacagagctgcaaggcctggtgctccagcacgggcatcttctctgatgggtcaggagcagaattgccaccagcagaaaatcaattttacggccaacccaaaagatacactctcctacaaatttcagccgcaggcctggaccttggcaggcagcgtggatgggcacggccaccacagcgtccagagttattcacggctgacagaaagattgcagtagtggacatcagcctgcagatgccagctcatgtcccctagcaaccgctgactattaggccctgcaggacatgattgtggttcttgctggaagagtttatttcagtgactgaatggaccttgtgtgagacccaagagggtggccggagctctcggtcatcggagatgagtatgtggtagcctcacccctgcgtccctccaaggatggagaggaaccatgggaaacagaccctttccttttctgatctcgctgtttgccttggggtccctggccaaaatccttaacagcacttggctggtgacacagtcactctgtccacccagtcagtcagcactccattctccaggtctttgtcttcattcagtcataatcaagcatgggcccaccccaacccgagatgacttcatcttagctacttttatcttctgagaccttatgtcccattctgaggttcccagcaggaaatcttgcggatttccacccatgtagaggccatcgaggccctggaaggtgtaagtttgccaggaagtggtctgatttgcatttcaagagcattgctgagggattgttttactgtccctgtgaaaggatgggggatggggaagggtggaaccaggctgtgaagagagctggtatctgccacaaggagagactggtgcaaatgtactgataggtcagttgtgggtgtggaccaagagaacaggtagtggggatgagtccagttttcagccataagtcttctacaactcccctttgcccggagggtgcacccccagggcctgcttacacccccccccacccctgctggttttgcctctcctttctttttccagtacactgtcaccacctcctgctgggctagggtgtcccggtttaggccatctgctccagggagttcttcctgccttgctgggtggcaggcaataggaagaaagagatgctggcccctatacaaatttattccagaatggaggaaggcacagagccaggctaaagtgcaggaggagaggggtgtgaagaagaggttgattggaaagtgggtcatggtaagaggtgcacaggctgctaccagtggttcaaacccagggctgtccctggaggaagaggctggacatgggaattgataaagctggagtcagcaatgagtgaaccctgacggcctggtgttgccagtgcaggtgaggagtacacacacacacacacacgcatggaatgtcacagcagagtacatgtcacacgggatgtcatggcagagtccatattgaatccctcctgtgatgctgtccgccgcactggacctcctaggatctccttctcaagtagtctcagaagggaaaggaaggtcacacctgataaagatctgctcatactacctcgagctaggaaggccggagtcataggaaggagaggcagaggttcaactcagaaatctgcctgcctctgcctgccaagtgctgggattaaaggcgtgcgccaccacacctggctggaaggagaagctcttaattaaaggtaactcaggcagctaagtaagacctgaagaccacctggcaactgtgtaaagggaggcctgagtgggaataggatccaggctgagcagctatggtcagtaactgtccctgtttctggaaaactccacatgagcccaaaggtgataccagatggagggagcgtctccagggctgaagcctggaagtatgtgagagagcagtccttaggggatagaggaaccctgaacaggcagtgacaggtccacttcatatcctgccagccaacctgaagaatgtgtgcccgtcctctgggctaagccagatgacttcaaagcctactgtagggactctaaccagctggcccaagggagtcaggggctgctgtcctttataaagtcaggcatcatgttgctgtggatatgggagcattggcccagggggcaaggccctggctcaggtcccgggatagcaggtagacttggaaaagctattttgccagattgtgttcatttgaaagtacagtgatacctgtgccttgggacatgcctgcgttttgccatgatggttgtatctgctgcagagttgctttgctgggaaaggcgggtgttaggcaggaagagagggttgccagctcgagaccagatactccctgcatgctcagggtttcggggtgaattctcaattgtcttaaggcagaggggaggcagcagcagtggctggtgttcaaaacactgctttttttcccagcggcgaggccccttgagatggccagcagtaggtgaggtgagaaatctctcctgtgtcccttcaggtaaggaacctgtgctacatggtgacaagacgggagagaacgaaacacaccatctgtaaacttcaggagcagatattccatctacagatgaaacttattgagcaagacctttgcagaggtaggcacggcgccccctgctgggaagatgtgtctatgcggcctggaagggcctgggaccagaacccttcagtcaggttccttctcacggacataacagatccacgtgggaaccagtgaaggccgtggttgtgctgataggcgagaaaacagagtttggactgtggctttcaagcctctaccctcaggggcatcactgggatagcccagttccatccacagtggcttagcttgcacaaggacaggtgcagaccacagtcttcctgactctgctgggctcaagacaggtcagagctggccagctcccctgaaccctggtaagcgtagggttcagtcttcaggaaggcagctgtgtggagatgtggctgtgtcgccctctctgtggtgtcatgtgatgaaactcaggctctgatcagatgtgtcttctatcctttaggtataacatgcatttagcagatcgagaaaccaggagcaaaggtgttgacattggcttaattggatagttatggagtctggacatgtgaagggaagataagcttaacacgcacccccccacacaggaacattatttacactcagacgttgaacatacacagcagaaggcagctaggtagagagagctttggagatatgcctgccgctaccgactcagcttgtgggtcattctgggacgtgagaagaggagggagtgctgctgcgagtcttcagagggaatggttgccccttttctgcccgtagctgagttgctccatttaccctttgggatcgccagcattcatcaaagccaagtgtggcagtacatacctgtagaggagggggtctggaggttcagggatttagtactggctgctcctccagtggctatggcttcaattgctggcacccatgtggtagctcacaactgtctatacctccagttccagggcatccagcgccctcttgtggcctctgaggaactgggaatgtagcttactttatagggcatgaagcctccctgggtttgatccccagcactggctaaaaccagatggtgcaaacacacatctaattctaacccttgggaggtagaggcaggaagatcaagaattccaggttatgcactgctacttagagagttcgagaccatcctggactatgtaagaaccactttcttacacatagttagtttacataggtgttgtctgcatatttgtacatgtgatacatgtgtccctggtgtctgcctatgaaggtcagatcccctgggactggagttacagatggtcacgtgccaccgtgcaggtgctgggagtcaaacccagcgtaatcaaaggggacaaaaagagagaagaaaatgactgttgctaatgacagaggtcagcgtaggtcacggccccatggaactgacagtcatgaagcctacccaagtccagaagagaggaaagtggggtcccaggctgtgcagtcaatcatggcacacggggtggaagcgatgaggggaactctactgtacttagagaccacacacaagtgtcagtgttcaaggaggctgagggcagcacggtaggaatagcaccttctgtcatggtctcctatacaccagagggtctgcaccctaacctagagtctgaggacccttcaagctccttgtgagtaggaaccattgttaagagcattgcattgccaatgcctaaagttgatgcacatggaggagagaggggcttaaggaggctgtagggtaaccagggtgagacatggagggctgtaaccaaggtgagacagacatgtaaggctgtaaccagggtgagacaaacatgtaaggctgtaaccagggtgacacatggacggtctaggggccttgtaatactaggtgtggggtctgagttacaggccgggagactgaggtctaattagaggctctggggactgagaagagctcagaacacagagctctgccttcttttgacattattcccagaagccttcctgcctccctgcccctgctgagcagccggggactcatcttttgcagaccaaagggcaaaggaccacatacagaacccgcacctcctgtcttgtgcttggctgcacaaacaggactggaggctgaggcaaggagcttggctgtggtgtcaggcccagagtctaagcctcttatgtccacatcacgattctctgccctatgtccagctccttaccctagcatttggtccatatagcatccagtcaccttttccactcagtagaactctccagggtctgtggggtttgtagtccagttcgtagtgcactttgaagtctaggtcccacaaggacttattatgccttcctctatccttcatagagctgtgggctgcccccgctgccccggtttctgccacactgactctgaccttggtaccactgttggtagacccagttgatagacgacccataggcagccactcaggtttaactctttctccaacacagagccttctgggaggaggtcaaagggcaagaagaatgattcaaaaaggaaaggccgagagggtcccaagggcagcagccctgagaagaaagagaaagtgaaggctgggcccgagtctgtgctggggcagctgggtaagtgaggggcccttgtgtcctggcagacgctgactttaccattttcaacttcacccagaagagggccaagcagcgtgaagcagagacggaccgcttaggcccttcctcttccagggctcacagtggctccgtctcacgcacaagagatcccaagacactctggctagatagagctctgccagctctggagctgcccttgccagggtgctggatgcccccagaggtccctggaaatcacctctatgctgagtgggcaggactacactgctcgcgaggtctttatccctgttccacccttcctgagtctccaccgctctttgtgccttgccccctcaacccagccacacaaacctgctgacctttcttgagccacccagagaccaagaaaagtgacatcaggttccctagtcactgccacaatttatctcagtaaaaccgggcccaaaactgaaggtcctggccaccctgggagctcgctctatcaggtgtttcctgcaggctgttggaggcactgcctgtaaagatgcagcgccccctgctggccggtctgctcttgccactgaaatgcttactgtttgaacaaggaactaactcaccacttcctcctttccactccacaatttaaaaagctggtcctggggtcagccaacctggtgagcaggggctggcctctgctacttggtggcactggtgggatgcgtggacagaacaggatggcttgcctgggtgggtcggttgtcttgagctcacacacctgtggcatctcacctgcctcctgtctcccattcatcaggtctatccacctcgttccccatcgacggcactttcttcaacagctggttggcacagtcggttcagatcacagcagaggacatggccatgagcgagtggtctttgaacagtgggcaccgggaggatcctgctccaggtctgctgtcagaggaattgctacaagatgaggagacgctgctcagcttcatgagggacccctcgctacgacctggtgaccctgccagaaaggcccgaggccgcactcgcctgcctgccaagaagaaaccatccccgctgcaggatgggcccagtgcacggaccactccagacaagcaacccaagaaggcctgggcccaggatggcaaggggacgcaaggaccacccatgaggaagccaccacggaggacgtcttctcatttgccgtccagccctgcagctggggactgtccagtcccagcaacactggaaagccctccaccactggcctccgagatactagacaagacagcccccatggcttccgacttaaatgtccaagtgcctggccctacagtgagccccaaacccttgggcaggctccggccaccccgagagatgaaggtcagtcggaaatctccgggtgctagatccgatgctgggacaggactaccgtctgctgtggccgagaggccaaaggtcagcctgcattttgacaccgaggctgacggctacttcttctgatgaggagatgagcgattctgaggtagaggcagaggacagtggggtacaacgagcttccagggaggcaggggcagaggaggtggttcgcatgggggtgctggcctcctaattcacccaggccctgccctggtccccctacaaggcctcagcccaatcacaactgccatttccaactgctgagtgtctcagacccaccactctgtcgtggttttatttttaatatagagagagttctgaattccaccccgttgtctttcctctgtgctggcctaggacattaggattcctcccgtggccccggccacgggggactataccaggttctatgtgccaccccggtcccagcccatgccacatcgctgggcttctggcttgatgtagacaaggtgagggagagagctcagggctcctgcccactgccattgggtgacacagactgtcgtttgggcattatttcatggcagatgggccatcccagggcctgccccgccttgtccccccaggttgcactggggtccattttgggtggggaggtgtcctgctgcactccgctgatccgtaaggaagtatataacaagtgatacccagccagtctattcactgtcacaagcacaacgagtctctatgagaaagcactgagggggcgcagggggcccactggctcctgagtagcccacaccatctgaggcccgccctcccgcccgcccgcaacccctcctcccttgctgctctgtccctgccagtgcccagcccaagcagctctgagaaagggttccctggatccttcctgagctgtgttctttactcaggggactccccaaacggtcctccccgtgtacaggtggagggctccaagggagggccagtgcccagcccgggacttggggctcagatcagcccactgcagagaatcactctggggctctaacttccttctttcttcctttggggccagtctcggccacagtcttgccgtctccattatggagctggccagaccagaccgtttgccttttgacgtttcctagtcctgctaagagatgagcttcctcttcggtttcctggtggaaacatccttccaacaagtgtagtgggatcccggggcccagggcaggccgaggctggcctgctgtggctggttgaatgttgctggatcttcctggattactctgtcccttagcgccttaacccctttccttccctactgtacgcccccccttcctactccttcccaaatccttcctcctccaagcccccaggtagtactgaagagttttgatggagtggccccagggtgatagatagctcagggaacaaaggaattccgtgaaaacatttttttttttcttttatgaattactcttgggtcacttctgccactgggaaagccagaacttctccaaccagaaccttgcaaaagtccagtgaaccagtcgaatcattctgagaatgccaaagaatcttttgaccataatacacagcacagcccggacctgacaactgtcgacttgaacttcctcttcaaaggaattggttagcaacaaagttcagagactcggttattgcacacacctacagagaaagggcccaaggcctcagaggaggccgccgctgctgctgctgctgttggtttacggtccctgggctgagccgctgtgagtgtggtcctaaactttgaggactccctcccccttttgagggggggagaaccctgactgtgaatccagcgtggttcccccattgccaccacttagatacacaaagagcaaaacacacgggaccttcacccacctcgactccaaaactatcaaggtacgacagtgagtttgagcaaaatcagaagcaaagattaatgacttcagtttggggattggacacacgtgtcttatccaaatggactccgagggcgtggggtgggctccaaggatcctgggcatccggatggcatcggctaccacatagacttagtctgcctgcccgtctcggtagtagtgacaactcagtcgacgtcggcatcccccgccccgtctcttgtttactgcctctgaacagaccttcctctcacctgtgctttgagtcacttcgggtcgcaatttcatctgctgaactgcctggtggtctgacctgtgggacacgaagggcatgggggcttaaagaacaatcaaacgctgcagggggagggagggaagcccagttgttgtctgtgaccccttcagtagaccgagcccacggcagtcttcatccagcagctgtctccactcctaagatgtccatcaggctgcagggaggatgcggatgtcccataacctctccctagttcctcccaggccacactgtctcgggtgtagatggttttgccacactatgaccaaggcaccttttccaggcctgaggcaatgcccactcttgccctcacccacaacccctctctagagagggagaaaggactctgtgactcgttctggctaacgtaccccttccacctcatttcctcatcacaggatacaggctaatgtgcaaggaaagtatttttctgtatcataagtgtattttgaaacaagtaaaagaaagatagaatgctcgtttactttattaaatgggctctgattttgtgaaaggcgagagagtgagttaagggcctcaggtttgttggagaagccaaccacccaggttcccgggcatgggtgtcggactgtgtgcgtgcgtgtagcagagtgctgtgcaggtgtatgtgcaatgcatgggtaccctatgaaacttgttggggtttctagagattcaactgcctgattctacaggaatatggcagcaggttagactttgggtttcctcaccgttgtcatgtaaggtcaccctttgcccatacctgaagctctgcataacaatccgtgatctctgtagtaagacccttgaggccactctcccgtgcccttggcccagctggccacattggccaaagagccagaagtgttggagtcggggacctttggttgttctttaagccgcttcctgctgccttctcccaaggatgcacgcttgtgctccatccaaatcatttggggatggtggtggggaaggtgatatgaatgtcacaggaggagacaccttctgtctttgtttcaaagaaagtgatgtgccatttgttaatatacaagagaaatattgaaaaaatatattgaaaagagcaattttaaattatttttggcttatgttgcaatatttattttcttgtattagagaagatttctttgtagagaaaaatgtatttttcattaccgcaaagacctatttctcctttttgtacattgtccttgttcgcgacccttaacgagcaatagaatgttcggtcacccctgcgtggccagtgcccactgtgccctgcatgattgtgttgctgctgctgctgctgcatagtttctggccccgtcccgtcctgctcactcactggggcatccggattgccggcccccaccagggtctgtgtctaaggagcccacagcactcctcatgtgttggcaaactcggttaataaagcaatgttctctgtgctggctgccatgacgttctgttgtgttaggtggctaagagacctagaaatcccatcgcgtgcctccgacagtatgctcggcaagagtcccgagttccagtggcgcttgcaaaccttcagcgcacaccactggctacaccttagagggagggaatgtcgtgatcttcagggttagcccctggcattcagggtcagcgaggagatggttacctgagatcaagcctccagtaaagtaccatatcaaaggtcgggtgcagagagaatggctctgagggagtggcaccattccttcctgtagtaggtagtaccttgaccacatactgctaaggtgctctacccacccaacctctcggtggaaactccaggaaccgatggaaataagtgtgacataagatcccagcacttgggaggagcagaagcccagtacatagcaagtttggggggtgttggagaggtcatctgaggtcagtccccctaaaactttaagaagctggactcagtgtgcccctaatcgtcagtgcagttgtgtactgacctgcacatgagcatacttggacacacacacacacaccttgtgtaaattaaaaccccaaactcactatacacagccaccatgctccttgggatgacgaatactatagtgacaaagtaaatcgagttgcttatttctagaatgttccctttaatatctctggattgtggtgaaccccaggtagcaaacagatagtgaagctgcactgggctgggtaccatagctctgtgggcagagtgcatgcacaaagccctgggttcagttcctagcactgtcttaactcgtgggatagaggatataggtacatgacatcgtgtaagtggatttcctctgaggctgggtttcatgagttgacgtggaactctgtagagttgaagacgactttgagcccaatctcctctttctcctccctcagtgctgggatgacggtgactaccacacctagtccatgcaggactgactcagtaccatcacatgaccctacgggggggtggtcggccaaggggtgagaaaactggggtctctgggaacatgtcctcaaagggagtatttagacctcagccctttccatttttcttgactcttctagtcatagaaagaggcttttgccatgcactgcccccatgatgccttgctccacggcccgagagcaacagagccatctgacctcagactgaaacctacgaaatcatgagtcagataagctttccatgtcgcttgtgtcctcacagtgatggagatgaatagcaggatgtgtaatcatttcttcttctgagacaaggtttagtcagctacatagtctaggttggcttcaatcccacaatcctccttgtctcagcctcctaagtatctgggaatacaggcacaagccactatatctgcatcatattagaaatttagaataattaattataagagactgatgtagaaggttggttgccagggattggaataagaaagtgaggggttgccgggcagtggtggcccacgcctttaatcccagcatttgggaggcagaggcgggcagatttctgagttcgaggccagcctggtctacagagtgagttccaggacagccaggactacacagagaaaccctgtctctggaaaaaaaagaaagtaagtaagtaaggggttgttaaagtgaggggttgtttggtgggcatagtgagataggaaatagctggggttcggggagctgatgcgcacagatgtgtatatggttaacataacgtgctgtacttggaaaccccttcatttctttttagcatgatgttagcccaaaggccaggaagcaaacatttaatattatttgctcaattgttctcaattatataattgtcgcaatttggtaaaaatgatagaatgtaggggctggagagatggcgcagcggctaagaacactgactgctcttccagaggccccctggttgattaccagcatccacgtgggtgctcacaaccatctgtaacttcagtcccagggcagctgatgccctcttctggccttggtgagcattgcaagcaagtggtgcacaataaatgcagattaaaaaaaatcaccatacacataaaataaaaatgaaaaaaataaaacagggtagtggtggcacctgggaggcagaggaaggcagatatctctgtgacttcaaggccagcctgctctgcagagtgagttccaggacattcagggcaacacagagaaatcctgtctcaaaacaaacaaaaaaacaaaacaaaaaatcaagcactcttctacttaaaaatgagacacaactgctttgtggcaatgacaaatgcatgttagacacgggagtgctcgcattggagtctcgggaagagctaaagggtggagggctcagctagcatgagggaggctcaggttctgccctcagcatcgcaaaagaaggcgggagagcaatgaggtgagtcggtgagctaagacacatgctgtcaggaagagaagaactaacttctacaagttgtcctttgacctccacacatgtgccttgatgtgtacatggcatgccggtacccacaagaatgtttaggaaaaaaaaattattgggctggagagatggctcctgagttaagagtgattgctgaacttccagaagacccaagttgagtccccaactcacaactgtatccaaggattcaacaccctctgggcctccacaggctctctctctctctctctctctctctctctctctctctctctctctctctccaggattttcctgtgtatccctggctctacactataaatcaggctggcctagaactcacagacatctgcctgcctctgcctcttgagtgctgggattaaaggtctgagctaccacgcccaattaaaaagaaatcttaaaaaaaaaaaatccactgggccttccctgcatactggcaacacccttagcgtctcccaacttcgactcaaggctcctttttcatcattaatcccatatccacctacctggctttctgcacagtgggttaggaaaatcctcctgacccaggagggagaaactcttcaaatcccagccccttggacagagtttatgctcagagggaccaggtgtcttgttactgttctattgctgggaagagacaccatgactaaaacttataaagaaagcatttaatctgtggcttgcttgcagtttcagagggatagcccataatcatcattgactggggaccaagcattcaaatatatgagcctatggagggcatttccattcaaaccaccgtgacaccaggccacaccagatgagagctgctgcttttttttcttcttcttctttcagatgtgtgtgtgttgactgcatataaatatgtgcaccacatatcacacacatccctggtgcccacagaggccagaagagggcgtcagaactcttagaacggggattaaaggagattgtgctctgagaaaacaatgctcttctaacctctgagccaataatccaggtcctttagaaggcttttaatctaggggcatctagactcaggcagggaaaaaaaaaaaagatgggtaaattttaatccatgcagcctgggtcttttgcccaatcagagcattccatggaccccgactcatctgttgctaagtgagaagtccattgaaagcataggattaattggggaagtgatcagtcatggagcacttgcctaacattcataagactctgggttccatcctcagcattgctaggggatgacgatagggggtgggaactaaaaccatctgaggggctgatagtgatgtgttagcggacataccacaccaggccaaagcagttccacgtggcacaagtttattggagacaaagaggagaaagaaagacaaagggaaagggagagatggtgggaagggtctgtcttttatttaggctgtgaggtaaccaggtaagtgtgggaagtggactgtgggaaagtatgtggttgtcatggcaacaggtgtcacctatgtgtgacattcctgggtttggagctgatctgcaaaactggttcttgataccagcagatagagtaaaggaagccctgggttccagcccagcactggggtagaggcaggaggatctcagagtacaaggctaccccctctgctatatgttgaaattgaagctacatagggctcccaatggaggagctagagaaagtagccaaggagctaaagggatctgcaaccctataggtggaacaacattatgaactaaccagtaccccggagctcttgactctagctgcatatatatcaaaagatggcctagtcggccatcactggaaagagaggcccattggacttgcaaactttatatgccccagtacaggggaacaccagggccaaaaagggggagtgggtgggcaggggagtggggggtgggtggatatgggggacttttggtatagcattggaaatgtaaatgagctaaatacctaataaaaaaatggaaaaaaaaaaagtaaaaaaaaaaaaaaaaaaagagccgggcgtggtggcgcacgcctttaatcccagcacttgggaggcagaggcaggcggatttctgagttcgaggccagcctggtctacaaagtgagttccaggacagccagggctacacagagaaaccctgtctcgaaaaataaataaataaataaataaataaataaataaataaatggcagactctgaattggtcagtctaaattcttaaaaaaaataaaaaaaaaaaaaaaaaagaaattgaagctagcctgaactacatgatattgttaaatgaatgaatgaatggatggatggatgagccatgtgtggatgtcagagggatgaagaaaagcagggaccagggcccagaggtgttgaaggttgacatccatgaggcctggccttctcgggcaggttttgaggcttgtgatctgagtggcatccttttcaaggctatcttgtgctggtccacaagtttgtattcagtccatagcctctactcattctcccctccctgctgagcttccaccagacagtatgtggccatcggagtgtccagggtgtgtttgaatgcaccgtgaaagaagactgtgggtttctactatgaatgcgctagaaataaagagtcctgtgggcctcgagctcctggagaagtgcaggcctgcgctctggcccttcggagctgccgtctcctcgtttgctaaatgcctgcctggatctttttatccagggtggccaagagatcacctagaggtggatttaagcccactgagatggattgctgaggtcaaagtttattagaagaattaattcctgccatggcagacagtcagcactacagacatcaggatgggggctccgaagacaggaatcagggtctgcatagcagaagcaggagggggtcttctcttagtgttctgagggtgggagtggttttactgcaagactctcaaattcccttacaggggccaggaaaagggtggagagcagaatgtgtggtcaattgccaggtgcaaactgggtctctggaagtctgttagccagagttggtctgtgtaagagggcaaggctgctgccggaaagaggcctgagcagcggcctgggctgcaccctaacagccaaatcctttttaaaatgtggatttgttttctcttttgatcatacatatgatcaacaacgtgtgggtgtgggcacacatgctccctgtgcctagggtttcaggtcactcggagctggagttacagagagttgtaaactgccccaagtggacgctgagagtcaaaggagccgccacaagagcagaccatgtctgtacctgctcgctgagccagcttcccagcccctttaacaccacattcttacaaagcagacaaattgatgattttccaaaggtcttgagggaaagaatgctagcgacctggcggttgcccagaggaaccgggtttaccaacttgcacttcctggaatctgagctggtagccagccctgtttgtttttgagttcttcataagcctgccaggacaactgtggtctggggttagggcaggtaccagccttgtgcagtttcctgacaggggctagttagaaacagctggtggggatgagagacgaggtgtatgtgacagtcagctgcttgcgccaaagagacccagctgccagccttctgagtggctcgggccttcctcagctgtggtcaccagggcacctgaaaccttgtaacctgagagcaggtcagggaaaggaatctggattagggattgactgctatgatcaacttgagactcagaaggtcagccagagatgtgcagaggaaaacaagggagaaaagtagcttgttgaaaaacaaaacaaggggctggtgagatggctcagtgggtaagagcacccgactgctcttccaaaggtctggagttcaaatcccagcaaccacatggtggctcacaaccatctgtaacaagatctgactccctcttctggagtgtctgaagacagctacagtatacttacatataataaataaataaatctttaaaaaaaaaaacaaaaaacaaaacaaaacaaagcaaaacaaaaaaccacccataacacccattacccactgctatttgcagaatccaaggggctagttggttctggtatcagttgtttgggatattgggctgcaaagacgtagctcttgcctccagcca

SEQ ID NO: 2762 - DNA, 2715 bp, Mus musculus
ttagggccccaggcgaacacaccagccctccaggccctccggtcccatcttccttgggcgggttaggactcgcagagcaatctactaagcagatggaagagaagaggcgaaaatattccatcagcagcgacaactctgataccactgacggtcacgtgacatccacatcagcatcaagatgttccaaactgcccagcagcaccaagtcgggctggccccggcagaacgagaagaagccctcagaggttttccggacagacttgatcacagccatgaagatcccagattcataccagctcagcccggatgactactacatcctggcggacccgtggcgacaagaatgggagaaaggggtgcaggtacctgctggagcggaggccattccagagcctgtggtgaggctcctcccaccactgaaaggcccccccacgcagatgtccccagatagccccacacttggtgagggtgcccatcctgactggccaggaggcagccgctacgacctggatgagatcgatgcgtactggttggaacttctcaactcggagctcaaggagatggagaagcccgagctggatgagctaacgttagagcgtgttctagaggagctagagacattgtgccaccagaatatggcacaggccattgagacacaggaggggctgggcatcgagtacgacgaggacgttgtctgcgacgtgtgccgttcccctgaaggcgaggatggcaacgagatggtcttctgtgacaaatgcaatgtctgtgtgcaccaggcatgctacgggatcctcaaggtgcctacgggcagctggctgtgccggacctgtgccctgggagtccagcctaagtgcctgctctgccccaagcgaggaggagccctgaagcccactagaagtgggaccaagtgggtacacgtcagctgtgccctgtggattcctgaggtcagcattggctgtccagagaagatggagcccattaccaagatctcgcatattccggccagccgctgggccctgtcctgcagcctctgcaaggagtgcacaggtacctgcatccagtgttccatgccttcctgcatcacagcattccacgttacgtgcgcctttgaccgaggcctggaaatgcggactatattagctgacaatgacgaggtcaagttcaagtcactttgccaggagcacagtgacgggggccctcggagtgagcctacttctgagcctgtggagcccagccaggccgttgaggatctggaaaaggtgaccttacgcaagcagcggctgcagcagctggaagaaaacttctatgagctagtggagccagctgaggtggctgaacggctagacctggctgaggcactggtggacttcatctaccagtactggaagttgaagcggagagctaatgccaaccagccgctgttgacgcccaagactgacgaggtggacaacctggcccaacaggaacaggatgtcctctatcgacgcctgaagcttttcacccacctgcggcaggacctggagagggtaaggaacctgtgctacatggtgacaagacgggagagaacgaaacacaccatctgtaaacttcaggagcagatattccatctacagatgaaacttattgagcaagacctttgcagagagccttctgggaggaggtcaaagggcaagaagaatgattcaaaaaggaaaggccgagagggtcccaagggcagcagccctgagaagaaagagaaagtgaaggctgggcccgagtctgtgctggggcagctgggtctatccacctcgttccccatcgacggcactttcttcaacagctggttggcacagtcggttcagatcacagcagaggacatggccatgagcgagtggtctttgaacagtgggcaccgggaggatcctgctccaggtctgctgtcagaggaattgctacaagatgaggagacgctgctcagcttcatgagggacccctcgctacgacctggtgaccctgccagaaaggcccgaggccgcactcgcctgcctgccaagaagaaaccatccccgctgcaggatgggcccagtgcacggaccactccagacaagcaacccaagaaggcctgggcccaggatggcaaggggacgcaaggaccacccatgaggaagccaccacggaggacgtcttctcatttgccgtccagccctgcagctggggactgtccagtcccagcaacactggaaagccctccaccactggcctccgagatactagacaagacagcccccatggcttccgacttaaatgtccaagtgcctggccctacagtgagccccaaacccttgggcaggctccggccaccccgagagatgaaggtcagtcggaaatctccgggtgctagatccgatgctgggacaggactaccgtctgctgtggccgagaggccaaaggtcagcctgcattttgacaccgaggctgacggctacttcttctgatgaggagatgagcgattctgaggtagaggcagaggacagtggggtacaacgagcttccagggaggcaggggcagaggaggtggttcgcatgggggtgctggcctcctaattcacccaggccctgccctggtccccctacaaggcctcagcccaatcacaactgccatttccaactgctgagtgtctcagacccaccactctgtcgtggttttatttttaatatagagagagttctgaattc

SEQ ID NO: 2763 - protein, 791 aa, Mus musculus
MEEKRRKYSISSDNSDTTDGHVTSTSASRCSKLPSSTKSGWPRQNEKKPSEVFRTDLITAMKIPDSYQLSPDDYYILADPWRQEWEKGVQVPAGAEAIPEPVVRLLPPLKGPPTQMSPDSPTLGEGAHPDWPGGSRYDLDEIDAYWLELLNSELKEMEKPELDELTLERVLEELETLCHQNMAQAIETQEGLGIEYDEDVVCDVCRSPEGEDGNEMVFCDKCNVCVHQACYGILKVPTGSWLCRTCALGVQPKCLLCPKRGGALKPTRSGTKWVHVSCALWIPEVSIGCPEKMEPITKISHIPASRWALSCSLCKECTGTCIQCSMPSCITAFHVTCAFDRGLEMRTILADNDEVKFKSLCQEHSDGGPRSEPTSEPVEPSQAVEDLEKVTLRKQRLQQLEENFYELVEPAEVAERLDLAEALVDFIYQYWKLKRRANANQPLLTPKTDEVDNLAQQEQDVLYRRLKLFTHLRQDLERVRNLCYMVTRRERTKHTICKLQEQIFHLQMKLIEQDLCREPSGRRSKGKKNDSKRKGREGPKGSSPEKKEKVKAGPESVLGQLGLSTSFPIDGTFFNSWLAQSVQITAEDMAMSEWSLNSGHREDPAPGLLSEELLQDEETLLSFMRDPSLRPGDPARKRRTRLPAKKKPSPLQDGPSARTTPDKQPKKAWAQDGKGTQGPPMRKPPRRTSSHLPSSPAAGDCPVPATLESPPPLASEILDKTAPMASDLNVQVPGPTVSPKPLGRLRPPREMKVSRKSPGARSDAGTGLPSAVAERPKVSLHFDTEADGYFF

SEQ ID NO: 2764 - DNA, 75140 bp, Homo sapiens
agggtctcaccttcacttcaagcagctcacaaatgtagtttctggaacaaagggcagttccctcctcagaaggagcccccaggggttagcatcatgctccataccccactgcatgctataaaccaggcagacaccatccatctgtctgactttgacttcccctgtatcttcccacctccacttctcccctacccccaaccccatctcatatgaatcaccgtcactatgcaggtccacctccaggcctttctcaagaaactctcttgcccatttcaaccttcaggatcctcagatggcttgttgtaccttgaccatcctgcatatgcttaaggacctgtcttcctaaatgggcttaaatccagtgaagggagatctggatctgaggctcactgccttagcgtagagccttcatggtgtgtttgtaaatgtatgctacttttttttttttttttttggagagggagtcttgctctgtcgcccagtgcgatctcgactcactgcaaactctgccttccgggttcacgccattctcctgcctcagcctcccaagtagctgggactacaggcgcccaccaccacgcctggctaatttttttgtatttttagtagagacggggtttcaccatgttagccaggatggtcttgatctcctgacctcgtgatccgcccacctcggcctcccaaagtgctgagattacaggcatgagccaccgcacccagccccatactttttattattattattattagagacatggtattgctctgtaacccaggctgtagtgcagtagagcaattctagctcactgtagcctcgaatacctgggctcatgcaatcctcctgcctcagcctcccaacctgttggaattacaggcatgagccaccataccctgccccaatgtaatgctatttctaatataagccaagttacctccagggtgactgtgaatcagtaaatacatggggccaggtatggtggctcacatctgtaatctcagcaccatgggaggctgagataggagtatcacttgagaccaggaggtcaagaccagactgaacaacatagtgagaccctgtctctataaaaaataaaaaattagctggacatggtggctcatgcctgccgtcccagctactcaggaggctgaggcaggaggatcacttgagcccaagatgagcttgagaccacagtgagctatgatcgattgcaccactgcattccagcttaggtgacagagtgagaccccgtgtctaaaaaataaataaataacaaataaaaataaatcagtaaatacaaggaaagggtctttgtaagactatcagatgtggggagatttgctttgattgatcagaaaccctgggaaaggtgaaagtaagggttttgcttatactgctcaacttgacttagagccaacaccttcagttcttggtggtccttggattgggccaggcctttcagctcagaatggggcgtctcacactttgactctggttgggctggcccttgacttggctggagttattggctgctgccagtttccggggaaacgtttggaggccccagggatcttcatttccttttgccatctgtagccaccaggctggatctgagagtctaagagggacaggtggcctggctggcacattatccagacatctcctgggactgggcagtaccgtctccgaactggctggctaaggctccagaggggtgcctctcccaggcatgtgtttgtagtgcaccccaggaagagccaagtctggatctttccagggcagtgtcttcagccatgaacacagacctgagcagattttccctctgttccaaacccaagctgcaatttctgcctggagcccagaaggcagaagctgctggttttgtcctccctgaatgccaaataatatgttttctacagagtttggcacatagtaggcacataggaaatatttactgaatgaatgctcatcctcctttagaggaggccacctcatcccactggatacatgtggcagggtaaagatgggatgacagaaacagaagaaacagaaggaagtgtgagcaaaccttacttggatctgtgcaattagcaagtcttcccactccattctttccctttaggattcccaggaattctccaggaaccctaaggttacagggcaggtattgtgacccaatttttctaatctctaaacctgttctatttcaagtgtgatctgtggaccagcagcatgagcatcatcttgaagcttgttaaatatgcagacttggcagggcacagtggctcacgcctgtaatcccagcactttgggagtccaagggatgcagatcacctgaggtcaggagttcaagataagcctggccaacatggcaaaaccccgcctctactaaaaaataaaaataaaaaaattgccaggcgtggtggcgggtgcctgtaatcccagctactcgggaggctgaggcaggggaatcacttgaatctgggaggtggaggttgtagtgagctgagatcgtgccactgcactccagcctggacgacagagacagtctcagtctcaaaaaataataataataataacaataataattaaaatgcagactcttggctgggcgcagtggctcacgcctataaactcagcactttgggaggcccaaatgggaggatcacttgaggccaggagttcaagaccagcctgggcaacacagcaagatctctgtctctacaaaaacttctaaaaattagccaggcatggtggcatacgcctgctgtcctagctacacgggaggctgaggcatgaggatctcttgagcctaggaggtgggtcgaggttgcagtgagctgtgattgcaccattgcactccagcctgggcagcagagtgagaccctgtctcaaaaaataaataaataaataaaaataaaaaaggccgggcacagtggctcacgcctgtaatcctagcactttgggaggccgaggcaggtggactgcctgagctcaggagttcgagactagcctgggcaacacggtgaaaccccgtctctactcaaatacaaaaaattagctgggcatggtggcatgcgtatgtaatcccagctactcgggaggctgagacaggagaatcgcttgaaataaaataaaataaataaaaaataaatttaaaagaatgcagacttttagctctcccagacttaatgaatcagactttgcatctgaacaagatcccaggtaatttgtgtgcatagtgtagtcggacaagcattgccctaagcagtgagtatgtgaatacaagtctagaacccaaatgaggacttctcacctggcacagaagtgggctgctggggagtgtggctaactacatctgcggcttctgcctaccttgatgactcaaattgttgagtcaggtattttctgtttctttccaacccttgtataccgccttgaacatagcaagtgccaggtgtggtggcacgtgcctgtagtctctggaggctgaggcgggaggactgcttgagcccaggagttctgtgtggtagttcattatgtggattgggtgtctgcactaagtttggcatcaatatggtgacctcctgggagcaggggaccacgaagttgcctaaggaggggtgaactgacccaggtcggaacatagcaggcaataaatatcctgggaatgaatgttgaaccaatcttatactattctctcagtttagggtttttagggtatgctgtacttctgcatctggacatgtactgaaagttatttgaaaggatttttagtccgggcgcagtggcacacgcctgtaatcccagcactttgggaggccgaggcgggcggatcacttgaggtcaggcgttcacgaccagcctggccaacatggtgaaaccccgtctctactaaaaatacaaaaaattagcctggcgtggttgcgggtgcctgtaatcccagctactcgggcggctgaggcaggagaatcacttgaacccaagaggcgtaggttgcagcgagccaagatcgtgccactgcactccagcctgggcaacaagggcgaagctccatctcaaaaagaaaaaaaaaattagctgggtgtggtggtgcacagctgtaatcccagctagtcgggagactgaggcaagggaatcacttgaacccaggagggggaggttgcagtgagccgagatggcgccactgcactccagcctaggcaacagagtgaaactgtgtcttaaaaaaaaaaaaaaatatatatatatatatatatatatgtatatatatatatatatatgtatatatataaaaatatatatatatacacacacacatatatatgtgtgtgtatatatatatatatatatatatattttttttttagccaggtggagtggctcactcctgtaattccaacattctgggaggccaaggcgggagggttgcttgagcccaagagatcgagaccagcctggacaacatagcaagaccctgtctctacaaaaactaaaaaaagaatttttgttccgaaccaggacccctggaaaaatagctattgtctaatgagcaatgactgagcgccaggccagtgcatggaaccatgtggacatgttctcagtgtttcacaaagtgtggttcaatgccatgtacattatgaatgaccaagtacttgttaaaagctgcaggttttggctgggcgcagtggcttatgcctgtaatcccagcactttgggaggccaaggtgggtggatcaccttaggtcaagagttcaagaccagcctggccaacatggtgaaaccccatctctgctaaaaatacaaaaattagccagccatggtggcagcctcctgtaatctcaaaaaaataaaacactgcagatattttttttaattgaaaaaaaaaaaaaagttgcgggccctgccccagacctgcctactgagaacctctggggataaggctcagatatctgcaatttttggccgggcacggtggttcacgcctgtaatcccagcactttgggaagccaagacgggcggataatttgaggtcaggagttcgagacctggccaacatggtgaaaccccatctctactaaaaatacaaaaagtacttgggtatgatggtggcacctataatcccagctatttaggaggctgaggcgggagaatcacttgaaccctggaggcagaggttgcagtgagccaagatggtgccactgcactccagcgtgggcgacaagagtgagactccatctcaaaaaaaaggctggggccaggtgcagtggcttacgcctgtaatcccagcactttgggaggccgagacgggtggatcacctgaggtcgggagttcgagaccagcctggccaacatggagaaaccctgtctctactaaaaatacaaaaattagctgggcatggtgatgtgtacctgtaataccagcaacttgggaggctgaggcaggagaatcgcttgaacctgggaggcggaggttgcagtgagcccagatcgtgccactgcgttccagcctgggcgacagagcaagagtctgtctcaaaaaaaaaaaaaaaaaaaaaaaaaaaatctgcatttttaacatgcatcccatgcaccccatccacactaaagtttggaaatgattgcatccctagtttacagaggaggagactgaggcacagagaagttgattgacttgtgcaaagtaacagagctggagaatggtggagacaggactcaaacaaaggattgcctgattctggaatccacagttttaatcatattgtctattacactagaaaaactgatgtccagagtgactgtgtgtatttagtcatgtatattgatttgtgtgtatttcgtgtgccaacaaagtttgctagactgtgacccttggaaggcaattaatgtgttttatttctctcagtatttgtagcatccattaccatgcctagtacacagaagatcctcaacagaagctgtttgaattaaatttctacagatacgtagttatccatctctataaacattcacagataaatatatacagaggacatctcattttcaggtagcatctgagaacaagttgtgacaactagaaaccttccctctctatcttgaactatttcaatcaagcttttgctagcattattccattgacatggctcttgtcaaggtcaccagtaacctccatgttgatgattccaatgatcaattctcagcctccagcttgtctgacccctccacagctttggacatagggctttcttccctcctgcaactctctctcacttcctttggcttccaggatattcctatctctttgaatgcttttttttttctttaaacaacactaacaacacttttgctgattcctcttcatctttcagacatctttaccttgcagtgctgaagggtaccatccttgagccccttctctttctatgttcacttagttgatgatctcaaatttaaataccatccatctgctcactgaccactctccaatgacatcttcagcccagaccttgcccctgagctgaggctatcatgtctagctgcctgtcaatggctgcacttggatgtcaaataggcatctcaagcttcatatgtccaacactgagctcctaatcccctaaaacctactccttccagtttcctccatctcagttaaggacaactccatctttccattggttcaaggtaaaacacttatcgttgtccttgacttctttctttttctctcactccatcagcaaattctgtcagagctaccttcaaaatgtagatgaccgctttccaccacttccattgctaccgctctggtccaatcatctctcacctggtttattcaggtggtctcccaactggccttcctgcttcagctttgcctcttaaatctgttctccatgtaacagccaagagacctgttaaacccagggtcagatcatctcagtcctctgctcaaaactctccatatcactctagcaaatgccaaattcctaacaatgacctaaaaggccctatataatctctttcatttacatattaagcatattcctgcctcggaggcattgcacttgctggtctcttgagaccttggttcttaaccttttttgtgcatgtgccatggactgttttggcagtctgtgacacctgtggactccttctgagtatagtatctttaaatccataaaataagttccacaaatcattaagaaaacaaattgtactgaaatacaactctcgaaatatttaaacatatatatgtgcttctctattaattcattaaattataagagttagcagcatgattttgaagtagtgatgagtaaaatgatactttttcaataaattactcataaagtgtaacgatattttaagatatttgcaacaactctaaagtgatatgaaaatatctgtgatttctaccagcagtaatgtcacaggtgctgctaatatcactgatttgttatctgtattcataattgaaggacacgctacattttaattagtgaaaataaagttgtaatttttttctcacctaaggtcaagatcctctgaattctatccacagacccatggagaggagagtctatggtctccaggttaagaacggctggcttctcttcccccatgtacatacacacatactcccacatacagttcactcctttacctcctcttctcaaagactgtcttctcggtgagaacttccctattttatttaaaattgcactcccacactgtgtatcgccctttccttcttaagagtttctccacagcacttaatcactttcaaacatatagttatttttatattttagagtttagaataaaatcatgtccaattttaataacctgctcactctagcagctaacatttttaccttttttttttttttaagttctgggatacatgtgcaggatgtgcagttttgttacacaggtaaacatgtgccatggcggtttgttgcacagatcatcccatcacgtaggtattaagcccagcatgcattagctatttttcctgatgctctccctgccctgctcctcatttattttatttatttacttatttgtgtgtgtgtgtgtgtgtgtgctgtgtccccaacaccaagaatggtctctggcatacgggaggcttgttgaaaaacaatgaaggattacatctccaagaactctctttcttctcatttctttcctgtaaaaagttaatgaatgattacgtccaaagcagagattgtggaaaaaggaaaaaaaaaaagttaatgaatgatttgtgagacttttaataaagattaaggagttacaattagctttatcgttatcattctgttaaagcttccaaggttaaccttaaacagcagcagagaactgtgggaatccaaggattttgatagggcttccagtcctaagcaagaggtattttcaagggctcattagaaggcctgggtctcaccccaagtcagggaaccacctcagaagcaaagtgctgctcataaaattctttcttgccaagacagcaatcagatccccccatccccaatcaaaccaataatagtaatactttttatttctggcagtgtggtaaaatagaaactacataggtctcaaggtcagctagacctaggagccaattctgccagcacttactagctgtgtggctgtggtaagttactaaacctttctgaaaagggaggaaggggtttgggggaggatgagatagaatggctcacaaagtgaccagtacactgcaggtgcactttaaatggtcacacttccctcatccatctctggaggtcatctctttagactgtgccactgtaaactggtaccctcactcccaccccggaatggacatctggaccttgaccatcaagcttcagagaacaatttcacccttccaaaataaaaaaaacccacttaggtaccaggcaaggtgctaatgagcactatgcaccctgtgccagttgctgctttacacataccacctgtatatgtacgtacatacatatatgtgtatgtgcacacatggcctcaagaaccctccaaccaccccattctacccaaaaggaaaaagcgatccagggagatgaattcacttgcccacatcacacagcttctgaaatgcaaagccaggattagaacctaagtatttaactattttgttacacactccaagtctgcagcacctgtttccagactctgagcttggctagagaaaaataccaccaattgaccactgagagccacagccaggtctaactggaaggtaatacccagaccatcctcttgccagacaattctcctcagactttgtgaatgaaggccaaggaagaagaaatgttgcagtgactccctttgagctcatatttctttcttgttgcaaaaactgcttatttcagcattcatcatctccctctttgttgggtagacaatccgccctgtcggaggatttgtgctgttattatgagtttgtttattattagatttatttctcctataagcaaatgtgttcacaacattccatcggggaatcttcttaattgtcacataaatgtcatcttatgtaaattgaatatttatcttcccatggaagggggtggaggggaaaggaagaataaacaatcttcagtcttggagagggaaggcgactccggtgtccattcacaactcacccacgtgccttcaaagccaaaggtgagctgaaaaattattggataatctgaggggcagccgaccatgagggggaagaaaaagttggccacgatgctttggggatgttgggccaggctccccacaacctcctcccgaggccagacccaccccctccccagctagaggcattccgaggaggttggagcttgacccccgattcctccccaaccaggaggccagtccttctccttcctcgagagaaggtgagctcggcgggcgcagcgggttgggtgggtgtggcccgcggctccgggaacagacccaaggccccgccaccgccggctagcagcccgacagcccgcccgcctggcgagcgcaggctcttcttccagaaactgcgaggatccgagcgtactgtttgtgcaccacaaggtcaagtcgggaagtggagccggaggaggaggggcgaggaggcgaagggtggggagaggggcgccccgcttcctcgccatgtgccagcctttggaagttacccctcggtttttaaccctttcggggtaatgggaaggaagagcaaggaggaaggggtcgccccggggcaaaatcctgctggggccaggatgtgcaaccacccacccacccgctcatcactgccttctccaccccccggaaatgcggggcagcgctaggcgccaggaggcacccgggaggggggagggggcgacgagcccaatggggaccctctctacggaccgcccctcttttcttgaggtcgcctacaatttcaagttcccccgcccggaatgttagttttccatttggagtgggtgcggggaggagggccgcgccccctccccaagactcgcgttcgcccctccactcccctcctgccagcactttctgctcacttctggtgctgcaaaacgccacgcaatttattcgattcgcattttaaaaccagcgattcagaagcagggcctagggcgagggtcttccagcgctggagccccggggggcggggtgctcagtgcaaacctcgttccctccgcgagtgtcgcctccaggctgttatttgcaaagaaacgtctttttgacgcagggagaaatggcaaattttaagtacgtcattaatatggcgccaaaagatttttttaagtataagctcgcttttttttttttttaaggttgcggggggcgccgcccgggtctggggcgcgtagggggcggggtgtgagcagaaagtgtgagtgaaagagtggaggggcggggtatgtgtgtgagtgtgtgaagtgtgagcagacctgatgggacttgcacgggcgcagccgccgctcgggcccggccctggggacagggcgggctaggggcgccccagagtccatggggagtccgggcccagggtgccagcaggcgtggtggtggggctgcgagggagggcacccttcccccacggggcccgcaacgctacctggactccccgccggagccaaacaactgggcggggggttgggggggcggcgacgggggtgtcgggagcggagatccgagtgaataagaaaaaagtggctactccccctccctcgctcctcctgcccgcccccaccccacccccaccccaacacattttttttttctaaagagatcacaaggaagtcttggtttaaaaagaaacagaaacatacacagggggttggtgaatggtgccgaccgcggccatcgcagttggaggctattttttggggggggtgagtagcgtccatggagttactttgcgcccactcctagcggcaccggcttaggtcctgcgggccgaccgtccccggcggggggcgtggggcctgggacgccgcgggcccggccgcctccctcgccgcgaccccggatggatgcgcgccccccgccctcccgcgccggccccaggagctcccggcttcgggagcatccttcccgcgccggtccctgcagcggcgcgtagccgagggcagcgcccgtcaggggggcaccgcggagcaaggtaagatccagcccccggcggatgggccctgcgcatctccacgacgttatttggcgtttttgcaacagatctgccagcgctcttcgctccctcgctctctcttgctcgctcgctccctctctctcctgctggctgcctgttctaggaagccagcgcggagaggggggggatgcacagcacaggggagagagattgcgcatgttggtcagtcgtgttttaaagagtacagtgcggggaggctgagaggggcgcatgcaacaacaacttttggaagggtgagcttggcgaccttctttattaatgactgcggcaaagcgcccccgggccggcgagggggcgcgggcgggcgggggcgcgccagggctgcaacttccccgcgggctccggccgggcgtaggggctgcggcgggagatgggtacggtggggaggtcgagcggcccgggcgggggctccgagaacctggagctatctgccctcctgtctccccgagtttcattttgttgatacgcagcacgtccgggcgccgaaccgggctgagccggtgcacatgacctcgcgctgggctcacgtgcagccggtccggtcccagacaccttccgggggccaccgcctccgccctgtcgccccctctcccggcccggtgcacgcgggcgctgcacgcgggggcagcatgctcggctcctggggttggaggctctgcacaaattagacagtttttttggaggggcgggggacaccctttccaggtgagtgtggagggtgcggagcctcggcgccaggggtgaggactggggtcgggggcagcctccacctccggggccgcgcggtagtccagctggggagaggcgctgggagagtggaaatgtaccggcggcggccggagcggcgggtgcgcgcccgcggggcgacggcagggggcgtggcccttgtttaccttctcccaactctgccggttcgcgtcccgcttcagggacggatccgcagtccccagccctctgcctagggccctgcaccatgggtggtaccaggaagatgccggcttgtggcggaccccgtttgggacgcacacacctgactctcaaatgagtgacattgcagcccccgcccccacctagcgctgctgcagtccctttgccggatccccggccccgccccgcccccggcagtggcatcttcccggcctcacctccttcctccctctccctcccttcttcccacccactcgcctgcgcctgcggagcggcgcccgcccgcctcctccccgcctgggtgcagacttgtggctccccatggtttcttcccgcccatccctgggtcctgagacatcctctcctctcggccaagggacgagaggggtcaacttggcgattcgcagctgttctgccagaggatggggttgcctgcgagacagccaggaaggcttcactctagcttccagaggcccagccctgtcccctactacacacagctaccaccccacccgcccctggggctcggctgcccttcccggtgtctcttaaacccctcccccgacctgggtgttaagcccacccacctcccggcgccgcccccggtcgaacagcctcttgcccttccttcgcctgggccggagccccccgcagcctcctccggctcctcctcccggctcccgcggtcggaatcacgccggcgcgcctccagcctgcggtcccgcggactgcctccaggggcgggctggaggcgcgcgcaactcccctcccaatcccctcagccactgccgctggcctgggcacttttttaccagcttggctgctggcctcttgctggaggctgggggaggtgaagggtcactgggtgtctttgccgtatgccgaaggcacactgcggccggcgattctggtctctgcagatttccaaacctcgccgctgcgtctagcacccctgggtcatcttctgcaggatcccgaggcacaaagttgtatcccgggtcagagtttgtagggggtcatcgagaggtgtcatgtttccattcagagcggttccaaagcgtctaggaaggggctgagtgggacctgctgccttgcctttgttggaaggaggacccctgagctctgatcccagacaggctgtcaggacgcccccttagcatttatgtttgcaaactgattcctggacctgggaggtggtagggccgcctggcccctcctctcggagtggcattaactccctcccttcactggtaaaattcccagtaggacatttggcaaaagggctcggcatggagctgccaaccgggcctggctttgtttcctgggttcccagggcttctcccctaccctgactttctttctcaccttagggccccagatgaacgcaccgtccgtcttgtcccatcttccttagacgggctgggactcgcagagccatctaacaagcagaggaggaaaataacaacagaataactataagggggaaggaatgagtaataaagctgacccaggcagggaggagggctttcatgtttaagagatgctatttgctttttgggtcacaggctgcaaaaacaggctttgatccgaagtgggcgaataatttattgagcaagtttgcatggtagaggaagggatgtttgtttgatctggagccctctaggttgccccaagtgctgttggctgttgttttgagtggaaaagcatttggttctgcagcaaatgcctcacagagggaagtcctcgccccaggcagcaggacttgcagtgaatattggttttgaaattgtttggccaagggtccccccatcacttttggagatgaagtgtttaaggatagagttgtttgggctcaggatgcagcaaatgtttccagaatgttttcccgtccaaaatgcttttcctttccctaaattgcctggctaaagggccagtaacagtggtccaagaggttgtcagaaatctccacttagctttcatggactggtgaggtgggactgccagtccccaggtcctagatgcaccacggagtattgacactgtataggccctggacactgacccccacatccttgaggttgggaggcagggtgttctggctctaacctagtgttcctcttaacaggaaggcagttgtcttatgctcatgacacaggtaagaggcttctagtccaaattcttcatggcacatgcagcaggctttttgggacctcacagttctccctttaggttctctgatggggagaacaggtcagagttggggagcaggatacccctggcttgccctgtcctccagataggacccttaccatgtggctcaaaagcttacaattgtaggtctgctcaaagctcctttcagacagcccataggaatctagaatacccataccctggaacttgtaggcctgtacacttcagcccactggagatggggtacaccttctggagtcagacagcctaggtttgaatcctggctgtgcagttaccaactgtcataatggctctatacctcagttccttctgttacaaggagcactttctgcaaatgggattaataacagtacctatctcatagtggatgtatagaataagtgattacctaaaaaagactaagcccaaagcaggcatgtgataagcacgtgattagtattagtcatccttattatacctggggagggtccccgatgcagcttggacctttgatctctcacctttaggctaggccagagagccagctcgcttctctgcagaagggatcagaaggttcctgcaggtgccaatgggcagccgatatgggagcgagtagacggagctctgccctctctggggcaaagagtagggtgagaaggttctgaagaacaaagtagacagagccttttcattctcccaccatccccttggtacgtccccagaactggtctggagggtgggtgtggcagcgtcttcaaggggagctgagtcccctctgggacacttgaagttgcagacaggcaatggctggtgttgcaggagggttcaggctcctctagacttggagaagcaggtccaggaagccgactggaggatcccaggcagcagccctctactctgtatacaaaatcatttttgtaactgcaattactgtccctgagaaggcattaaagttaatgagagataggaaagagtggggctgtgaccccggtttaaagcggtttaagagtgtgcagctcttgttttctgaatgtctggccttcccaacacaaggaggctctgaggacaggttttccagccgaaatatcattaaattgtattagcatcttattacacacacgccttagcggtctgcctcagacagggagagtttttgtttctctttgaaagattgtgtctggaatggtaaattgcctgcttgaaagcccttttttcccctttttttaaagaagaggacgaaatcctgctgtgtggtggcaggcaggccaggcctagtggcccctggagaggagaggctggaggccaggttggggtgttttaactgcccagggagtggctgcagtggcaggcctgaaaggcccactgttcccagggtcagctggaagggcgttaatggaggcccagggtgtttatttgagtttatttgcagagaggtctttaaagggggctggcattgggcattggtgttttaagtccagacctgaggccctcactaaggccaaccactagtgctgccaagaaaacatctgccaccaaattgctgccctattactgagttgacattgatcattagccaggagcccaaccaaataaagcctcctggaaaatgtgtgaggttaagacggggaaggcaggctgtgaaaacaagggcgaaatcttgggccagggtgtttgttcctgcaagccacaggcaggccagctggactgtgtggtcccgacacttcttgggggagggagcgagagcacactcagcactccctagtatgtcactggggttctggctggagtctaaatggaatgctccttactcttcatggaatatacattcccaaggagaacgacatgcaacaagtagctcaacaagcacagctgggatgggtattccgtggacactgggtggtgaatttcttcagatagtgtgatgagcatagactgacatgggccacactgaagcttaaacctgaaggttgaaaagtcagacatgcatagaccacatagaagaatattccaaacagagtggagtacagcgtgtgcacagggctcgaagtatggaatatttggcttgttcaaaggaatgaaaggagcccagcatggctagaaggtggtgaggaaggggatagtggtcagtatgaagctgtccaggtggcaggggccagattgtgtagggtcttgtggtcaggagcttaggctttgtcttttgatctatgaagcctttgaaagattttcttaggggcatgatatgatctgatttatgccttttaaaatttttattttgttctaattttttttagagatggggtcttgctgtgttgcccgggcttgccttgaactcctgggcccaagtgatcctcctgcctctacctcccaagtagctggaactacaggtgcatatcaccatgtccagcttctgatttatacctttttttttttgagacagagtcccactctgttgtccaggctggagggcaatggcacaatctcggctcactgcaacctctgtctcccaggttcaagcaattctcttgcctcagcctccagagtagctgagattacaggcttccgccactaagcctggctaatttttgtatttttagtagagacggggtttcaccacattagccaggctggtctcgaattcctgacctctcaagtgatccacccactttggtctcccaaagtgctgggaatataaggatgagccaccgtgcctggcttttttttttttttttttttttttttttttgagacagggtgtcactctgtcacccaggctggagtgcagtagcataatcacagctcactgcaacctcaacctcctggcctcccacttcagccccttcagcagctgggaccacaggcacacgccaccatgcccagctaacttttgtatttttcatagagtcggggatttgccatgttgcccagactgatcttgaactcctaagctcaagtgagccacctgctttggcctccataagtgctgggattacaggtgtgagtcaccgcaccccgactgatttatgctttttaaacatcactctggcagctgtgtggagcctggacatgggtgaattgatactggaagctgggagatgaacaagtggttcaggcaagagatgagattggcttggaccagtgtggtgatagtaggaagaaagtgggtgtgttctggaggcaaagcctagtggacttggtggggccgaggatacagagaggctgtgggcttttgcttcattgaggggactctacgacacccacactttgaaggagagcttcctacctgtgtctccatgctgggggttgcatgagaggtgccaatagactagtgcaaatggcaggaaaatgagatcttttctttcctaaagtctcctttataggtaggatttcgggagcactttctgtcctcgaaagcaagtgccttgtgacactgaaatcttctcccacagcagaccttgctttgggggagatgggggaagccagtggaaaggaaaaaccagaggccaagatcacatctaagcacctccaccccccaagtgtgtttgcagtcctggatttcagctttgggaaaggagtcctccctgtccctcttgctgaggttgcgaggagggtgatccatggggcaaaaagctgacatagtgcggtcccaggcctcattagccactgtgacagtgggagctcgctggagcaaggaggcctttggaagacttggtttaaaggaaagaagctgcactcacaaaacagtggcttccttctcaagcctagttgttataacaattaagccaccacaaaatctgctcccttaataatagcctcccatgggacagccctgacccagaataatccctaggcactctggggtgttttgtggaggacagggttagatggggaattggcttggtgcggggtgtaggtctgcatgctgtcacctgttggtctctgggcagtcaaggagtcctttcgagggcaccttccttactgtatagggtcactgcctcttttttaggagcccctcctccaggactttccgacctggtccaaggctgccatggtattactatctggcacccatatggatctctagccactgtgctgagggctttacactgttcttatttattctcaccagctgattctggcccacagatgtgtttagtttggccctttcaaagtgttgtaaaaattctgactcagttgccaacattttaaattaaggacatttatgtaaaaagccagttccagtttatctcctctgggaggtatgtctttcccaaggtccctggtctatgaggagaggagctaggatttgaacccatcaacaacttctgcttttaatactgtgggagatgctggctcggaagtaccttctttgcaggaaatgaagagaaatggaattcgcttacaggattgcaaaagaaaatgggtgggtgcacttttagcacctcccccccactccacccaccgatgtcaggacaaagctgggttgcgctgggctgggctgagctgaggaagacgtaggctagaatcaggagtcaggattctgtcagtcagcctttgtcacactctctcttttttttttttttttttttttttttttgagataaggtcttactctgtcgccaaggctggcgtgcagtggcacgatcatggctcactgcagccttgacctccctgactcaagctatcctctcacctcagcctcctgcatagctaggacctcaggcatgtgccactacaactggctaatttttaaattttttgtagagatgagtccccctacgttccccaggctggtctcgatctcttgggctcaagaaatcctccagccccggcctcccaaagtgctgggattacaggtgtcgcacccttgacacgcagactctggaaggcagtgagggtggcagctgtgggttgctgagctgtttgtactctgctgcgcagagacggagaagtcagaaggtcaagagcacggtctcctgaatcaaatacagtcactgacatcttgggcaggtcacttaacctctgagcttcagtttcctcctctgcaaaagggaagcagccatgatatatgcctataacaaagggctgctctagggactcgttgaggtccctgtggaccctgtggaaccccctcccgctactgtgagcgcttagcagtcttagccatccttgttcctgcgtttgtgctgcttgcaccaccagtgtcccttggaacctcagcctctggagggcactttaccggcatctttgaagctgggcggcaggcagcctcaatgagccttcctgccatcctggtcctgctggtggtgggcactggggtagagagaagctcccggctaagatcaagtccaaggcaggagggccatcctggtcagctgagagatctgggtgttcacacccaccttagagagcagatgctcactagtctctgcagggctgcagtaagatggtggcatcccagggctcagcaggaatggactggggttgggggcagctggagttaggtgcagatgggctgggcagtggggctttctctctactgacacagactccctccctatcctttgctgtggggagtcagtcagggaacacaggggagcgtgctctgaaccctgagcccccaatgtgttcccacattaggactcagccacaggcgagctgtaagacccagagcaggttaacgcatcacctgctgtgctcccctccaaggggatgagagcaggctctgccacctgggactcgtgaggattataggaaacagtggtgggaaaacactttcagcagccaggagctgatggagggtaaaaaggcagctcagcatgcgcctggggatcagacctcatggattcagtcccatctcagccacttactagcaggacaaggtgctggcctcacttgtaaatggagctcacagctcacctggttaggaacaggagatgatgtggataaaggaagactccgcgtgagctcagtatgaggcccctatgtgagagttgtccttaataccttgaagttagatgttgcagttgaggtagagtttatttgtacgtttatctgggaaggatggtggggagtaggagggcagggtagcccagcccaggaccagtcaccctgggcctgatgtgtctcagggacccagcctggagtgtcccccgcctctcccccgcttctgtacactgctgaccaccactcgcaggactaggccctcagtgttttctgtgctggcttgtccctaacttccgacagcatggtcctcctggaagaatcagtcttgtttgctgtcctctacccacctacctccctagaggacttgtggctcaggaggcctttgcagtggtgggcctgagtgtccttgggtggcagctgggactgggcaggtcatggtcactattcagtttgggcttgctgatgcccccatgtcctctccctctacaacagctttggttagacccttgctcaaccaagggctctgggctcaggaggtgggagatgcagccttttagaatcccagggcctctgtgggtgggtgggagagggtggtgctggcagagaagaaggctaggacagggctttattcttatctttctgcagtgtcataagtgtggggaggttggttatggggtgattttctgagaggttgaggatttcccaagccatccgtgagtataatgggcttgccttttgttgcagatggaagagaagaggcgaaaatactccatcagcagtgacaactctgacaccactgacagtaaggccttccagtttgggctcctacagggaaagcatttgaacagtgatcaggcccacaggcccagatgggaggaggctgccctgtggtcttaatttcactaagaggcatgttgatgaaagcataaatcaagtcaggtttctccactcctgcccttccacttctaaaaaagtccctgcaccttccgtgacctccagggccttgttctcccagctgtactcccccttatcctctaggtcccagctccatttgttttgctctggttggaacagatcggctccactctgggcttctgcatatattaagtgaaggtccatatagaaagtctgtatacaacagatacaaaaccagtcaccttttaccataattaccggataagtaccatttcccaatcagtggtaagctccttgataagaggtctcttgtcttgcttaccactatatccccagctacgatctggcacatagtagatgctcagtgaatgtctgctgaacaaatcaatgaagatacccaaccttcatagaatcttggcaatagaatcccagaggtagacttgtgtatggattggcatgtcaattggacgtgatggttgcggggaggggtgcgtggattgcactatcaagcagcagaagaagtttagggagcccccctgaaatttggagaagagaagggaggtttatgcaaagtgagggctctggtactaggtcataaggcagctcttctcgggtgcccagaaagccaggcctgcctgtgcttgttggagtaaggagttccatctgctgtgggtaggagagttgtgctgccaggaagatctcacctagcaatgattgccctgctggaggcccaggctaaggaagaggctgccctgccaaggaggccgggcttggagctgtgcaactctagacctgtttcttcacacttatgagcaagtaagattagggggcttgccaaggcccctcctagctcccagagttccacagcccccacaaaagcctaagggtagatccactaggatggccaaggaggtctcagccccatccctacctccaagtctcatttgttgtcctttgggctctgtttgctcagtttggctctggcgtcccacctggccagcccttcttccctacagcaggagatcacagcatctggccttttgtggctacaacatgctgcctgtggcctggctcagtggaaccaaaaaccacatcctccatttctaactttattgcaggcagaggagccctttgagagagccaggtacctgcaaggctccccaccagccccctccactgtgcccacccatggctgctactcctattcagccaaaaccatagtgttgccctatttcttgctgctcctttgattcataagggcggaggccacagcactgtcatccagcaagggccttagaccctaataattatagctaatgtttattgaggaatcactctgtgccagggactgtgctgagactttacaggcatgatatcacttattcctcaccacagccctttgaagatagttattcttttgcccccattttacagaagaacaaactaaggctcagcaagattgagtcatttgcctggggtgacaagctagtaagtggctgggtcagggctctgctgatgacctggatctgcttcagagcatctctcttcccattgccctgctctgcctctgaatacccactggcatcatcccagagtatttggacagtacctaacctggggcagggtggagtgtgggcatgaaaggcttattccagctgtctttgagcagagtcccacagagggccaaggacttgtctggggtcacacattaaactaatactgagccccagtaacagcctttgatttctccagccttctggttggcgagtagaggaggcttcatgtccccattcatcagtggggagactgaggcccagagcagggatactaggtctcacagaggtttctccctcctgaacattctagccggggctttgcttagaagcttcctattcttgggcatgagtgggtggtgctcctggccctccaggacccctaatggactgttctctctctgcaggtcatgcgacatctacatccgcatcaagatgctccaaactgcccagcagcaccaagtcgggctggccccgacagaacgaaaagaagccctccgaggtgggtagtgatgagcttcccagagatctgtggggagtgagagtgagctgccctgcggagactggggcagagcattcctggcagagggcacgggcagtgcagagggaggccagcgtggccgagtggaatgaaggggagtaggggccagtttccctcagccttccaggttgttgtgaagatgttcctattgaactgagcaaggggagaagcctttcaaggatctcagacagggtaatgacacagcctgatgttttagtgaaagttccccctggccgctgtgagagaagggagagttgcagtcatccagcagggaaatagtggtggcttagagctgggtggtagcagtggaatgagaagcagcagggtttgtgacattttggaggccgagccaagagtgataaggatttgctggtgcagggataaggggtggagtcctcagagccatccaattagtcataggttccttatacccatttcacaggcatctgcatttgaagccttccttactttgacctgggatgtttcttacagcaggtagaggtttatggcctctggaactgagaagcgcactgggggtgggtagactcctggacacctggaccctccttctggggtccctgaaaactcccaccctagggccttattgctccttcttgtaggtcttcagtgctaatgccacaaggtattcattgcactgaccacagaagaagcctttggcacagatggggctgcagaagcttggagagatggagagatggagggtcttaatcctggctctttttttttttttggagactgaggttctctctgttccccaggctggagtgcagtggcatgatctcggctcacttcaacctctgcctcctgggttcaaatgcctctcctgcctcagcttcccgagtagctgggattacaggtgcacacagcacacccagctaatttttgtatttttatttttattttatttatttatttatttatttatttatttatttatttatttatttattttgagatggagtcttgctttgttgcccaggctggagtgcagtggcgtgatctcggctcactgcaagctccgcctcttgggttcacgccattctcctgcctcagcctcccgagtggctgggactacaggcgcccgccaccacacccggctaattttttgtatttttttagtagagacggggtttcaccgtgttagccaggatggtctcgacctcctgaccttgtgatccgcccgccttggcctcccaaagtgctgggattacaggcatgagccaccgcgcccggcctaatttttgtatttttagtagagatggggtttcaccatgttggccaggctggtcttgaactcctgacctcaggtgatccacctgcctcggcctcccaaagtgttgggattacaggcgtgagccaccgcgcccggccaatcctggctcttaagtaggacactgtactacagccaagaagtagccaggcactggggctggacactcctttttaatcattaaaactagcccagaatttctcagtcctgttgaaaataaggaaagtgaggatcgcaaggtcatttagccaagaccttaaatccttggggctcacaatgccaagggcagaaaggcccagagtttggtggcggggccctcgtcatgggttggagaggatgtctttgctccatgctggcccctcctctatgctacctcaccacagatgcagtcctggctccactgtctttagccagcccttggaggggggcttctgcagaggcttgcatctgaaaaaggactccgccttgcctcctccaggagctgccctcctctaggactctcccctggggaggtggggctgggattctttgagacctgatgccccatcccccaagcctgacttccatggccccatggtgggtagggtatagacagtgttttctctgggaatgctgttaagagaggggaatgcagtgctggaggtgaggtggaggtgggggtgggacagtgttgaagctctcactgccctcctggggtagccctgcttggtagggggatgggatgtgcttaagcgcagccaaggaagcaaaaggcaggtggggccttggggagccctgctggctcttggttgtttgggaccttccccaccctcggtcttttttttttcctttttacttttgagacaaggtctccctctgtcactcaggatggagtgcagtggtgcaatcatggctcactgcagcctcaaactttcaggctcaagtgatcctcccatctcagcttcccgagtagctagaactacaggtgcacaccactatgcctggctaatttttttttttgtctttttttttttttcagtagagacaaggtctcactgtgttgctcaggcttgtctcaaactcctgagctcaggcgatcctcccaccttggcctcccaaagtgtcaggattacaggcatgagctactgcgcctagcctcaccccagtcttgagaactacagggactccccagttgctgtggttgaagtagtaaaacagtagctacctttatgtgccttcctggtcctggaaggcaagaattgtcgtgcccatttcagacatgaagaacctgtctttcgagaatcccacctatctcctgtttgttgtagctgttcaagttgaagtgggatggggagttttggggagttcctagggttggcttatctccttgactccagggggaacttaagccagtctcctgcccttgctctgcttcctccaatctccagtgggaggatgggccacctcccaggcgcaaggctgccatctgcaccaaggatcaggcctgcctgggaggaaacaggtgtcagcggaggctgagaagaaagagcaatttgcatggggcagaaaattcccctgcctcttgggttttccagcccagagcctttgtacctttccacacctaaaaatagtcaaacccattgtacaagtatcgatgcccaaccctgctggggactagctccacgtggccctgggtccaagcccaggagcctccgcaggctctgaggtctgcctgggagacacctccccacctcaagtcctgggctctagaagggccaatgaagtcctccccgcccagaacccttgaactgttgcccagcacaagcttttcctcccacagtaggctggagagcagcctgagaggttttcctagtcctctaagtgacaaggttgagccgtggccggcataaattccaacttatcttggggcagagaggaaaccatcaatgaacgcttccaagttatttggctcatgagagggcagagatgaaagcgaggatttggcggcagagaatgtttgcactaaatctcacggactgctctcttctctttctgtgaatggcttgggcggggcctttatggtctgctgagcctgggccttggataccctggtgaaaggggttctgggagccccatctactcaatcccctggagtatgaagcctatggggtggctgtcaggctggtcatgtggtttgcttagtgtggcaggagtccccagtgggaacacttacggagtgatgtgtgtgctgtggaaagcccctccttggtggctgcagagccatggaactcgtggttcacttgtctcctcatctctaaatgtgggcaatgatggggtgggggacacagtgaatccaacagctatgaaagggctggggttgggtttgggtgggataggcagggatgccctttgatgacctctcaggggctgccctttcccagtgcaccctaagggcgcaagccaaggggcactctacagcaagtgaggtgcctcagggctgaagaaagcacttgaccaggagtcaggaccctggacagggctaaggcctggaggcccagcttcccatctggcccttgcccaatggctggcccttccctcagccagagtgaaaggggagtgagtgcgggcctccgagctgagagctgaaggcatgggccctgggattcttgggaggctgggctaggatttttggtggaagtgcgcaaagcctgaagtctgccctgggagctccttaaggcagtagaaggaaaaggtggagctgcccctgagaactcagcctgctgtcttctgctgcctatggcatcccaacagagctatctatcttttggccctgaagtcctgagcctggcctagggagctagtataataatttacacaatgagtttctggccttgcctggctcactaaatggtgtagccattgttagtgcttaaccctttgtggaacacatctctgagaatctaatggaatttacagagcagagattattgttttaataccaccccaccccaggtattctgacttacatggtctggagtagcaccctaggtacctatacctttttttttttttttttttttttgagatggagttttgcttttgttgcccaggctgtagtgcaatggtacgatctcagctcactgcaacctctgcctcctgggttcaagtgattctcctgcctcagcctctagagtagctgggattacaggcatgtgccaccacgtccagctaatttttgtatttttagtagagacagggtttctccacgttggtcagggtggtctcgaactcccaacctcaggtgatccgcctgcctcggccccccagagtgctgggattacaagcgtgagccaccatgcctggcctttttttttgagatggagtctcacttggttccccaggctggagtgcagtggtgtgatctcagctcattgcaacctccacctcctgggttgaagagattctcttgcctcagcctcccgaatagctgggactaccggcacttgccaccatgccgggctaatttttgtatttttagtagagacggggtttagccatgttggccaggctggtctcaaactcctgacctcaagtgatctgcctgcctcaggaagtgctgggattacaggcatgagccaccgcacctggccagtacctgtactctttttttttttttgagacggagtctcaccctgtcgcccaggttggagtggagtggtgtgatctcggctcactgcaacctccatctcctgggtttaggcaattcccctgcctcagcctcccaagtagctaggattacaggtgcacgccaccatgcctggctaatttttgtatttttagtagagacagggtttcaccatgttggtcaggcttgtcttgacctgccctcgtgatccgcccacctcggcctcccaaagtgctgggattacaggcgtgagccactgtgccccctagtacctgtacttttttaacaagacctgctattgggatccagggttaagaacaactgccataggcccggtgcggtggctcatgcctgtaatcccagcactttgggaggccaaggcaggcagatcactctaggtcaggagttcaagaccagcctggccaacatggtgaaaccctgtctctactaaaaaaaattttaaaaattagctggtcatggtgatgcacacctgtaatcccagctactcaggaggttgaggcaggaggatcacttgagcccaggaggcggaggttgcagtgagccgagattgcaccactgcactccagcctgagctacaaagcaagactctgtctcaaaaacaaaaaaaagcaaaaaaagcaaaaagacaactgccatagacttttcccttccctttgcctaaaacaggagttcctggcttggttgttccctggaagcttctttgagtatttttgagggggtggggagtggaagctgtggctaggttgaaggagagggagggaggctctccagcctggttcaaagatctaagcaacgtcagggagtgtgggtgggggcagtccaccactccatgtccttcccacaggggctggggaattaacaaatttttgccccaccccggacttgccggaggtgtgaaggacagttctgggagagacctggaggccagccgcatgttttggagggctactgtttgaggtagtgtcctcctctggcctgggcagagacacaggcggaagggcaggccaagcggtgggggtttccccaagcaggctgtcttgaggtagaaagctgcattttcaggaagtcagagtccccagaagtcagccagtgggcagaggcctgggtctctggaccgggagctgctgatgctgatcaaaatcagcaagtgcttaagagtacctagtgggcctagctcagtgctggggacagaaagcacaggccctgtccctggggagcttgtcctttgtcagcaggatgcaggtgctacacaggaaggtgtctgttatgggaggtgcagcctggctttgccaaaacacccaggctttgcccgaggacatctgtgaccccaggcgagtgagcctcagagcccttatcatagagttctgccctgggtcctcccagggagttgatgatctgtagatgtgactccttcccgagactcatggagccctggggggtgaagggaaccccagaggtgagtggggcaggaggtggggagtgtcgggtaaagcaggccaccctgagctggaagcctggatggtgggagtggggattcagctgtcagctcctctataggctgtggtgacaaattagtacatccctagttgcatgtaccactgaggcccttcaccaatgtgtagcacttagtccctggggaaggggcctgagagaagcctctgctgccagcaagagggtgtcccccagacccagtgtccttgaaagtccctctatatggagtgccaccccccactcccccaaaaaacacagcgagtggagatgcagcttcttagctcaacccatgcttttaaaaatggaatcctccttctaccctgggtgaagggtaaagacaggggtggccagattgtgttggggctccaaaccacaggataaataagatgccttctgaggagcagaggtgttatccagatgtttgaaatgccattttatagtagaacaatgaaggcgtatggtacagtaaaatgcaaaatgcccataatttgatagataaaacaggagaatccaaaaaaaggttttgtgcttgcccttgtggttttgagccaagtttccagcccaccagcagttcctttgctaccctgtgaggcaggcgggttggggcgagcccttccgctaggctaagtgcctgctttctgagactcacactgcctttctctggggtggggggcaggatccacttctatagttggaaacgttgctgctccgccagctggaagggcctcctggcctctgggacttgtcttgcaaaagaaatgtgtgtaataaattctctttaagagcaggaagtgctgttatcctcatgaaaataaaagaaagagacgttgagtggggtttttttttttttaagtgtcttacgaacttagcctagtggtagcttgcaacacaactgggcagggggtagctattctcatagcccttctttcgtgttttatactgaattttaactgcataagtttgctcttggctgggaaactctttatcaggttccggcccagaaaagattttttaaaagaagagccctctgtgtcttgcaagcagtattgctgtggttaaaggacagtggggacctcacacaagtggtttcacctttctgaatctcagtctccacatctgtaaaatgggggtaatatgaattaggagccacgatatatgtaaaactttaacataatacctgacatgccttaacagggcaattacctttctctgttagctgtcatttctaatgagatgaggtgctcagaaaacaattgtgatgaggttggctctttaagtacagaccttcaaactttccttgaggggtgaggaagaaggcaccacttccagctctacgttgggacttttggtgtagacagatgtccaggagagattgtcctggccaaagccattttaattggctttgggacagtgaccaagaccagtttctcagtttcacctggaagaatcctgccagcctcctgcctcttctctccctgctaagacagggcaggaaagtttagtcatacttcatacaaatcctgggattcattcattcattcattcactgactctttacacaagcatttcgttttttgtttttttgtttgtttgtttgtttgtttgtttgttttgagacagggtctccctctgtcacccaggctggagtgcagtggcatgatctcagctcactgcagcctctacctcctgggctcaggcagtcctcccgcttgagccccccaggtagttgggactacaggcaagccaccataactggctaatttttgttccacaagcatttcttgagtacctgctgtgtgtcaaacactgtgccaaaagcaggcacagtgataaacaggacatatgcagtccctgtcttcttgcagcttgactattagaagagatggacattaaaaatataattgcacaaataggctgggcgtggtggctcacacctgtaatcccagcactttgggaggctgaggtgggtggatcacttgaggtcaggagttcgataccagcctggccaagatggtgaaatcctgtctctactaaaaacataaaaattagctgggcgcggtggccggtgcctgtaatcccagctactcaggaggctgaggcaggagaatcgctggaacctgggaggcggaggttgcagtgagccgagatcacaccactgcactccagcctgggtgacagaacgagacaccgtctcaaaaaaaaaaaaatgtgtatatataattacacaagtaattatattttgtagtgtggtaactgctggagcttttctcttaagtaactaaatttcctcttggtgcctcttagtttgaaatactctgtgatacagtagttcaccccttgagaaaaggaagcagagaaccaaagtcccaggatgaagtgttcaaatcttagctacaaatcttgagattgtatattaaaccttgtagcctggtgtctactggccatgtggttagtgcacagtgaaagttgccttttgtcactatctttatttgctcttggaggtcactcatgctctgctttcttgcagagttcttcctagggaaataggtacagaaagctagacttttgaatggttgtgatctgcagtctcagaaaaagacgtgaaggcaaggccatgtgatgtgtttctggagaagcgtccctacatctgggcagagcagactctttagccccctccagggctgcattggcacccctagcactcagattggtgattcaattagagtttgaagcctttaaacatttcttcatactgtttgaagaagctacaattaacatctcctaagcagctcagcagaacttggttgctaggcagcagacctttaaagacaatttgtcaatttctgccaaaagagagaaaaatagtaaacattcacattctaagaaaattgcttgttttccagcttccaactttcttgccacagcaaggcttctcgttcatcagtgtccattttattctttatttagttttcataaatcattcaaaggagttttaggagaacatttaagccttttccaagcctgcctcctggaaattcaacacaaaatgatgtttaggttacaattggctgccatatttgtgggcagtttttatataaatgcacagaggctcttttggaaggcatggagtacccagctgtagtcttggacagcaaccaaagaaggaggtggctggcccatggaaggatcttgagtcattcaagatttctcagcacctagcatgtgccagaccctgcttgcactgctgggctccagccctgcggctcagccagacctcattgagctccccttctagtggggaagacatggcaaaaaaccaggagattctaacacaggggccgtagaacttcagacaaagcccaaaacccagcctaggattggggaaggcttcctagagcagatgtgggctggactgagaccttaaggatgaagtgtgccagctttactctggcaagggagtagtgtcccaggcagcgttctcccgtgtgcaaagggttaaatgtgcttgggagactgcaagtgcatccgtgtggtcacagggcctcattggctctgcagttcagtgtgggcacagtgggaggacagtggagagcgactggaggcctcggaacttgcaaagaccacagtcggatttgcatatttcaacccttggagaagtcacctgatttggcatcaagttaactcaagggcattaggcagtgagcacatggccaaaaggggcaggagttgtgttggcctgggttcatttgccacttccagcacgcacaccttgggtgggtgatttaattaacccgagtcccaggtttctcaactgtaaaatagggatgatggtagtacttacctcacagagtgggtggaggggctaataatagattaattcaggaacagcgtttacactgtcactctgcacacagtctctgcaagcatgggctgacaccattaagacagtgctgccctccctgtgcgtccatgattcctgcctgctagagcccgtagtgtccagtctgccacctgctccctgcatgacccaggatgaaacgtggaactctcttggaacgagactcttttgtcttcccacaatctccctaactgtagtgggaagggactctgaagttgaccctgggagcccttcctgccctgagttctcagtgccaggcctggttctgggtctggaccacatcttaccagctggtgtggtgggacactctggtctcacccactccagcctgggctgaatgctggtccttgagcttaaagcccagcagaacaaaggctgcctgttgctcagaggcgcttgttcaggtccatgtgtttggggattttggccactgggtatatccatgaggtatctcatcctgcttatgggggttcagaaagcactgccaggagccagctaggggcctcagattcatcagaaaattccccagagaggccctcgtatgcagtgccaggcactgagaatatagccgacagcaggacaaggcatggcaggggagatgacaagaaaccagcaatgtgagtcgaccaggtacttttcaggagtgtaagtgctggaaagaaaatgaggcaggggtgagatggaaagtggctcagtcaggcagttggcactccctcagttggtgatcaggaaggaatccctgaggaggcgacagttaagttacagcccagggccgggtgcggtggctcacgcctgtaatcccaacactttagaaggctgaggcaggcagatcatttgaggtcaagagttcaagaccaacctggccaacatggtgaaaccctgtctttattaaaaatataaaaactaggccaggtgcgggtggcttacacctgtgatcccagcactttgggaggccaaggtgggtggatcacttgaggtcaggagttcgagaccagcctggccaacatggtgaaaccccgtattaaaaatacaaaaattagccaggcaaggtggcgggcacctgtaattccagctacttgggaggctgaggcagaagaatcgtttgaacccaggaggcagaggctgcagtgaaccgagattgtgcacctgcactccagcctgggcaacagagcaaggctctgtctcaaaacaaaaaaaaaaagttacagcccaggatgagagaacagcaaaaggtttctaacccacctatgcctctttagagggcacatagtgacactgggctattgtagggttgatttctggggcagaatgatgcactgtcccaagtgtgtggttctccatggcttcagagcaacagggcttgggatgatgcagcacttggcttgcttgggtggggagaacgttgaggtagttatgaatcactttggggtcagttcttccttgccaggtcctgtgctggggcccacagggaaataacccagccccagccctactgagctcaggagagtctccagaggccttcgctggcacaggcccctactgaagggccccctaaaagcacgcagtgcctgagtgtgcccttttgcattaactgtcttactacttgctaataagatatgcaaattatctgggctgtgaaatcttagccacattccatcttctgtttaattagcatttaattgtaatctggttttaattttttcacactggcaccctaattaaatgttagggtgttagtcctaacaattaaattatattggcaagtaaagtcttcaagaaacttgacctttttcaagccagggctgtctccatctagatgcagacgttaattagattctgcaagatgctgcttccaggcccctcagtccatccattccagtgttctccttgtggttttggacctagattcaaatgaggtgcacatagcaggcagaggttactgctgaatctgtctgtcatgagccttcagaaggctgagtgaactgacttagcaccgggcacagcggtggatgctgacttttccagggaggaatgtggggttggagtttggtctcaggcctggagtactccttgaagtggtttctcttgtctcagtgatgtgagttcttctttaacttgtgattctcaaatgacggtgatcactgggaaagttggtacctgagcaagtcacatggtgtctagaggtgccaccacattccacaatagcgctttgtggggggatcacgcagtgggatcaggtgactggggcaggaggcgttgccagtgccagcccaggcagagtttagagcttgttctgaggtggaactgggggtggaggtgggagcagcagacaaaactctggcaagagcaatttgccccaagtgagcaagtgctcagggtgtgaccactcatggctttgctctgaggggtttggatgtgcttgattaagaacaaagacaaccctctccttcctgccttcctacccccccttccccaacacacacaaagccggtcgagttaggagagtgtccttgttcttgagggaccttggaagtcccagctcatgtgaagccactatctaggctgccctaagccccggccgtcccccagctgtttgcataaggtttgcataaggcctttcctggggttggcgccctgtgctgttttatacctccacttgtgtctgggggtgcagatagataacatgattgtgaacctcagtggaaatgtcttgaacagtcacgtaatggcagtattttttattttattttattttatttattttgttttgatcttttgagacagggactcactgtcactcaggctggagtgcagtggtgcaatcatggctcactgcagggttaacctcctgggctcaagcaatccttccacctcaacctccagagtagctgggaccccaggcatgtgcgaccacacccagctactttttaaattttttgtaaaaatgaggtttcaccatgttgcccagacttgtctcaaaatcctggattcaagcagtcctccctcctcagcctcccacagtgctgggattacaggtgtgagccaccttgcctggcccttttttttttttttaattttttaatttttagtagaggctggatcttcctgtgttgcccaggctgtcttgaactcctggcctcaagcagtcatcccacctcagcctcccaaagtgttgggattacaggcatgagccaccatgcccggccatcagtattgctttcacattagcctctctgtcctctgaggttttcctctttttattttgatttttgcctttctctgccagtctttctttctctcataggtccactcccaactatccctcaaactctgtcctttaataggtcagagcagtgtgaattcagttaatcacatttatggaacgtctactatgtgcaaaacatgtgcagagttcagagctatgttatttattgtgctgattgcttttatttcgtcttatttctaagtgcgcaggcagaatgtccacttgagttgcatgtatctgcctcttcctctggcctgtggggcagactgccctgaggcagtctgaagtcactctttcccctcttgcccctcacaggttttccggacagacttgatcacagccatgaagatcccggactcataccagctcagcccggatgactactacatcctggcagacccatggcgacaggaatgggagaaaggtgtgcaggtgcctgccggggcagaggccatcccagagcccgtggtgaggtgagccaggcagcccaggctagggggccattgggacaggggaggaaggggaggctgctttccaggttaggtgacctgccagtcctggaattcctttctagtccatctctattctgtattccattcccttttccaacaaaccattgaaatgttccagaaatactggtggtttaactgagaggctagggggttgggctcgggcttggctatagagccagaatgcttgcgttcctgttgacactcatattcagtgtggccttagaccagaaatgtaatctctctgggcctcagtttccttatctatgaaattggaatgctaacaataactaacctactcatgcagttgtaatgttgagataatggaatgaaatgacgcatggaaggcacttggcaccaggcctggcagacagcaagcactctgtaatgttgatccaaactgggcccaacagcagttcttttttctttctttttttatttgttagaaatagggtcttactctgtcccccaggctggagtgcagtggtgcagtcttggcccactgaagccttgacctcccaggttcaagcagtcctcccacctcagcctcccaagtagctaggactacaggctcatgccaccacgcctagctaatcttcatgttttgtgtagagatggggatttgccatgttgcccgggctgatcttgaactcctgggctcaagcgatctgtccaccgccttggctggcctccgaaagtgctgggattgcaggtagccagccgtaagcctctgggcctggccttttttttttttttttttttttttctgacaaggtctcactctgttacccaggctggagtgcagtggtgcaatctcagctcactgcagcctcgacctcccagcctcaagtgatcctcccaccatgggcacatgccaccacacatggctaatttttttgattgttcgtagagacaaggtcttgctatgttgctcaggctagtctctaactcctgggctcaagcaaccctcctgcctcagcctcccaaaatgctgggattacaggcatgagccaccatgcccagtcccaaagcagttctgatgagggaaatctccagacttttcactagtctttaagagagagatatggcatgcttttttttttcttttattcttttcttttttttttgagacggagtctcgctctttcgccaggctggagtagagtggtgcgatcttggctcactgcaacctccgcctcccgggttcatgcgattctcctgcctcagcctcccgaatagctgggatgacaggtgcgtgccaccacgcctggctaatttttgtatttttagtagaggtggggtttcaccatgttagccaggctggtctcgatctcctgacctcatgatccgccctcctcggcctcccaaagtgctgggattgcaggcgtgagccactgcgcccggccgtaagccatgcttttgacatcttgaaccttttacgggagttcttagagggggagtcaagtgcctggcatacagcagatgttcaggaagccattgctattaccggcctctgggtaggttcccctgccagggctggttcagagatgagtcctctgggctttatactcttctggtctcatgaggcagagagacccctggccgctcttgtcaggaggaggccacatggccctgggtcttgcctccagctacggagttcagccaagtgcttctttatgcaacctgggaaaccctccaagtcatgtctcagggcagaggggtcttgtgtcctggcctcccccacccaccagtctgcctggtctgggcagcttggggttttggctgtctactcctggccttggcaaccttgtggctcttgctcgatcccatgtagaccaggcctggggcaaagatcacagctgttacctcccctgacgttggcaccctcatttcgtggcagctgcatctgattggatcataggcacagcagactcgaagccccaatagggtgatctgtggggattggaaggggaggggtcaggcaatcctgttccagtgactcctgatggctgagtgtttattaatacttgtctggggtcttcggagaatcaggggtgccccaggcctctccagaagtgagaatatgcatgccaggtcactgccacacataccagtgcctagggtgaaggggtgaaggtcaggccaccaggtgggcacagcgaggtcagtcttgattaggcttggcccagcggtctgtcctctctacttgatgtcagtgtcatttggttccggaaacatctcctggcctgggtaattaattgcagatgtttccacaccagtagcttggcttcagtctgcctgtagggtgctttatctgttgacatcaagaggagggcacgtgttccggctgctttgactttacgaggtgcattcccagcataggcatggctgtgctaagctgacgtgagctgggcactcctggcctgtccgtgatctttggagaggatggactgggggtggggaagtgctcccttagagacatctccacgcctcttctgttgctatctccctccggcccagccactgcatcctcctggcacctcccactgcacagccctcatctggaaggctgcctggtagctgcccgggtcagaattgttagagaaaccctgttcttgaggacttgctatgctgagcctgtgttcatcttttcatttaacaatcatattagctttacaaactgcatgtaactgtccccattttatagatgaggaagtcgggaaattctggggaattccctgcatggccaccggggcctagtgggctgggccaggaaatcaaaggccccgagaacaagccctgggctgcccctgtgaggcccagagacagagccctgtgcccccgtcatcccagcatgctggttctggctgccctcccccagctgccaccccaggccccctctgtccctccctccctggcctttgggtgggtctgcccacctcatggtctgaaatctgtctgaacaatgagcacttgtctcgcccctctccagactgaattgagtgagggcctgtcctgcccctcactggggccagaagtctcagccagggcagaacccacctctggtgtgtgtctggtcttctagggtaaagaccccctcccctcccatagatcccagccagctgacgccctcctcccagctgacctccgccgtcctggctacagctgagggtgaggccttggcctagggtcaggtcagtccatgcctggtaggagagcttccttcagagccagagccagaagggggcaaacagatgaagaggagagacccaggaaggacagcagataccttctgattgtgagtcccttcaccttggctcttcagaaggagcacagtgatcttgattccaagaggcttggccaggtggccgctgaccaggcaagcagatgtgggtagttatgccaggaagtggtgggcatccggacacccccactcagcatgtgcttagggcacaatcaaagctggttcacaaccaaattacaggctgcatttttaaaagaatgtgtttgttaagtaacagtttcatggggaaaggcagaattgtgttggaccgagtgtgttagtattgcttccatatggaatcacctgttagtgtggggtgtggtcataccctgataatgacctagaaccttccttcatgtgggcctcttgtgtgggaaaaggtggtgccaagccccttccccttctccgtgccccctcgaccttatataggccttcctcctggctcggaggccattctctctgccgggttgggcccctgcctccccgtctccttcatccttcctgccctttttgctgacattgggtgtggtgatggggaagcccaggagccctcgccacagctctgccatgtctctgtgccatctaaagccctgccccttcctccctgtcagcgctgagtcacagcttctggcagccttgcccccgaccccaggatgcctctcaagtaaggggcctccccgccctggcagagctggccagatggaggccaggctccgaagcaataaccatggcaaccagcggggggtgggaagagctggctttttgaactggcatcaggaactgaggggcagcacacagctgagccaaggggaaaccgtgccctcctgaggcaaagtgccccctatattccatttcaggagaggggtaacatcccaaggtctcaacacacacacacacatcacacaacacacacacacaccacacacacacctcacactcacacaaaacacaccccacacataccacatgcacacacacacacatcacacaacacatacacacacaccacacacacacctcacacatcacacaaaacacaccccacacataccacatgcacacacacacacatcacacaacacatacacacacaccacacacacacctcacacatcacacaaaacacaccccacacataccacatgcacacacacacacatcacacaacacatacacaccacacacacacctcacacatcacacaaaacacaccccacacataccacatgcacacgcacgcacaccacacacacacctcacacatcacacaaaacacactccacacataccacatgcacacacacacatcacacagcacatacacgcacacaccacacacacctcacacatcacacaaaacacaccccacacataccacatgcacacacacacatcacacagcacacaacacatacacacacaccacacacacacctcacacatcacacaaaacacaccccacacataccacatgcacacacacacatcacacagcacatacacacacaccacacacacacctcacacatcacataaaacacacacacaccacacaaacacacacacacacacagtgattactgtgtgtcaggcattttcctaagagttttgcaaacttaatccatttaatcctctcaccaaccacataaagtaggtattattattgttgttattatgatgatgatgatgattattattattttttttgttgttgttgttttcaagcttttatttttttatttttttattattttttttttttcagacagaacccatgctctttattagattatgttgcctatgtttaaaagtgttcaaattcagtcttttacattgaaaataacttttttttttttttttttaattatactctaagttttagggtacatgtgcacattgtgcaggttagttacatatgtatacatgtgccatgctggcgcgctgcacccactaatgtgtcatctagcattaggtatatctcccaatgctatccctcccccctcccccgaacccaccacagtccccagagtgtgatattccccttcctgtgtccatgtgatctcattgttcaattcccacctatgagtgagaatatgcggtgtttggttttttgttcttgcgatagtttactgagaatgatggtttccaatttcatctatgtccctacaaaggatatgaactcatcattttttatggctgcatagtattccatggtgtatatgtgccacattttcttaatccagtctatcattgttggacatttgggttggttccaagtctttgctattgtgaatagtgccgcaataaacatacgtgtgcatgtgtctttatagcagcatgatttatagtcctttgggtatatacccagtaatgggatggctgggtcaaatggtatttctagttctagatccctgaggaatcgccacactgacttccacaatggttgaactagtttacagtcccaccaacagtgtaaaagtgttcctatttctccacatcctctccagcacctgttgtttcctgactttttaatgattgccattctaactggtgtgagatgatatctcatagtggttttgatttgcatttctctgatggccagtgatgatgagcatttcttcatgtgttttttggctgcataaatgtcttcttttgagaagtgtctgttcatgtccttcgcccactttttgatggggttgtttgtttttttcttgtaaatttggttgagttcattgtagattctggatattagccctttgtcagatgagtaggttgcgaaaattttctcccatgttgtaggttgcctgttcactctcatggtagtttcttttgctgtgcagaagctctttagtttaattagatcccatttgtcaattttggcttttgttgccattgcttttggtgttttggacatgaagtccttgcccacgcctatgtcctgaatggtaatgcctaggttttcttctagggtttttatggttttaggtctaacgtttaaatctttaatccagatgatgatgattattgagacggagcttcgctcttgttgcccaggctggagtgcagtggcacgatctctgctcaccacagcctccgcctcccgggttcaagcaattcttctgcctcagcctcctaagtagctgggattacaggcatacaccaccacgcctgggtaattttgtatttttagtagagatggggtttcctcatgttggtcaggctggtctcgaactcctcatcacaggtgattcacccgccttggactcccaaaatgctgggattacaggcatgagccaccacgcccagcctggtactattattattaacccattttgggggatgggaacactggggcccagagaagtttagtggcttccccagagtcacacaataagtggtgaagctgggctttgagtccacaccctgcgggcaggcctctccaagctgcctcagcggcagagctgtggccacaaaggaaggctgagctggggagggatcctgggactgcagcaggcacatctttgtatccaagggatttggcctctgtcttggtcctggggccgggtaacactgtgtagcaggacactcactgctcacatgacattgtatctgggagaagggcagggtggcatgtggaccttttgtctggaaagggtcaccctgggccgcagccgtgtaaccaggtagggctcctcctgacaccagaggagacgtggcctcagttctactcaagtcaatggagttttcaggctgttggtaagaagggggcttgggcttctgagagtacgtagacaacccctgccttgtccgcagccttgaagggtatgccgaaggacctagaatccagctggcactacctcacttgttgctggcacagggcattgcccatgatggcacataggatacctcttacaggccctagcagtgttagatccaaactgctgggctttagctaaggccccgctaccctgatggcaggaagtgggatgagctctgggcaggtggatgtttatagggtaagcaaggctgcggatcagccctgactcccatcccccactgtgccctactgccctttgggtcttctgtgtactgcctgttcacccacagtcatctgagtctctgcagggtgggcagatggtggaggaggaagtgaaggagggggtggaaggaggtgggccctgtgtggtgtcaaagcacacttgtccatcagctcctgagctggactggtcagctccctggagcccctatggcggcaggctgagggcccctcccttcatgacatcctgtcttgattttctaggatcctcccaccactggaaggcccccctgcccaggcatccccgagcagcaccatgcttggtgagggctcccagcctgattggccagggggcagccgctatgacttggacgagattgatgcctactggctggagctcatcaactcggagcttaaggagatgggtaggtgaccactgcattaagaatgggatcacggctgggcagggagggttttctccccatcccgagagggacagtggcccaggcagggctatggtatggcatggatctggagggagtctccatactgcattactgaatggggacctcactggttagtgtctctgtgccacctgaagtttctgcagctatcaggtgggggcaataatagcacatcagttacagggctcttgggactatagtggtaagcatgaatgttacatgaagagttagtgagcatgcaggggaggctaggatggcacatggggctagggtcaggatggcaaatggggctggggtcaggaggtgtgggccacctggctggagcccaataatgtgtcccaggaagggttaactcgaccctattcagccacactcagaggtcccctcatacacacagcacaagcagtgccttctccgtggagctggccgcatcccagagacacttccatgttaattgtacacatgtgtccctgtggtcacaggcaggctgtctaaagtcagaactccaggacaggtcaggggcctttgagatgggatggtccagaccattcagttttcagaggatggagctgcttctcccaggtccaacagtgggtgggcagaaaccctcccagacatctgccctgaattcctgcaactccaggagccaagtcctcttcaaagctcaaaggaggctgggctcctaacaccaccatgccctgctgtcctcctcacagagaggccggagctggacgagctgacattagagcgtgtgctggaggagctggagaccctgtgccaccagaatatggccagggccattgagacgcaggaggggctgggcatcgagtacgacgaggatgttgtctgcgacgtgtgtcgctctcctgagggcgaggatggcaacgagatggtcttctgtgacaagtgcaacgtctgtgtgcatcaggtgggcagaccccccagtcaccctcacctgtgccatgtatacacacgctgcctggcagcgacccccacttggctctccaggggcactgtggacagaggcccttaagaaggaggaggaagggaatggtgaggatgcttcatggtaccatgtgcacccagggccccttggcttagacttgctggccagactcaagccagagcccattggctttctgcactgtcccatcagcctccctcagaccctctccaccttgtgccctgtccctgcccctcctcctctgctcctcatgtcctgaatttactaaaaggcagcccactgctgtgactgagagcaaagctgccagatttcaaatcgtggctctgcccttcacaagctatgtaactttaggcaagttttgtaacctctctgggcctgtgttttctcagttatgcataaataagagtggattgttgcacagattaaattgtttactgtgggtctttgcttagaacagtctagtaagggctatatgtatttgtcaccattactggctttatgtgccagtgcagcctggccaggctccccttggtttggggcccaaggctctaggtcttgagtatctctgggccttgactgcagacctgactgggacctagtggacccactctggccctgattttgaggctgcccttatgcaccatcgctggaattgaccctggggagctcagaggtagggactttgccaggctggcaggtaggtgggcagtgcaagtctcatataaacaaacacatcccttatacccagcagctcttaggttcatgtgtctcacccaagccatagaggggtgcaaccttcttcatgggtccctgtgtaagaaatatgagggctctgggacttgtttccaggaagtacacacccaattttgtattcaacttaaagggattcttggactctccttaagtctattgctggttaggaacctccggctaaactgactctcctcccagcagagggcagacctgaacccgttcacagaggactgaaatggtggcatttcaggcatacaagcaggccaaggagggctttccaggagcccttccttccttccttgcattgtaactcctcagaagttgtacgtgccagagatgggaggctgtgtagcagtgtagcatggggctggcactggaccaaatgcagctgattgctgaccagacacagattggccagttccgctgactcatgaccaccctgctctctcctaggcatgctacgggatcctcaaggtgcccacgggcagctggctgtgccggacgtgtgccctgggtgtccagccaaagtgcctgctctgccccaagcgaggaggagccttgaagcccactagaagtgggaccaagtgggtgcatgtcagctgtgccctatggattcctgaggtgggtgagcgtggaggtgaggcagcccaaggaatagcccgtggggaagtgggtctgcatgggactcaggtagcagagcactgggaaaagaaggtgatggactcgcactaaaacactgagatcggccgggcgcggtggctcacgcctgtaatcccagcattttgggaggccgaggtgggtggatcacctgagttcaggcattcaagaccagcctggccaacatagcaaaaccccctctctacaaaaattaggagtgcatggtggcaggcacctgtagtcccagctactcaggaggcagaggcaggagaatcacttgaacctgggagttggaggttgcagtgaaccgagatcgcaccactgcactccagcctgggtgacagagcaagactccgtctgaaaaacaaaacaaaacaaagcacacactgggatctcaggtgatgggccagcaaagaatccaggccgcagctataggaagctttgcttgtggacttggacagagctcaggtggtgacttctatgagaaaatggggttagggaccgctaggagatttcaggagatagggatgaggtctggacagaagtcaggcagctgactagaggggaaagcaggttgtggggtccatctaaaccttagcagttgttccaaccaaagtcaagccacatgttcaaaacaaagataagccagctgaccttcaaagagaatcgggtgggaggccgaggtgggtgaatcacttgaggtgaggagttcaagaccagcctggccaacatggtaaccccgtctctactaaaaatacaaaaaaaaaattagctgggcttagcacatgcctgtaatcccagttatttgggtggctgaggcacgagaatcacttgaacccgagagacagagattgcagtgagccgagatcgcgccactgcactcctgcctgggtaacagaatgagactgtttaaaaaaaaaaaaaaagagaatcaggtggtaagcctaatgggaagttggctagtgggcctgctgctatggctgcggctaggatggtggggtgggtgtgtttctgagtccatgtgggagtgccacgggcaacaggctgggtccagagtcagtgagttagcagaggtcctgggtgcctggaaggccagccattttatttgaaatgtgaaatgttgaaatgcaccagagtttcagccccagccctgctgtgtggactgactcagattgaggccccactccagtgttgcctttgcccagaagcaagccaggtggccctgtccataagtggcactctccttcctgggctcacagtctgaagcccacaatgcgggcttctgtgataacagttgtttgtgtcagcagtaggcacttgcttgcagatcagcatgttgaagactgggaccacctctgagtgtaccctgggctgggcatggcagagacagaaccaacagggactccatcatgaagaccctttggctcaggacctttggagagaattgctttttccatcctcaggcattagcaatggggagacaaatgtgccctgcctctgggctgtggggtggtctctgcccagtagacttgggcatagttgtagggctgtccccataggaagggctcagcaaaggcatatccccaggagagccctaaagaccttcaagaggagatcccacaatgaggcttttcttggtgcctagaaaaataagtaatacaaatacaaattgtaacaagaactctgaagatgttattaacaaaggcctgagtgcagaaagaaggaggatcttgcatgtacctatgcgcacaccaaagcacctgtctgtcaaggcccacgcagtcttaagcacatacacacagtcaactacacacactgacggcacactcacacattcacagacaatttaagattagtctcagatgagcacacactaacacactcatccagtggtgagcttgggagagtgaggaggaattccggcctttgagccatgcttgtttggtgtcaggagggacttgggattcaggggctcagccactgccctgtctgcccaccacctagtttcagcagacaaccccccattttggagatccctggaggcaggctggggatgagaggaatgatgcagccccctgtgtcctgcccaggtcagcatcggctgcccagagaagatggagcccatcaccaagatctcgcatatcccagccagccgctgggctctgtcctgcagcctctgcaaggaatgcacaggcacctgcatccaggtatgtggcctacttcacctcctgctgccaggagctggctgagaggcatgcttggggcctcagacagcagctgccaccaccttctcccctccatggggctgcagactgatgggccccagaggggtgtgggactggggccagagtcagaatcgcacctgttggggagcatttctccatcccctggtcttctagggagtaggaacagacccggggaaccaaggctcaccaccccattggagtgctgagaactctggctttccctgaaagcaagtgtcttggggcttgatgaatacattagcctcacttctgacattgaatttgacgcgttaggggttaggaatcaaacttctcatctagctaagctaatagactgtcctgacactggaagggctgtaccagtctgtctttagcaaagcctattcccaaagtctagcatgcgtcagaattacctggagggcttggtaaacatagactgctgggcctactcctgagaggctctgactcagtaggtctggagtgaagctgagaacttgcatttctaacaagctcccaagggatgttgatgcctcaggtctatagtttgggagtgcaggtgggagtcatcctttgtccccctcatcttttaggaacagagttgtcattgtaaacgttagttgtgccttcacccatccacggaccttcaaaaggatttgtgagtgcagcatcagcagtcataatagttgggtgcgtgattgctgacacagttatcatcatccaaggctaagagagagggtcaggcctcaagctgtctggatgaaaggagagggaaggggactaagtccagcccctcttcccagaggacaaaaaggggaccacagtccccatcttagatgagccagtgacccatcatcagcctttctcttgatgctctgtgatgccaaagtcattttgcccacacaaaaatgcagcttgaggccgggcacggtggctcacgcctgtaatcccagcactttgggaggccgaggcaggtggatcacctgaggtcaggagttcgagaccagcctggccaacatggcgaaacctcatctctaaaaatacaaaaactaggtggtgcatgcctgtagccctagctacttgggaggctgaggcaggagaatcgcttgaacctgggaagcggaggttgcggtgagatggaaccactgcactccagcctagcaacagagtgagactctgtctcaaaaaaaaaaaaaatgcagcttgtccccagaggtgtttctcaaccgtcttctgattgacttccccaaagcatgtggtgttgaatgggttacctttccaggcaccccagagctcctcctcctcccctgccgtaactcccatcctgcacaggaggttgggagcccatgccattctgtttaggttctctccagcattgcgcattctcagtagagccctgggggaagcccctctgtcttctcccctcccaccaggctccctccatgtctgatcctgcccctcctttcccctcagtgttccatgccttcctgcgtcacagcgttccatgtcacatgcgcctttgaccacggcctggaaatgcggactatattagcagacaacgatgaggtcaagttcaagtcattctgccaggagcacagtgacgggggcccacgtaatgagcccacatctgagcccacggaacccagccaggctggcgaggacctggaaaaggtgaccctgcgcaagcagcggctgcagcagctagaggaggacttctacgagctggtggagccggctgaggtggctgagcggctggacctggctgaggcactggtcgacttcatctaccagtactggaagctgaagaggaaagccaatgccaaccagccgctgctgacccccaagaccgacgaggtggacaacctggcccagcaggagcaggacgtcctctaccgccgcctgaagctcttcacccatctgcggcaggacctagagagggtgagtccccatgccgcctgcccaccccctgcctggtgggtccaggagtcctttccatgccacactcactgccctggagcagctaggactcaccaggactcaaactgtgagctctggtggaccggccctgctgcaggagcctgccaaggggctgagggctttcaggtcccaaagagtatgggggtgactgacactttacagaacagagaagagtccagttcttgagtctccgagtccctcttgtcctagccctgtcacaggcctggtgaatggtgggggccctgccaaggtcatgaggctgagagcaccagagctagggcgaggacctaggcttctggcacttgcttgcctctgtgggccccgcctggtcctaacacatgagcttgcattgagaatctgaggcagaggaggaactggagcttcccaagctgtccccgtaacccatgctgaaagccaggggcatcaagagccaggagcagccaaacaggcacgtgccgggccagggcagggtagatgggtaaacgcggctccgtggggtgctgggcaaacagaacagaggcacgaaggagacagggtggactcaaggaacggtggagtggaaggaagaggtgaaaggggctggtggatcgcacgagactgggctggtggatcacagtgtgtctggaagctgcagaagtgctaaggagggactgacatactgtggctgggacttgcacccaacactccctggaggagaagtcccagagtctggaatgggtgggctggctgaaaaccacccccagctgtgtgctgggaaacaggtgacggtggcttggtccagggggctgagtgaaatgaagcaggatttctggatccttttccagtcctctgaaccccacaggctgttctggtctctcctctctgggacatttctagggttccagagcatatgggaccgtgtcacagtgtctcccctgggttcagacatacatgctcaccctctccctgggtcctgtcaggaaatagccctgggcaggagcatgcagggaacgttgtgtgacccaaggcgcctgcttttcttatctgcatcgcagtgggcaaggctgtaaaatgggtagaacatctccaagggtgttgtactgtcagggaaggggcactggacccagcttccccaatcccctccttcccactcatctgcgctgcctgctcaagagggaaatgacctattgcccccagagagccctcactgcctggcagccagcttgccaccaggccagaaggaagaggtggaggtgggaggaaccagatgtccctggctccagccaggacagagggcaaggctacctacattgcagccaccacctcctggccagcccagcctcctgtcacatgtggcaggggcatcaggtgtaagaccttctgggaccgaagctgcttccagagtcttctttaggccaccatgtctccacccgctggatctccagtggaaacacctgcttttactcctactgtttcccaaacaacccctcagaactgacctctctgttctgtgctggtcagcccacgtgtctgtccctggctgggttgtccagggaggtcaagggcttgactcacttatgtagtcatcatcctggaaaaagagacttgaggaagatcctcccagccctgctgagcagatgaggaaactggggctcggagagacgaataacaggaagtcttagaggaactccattccaagggttttgagcttgaatttggacctcagtcgggggcagaaaaggagttgttggcttattctctattctgtaaatttcctgggcaaaagcatccctttttcagtcccctaatcttcccaccccagtgttggctggttcaggtggagcctggggctgaggttggcgggctctggggttccggggaatgagagctgctgcagagactcctgcagtgggagccagaacactccagagtcaggtgtgaaccgtcccactcctcctctgggaagaggaagcagggccaattttgaagtatgtgcagcctcttacggctcagggggccctgtcaaatgctgctttctgagcagccaccaagctgggctggcgggcaccagcttcaatgagggcaggggcatgcacagccctggcagggccgaggagggacaaccatgagccaagctgacccccatcagcggcccagcctcaaggcctttccaggtcacacatttgcaacttgggtgaatgaacagcgacaagaaccctgccacggggcaggctttctgcaaaggcccatggtggttggtggcctggccagcgggcccagtctcggaccgtggcccagtgccagcagccgggagtatccagcctgtaactgggcactaagccagcctgggcaggaatcatcggaagatggggcagggcttgaggtcgaggccttggtagcctgactttgcatccagttcctgcactcccagctctataccttctttgtttcagtttctacttctctgagtttcagtttctttgtctgtaaaatgggaataaggatcagactgaccttggggtcacagtgcatgtgggggacaaagcttagcacagtgccctccattgttggccgtgattgttgttactgtcctggcccctcagcatttggctcttagaagaagggaggccagcccgtgcgctctgagggtgggctccacagaggaccaaaagggcaggcccagtgctagggcctgggaacccagcatcctcccagattgattcgttcctcctcagccaggcaggggttttgctgagagaaacaggagccggggctgctgccggcatgaaatcccattttatggtcaaccagatgtgctttcctaaaatttcagccttgggcctcggccccagcggacgctcggaaggcatggccactgcagcctcccagagttatttacggctgacaaaaatcgcagcactgttgatcagcccgacaagtgccggctggtgtcccctagcaaccgtgctgacaagcaggctgtgcagggacttgctgcttgtggctctggctctggtcaccaggagtttatttgggagcctgacctggcctgaggaggaggccaagagggtggaggcggctctgagacacacacctgcccagaggatgatatgggacaacttcccaaggagggaaaggctcagaaggaagtgggtcctggcctcagtgcctggatggtggtccctttggcctcccaccaaagccaaccttgtcctgggcagctccagcctgcagacctctggctcttctgcccctgtgccttccatctctagggctcccccaacccattagtgcccttgcctcacccaagcccagtcaccacctccagctgctcccaggtcagtagcccagaaattgccacatcctgctccgtgcctgcagtctactgctctccctgctcacttgtctcccaggccctccacccttctttgtcctgctttcttcactcactccctgtatggcactggcctgctatgccccagcccttgtccctcactgaggccagacccctggcagagcctcacccagtaagagccactctctccaccaggagaaatcccatagcgctgagcagggcagtccctgccgcacaccccacctcatacctgctgcccacatgctgagccctgcctccctcaggacagcgtcccctctgtcctcataccagggcctctaacttctgccagccgagcctctcggtccattctcttcccttccctcctgtcttccttcccccacaggggctcttttccagcccacacctgcagctgacgagtctgtcttttcttcatcccctctgcgggtccttttccaccaatatttgaatctgttcaaccctctctcatcttcaaaagcgaatcctccctccctatttccctctagtcgtgggttcctccgctcccacccccatctctcctttcctgtcatccctcatggtatttgcatccttgctgcccactctggccgggtttccgccacatcccagagcctgccacctgggctgcctgcagcctccctgcccacctctccatcccccgatcctctcagcagcggctgccacaatcagacctgcccttagtcttggagtcctttttctgtgatgctctgaccaggtcccccctgaggtcctggtttacccccctccctctctggctgctccttggcctcaatggtcatccattgctctcccctgactgctcactcccagggctggagacctcaggctccactgtctttcacggctgcccacagttttgccccacgtgggggtgctggctgcccctcccttttgagctccacaccaagtcccttttaaaggccgccggcatctcatgcccagcatccctgttagtttcctaggcctgcccgtgtgccaccagctggatggtgagatttatcctcatggttttggaggctggaagcccaaggttgaggtgtcagcaggattagttcctgccggaggctctgcgggggagtctctccgtgcctcccagcttctggtggttgccaggaatctttgctgttccttggcctgcggacatctgtctggcctctgcctctgccaggtcacatggccttctccctgtaggcacctgtgtcaggactccactcatagtagatcaagggcccaccctaatgtagtatgacctcatcttaactatttatatctacagagactctatttccaaataaggtcacattgcaagggtcccagtaaaaatgaatttgggggaacactattcaatcccgtacagaagccactggaggttttaaggggagaagggaagtgtctcactactctgtgaaaatccagccctgggccgggcgcggtggctcacgcctgtaatcccagaactttgggaggccaaggtgggcggatcaggaggtcaggagttcaagactagcctggccaacatggtgaaaccccatctctactaaaaatacaaaaattagccaggtgtggtggcaggcacctgtaatcccagctacgtgggaggctgaggcaggagaatggcttcaacccgggaggccgaggttgcagtgagccaagactgtgccactgcgctccagcctaggcgacagaccgagaccccgtctcgaaagaaaaaaaagaaaatccaatcctggcttcccttggcctggctcagtcaagcttcagcacctggcctcctcccttgccagccccgacactcctcactgctcccttcagattcctgccacgaggctctgctctgcctcccccagcctggcctggcttggattcctcgttcccaggctctgccctgccgtgtgatcaactcccactcccactggctgcttgtgtgtccaagacgccttgctcagcacccccaagtgtgggtcggagccacctggtcctgtcagtagttggtcagcacctacctcccctgagaagaaaggggccccagcggcgttgctcacttgagtccagggccccacacagtgcaagtccacagagctgtagccagtgcttaagggtgtgggggaaggaggctggttggaaggtggttttcaggaggtccaagttttgacaggaaggtggttcatcccagtagggtgggaccggtggttgcagcccagggtggccccccggagtggtactggccatagggataggcggagctgaggctcagaggtgggtggcctggtgctcacggtcttcgagctgagggcgcacacaccagcgtggaaggccacggagagtccatgcagagcacatcgtgtggaggcctgaggctggagccacctttgtggtacatccttcacggctgggctcaggaaagaacggaggatacccgtacgcagaagagaggtctgatcttggctgccctcggactgggagaaatggttatgccaacaggcagggggtctggaaccagaggtcaccccagcttaaggacatgaaggctgaactcagccttgaagatggaacccaacgggaaacagcctggtcccagctggaaagaccctggtgggacccaggattcaagctgagcagctttggccaactgtccctgataatggagtctccatcctgtgctgaagaccaaggaaatgtctcaagggaggggccttggtcttggcttcagaagtgtggcctgccctgagagcagccagggagggatggcccactggggtaaggtgccaggtgggcaggcagtagcatggtccatcctgcaggtgcttcctgtgggaccacctataagaagggtccatgtcccatgagcttagcaagctggtgtctaaggccccaaggggctcttcccagctggccttgaggcagtcagagaggcctctaccctctctgctgaggagttctgtcactgtggcagagtgaaggtggctgtgtagatgtggaagccttggccagcatggcgtgagcctggctcaggtcccagtgcagcggatagacatgggttggctgcaggctgggcacaggtgggttaggactttctgctcaaagctcttccaatggcgttctctctggctgcaagtaccggggccatttgtggctcaggacaagtgttagtttttgccatgccatttatgtctgaagaatttctttgctgggaaagaaaggccttggacaggaggcagagggatgaggttggtgacctggtgagaccctgatgagtctgcgggcactgtggttataaaggacagcaaccatgttggcagggccttgggaggcagcctggctgaccttaccaggaaggtaagactcagaggaggaaggtgggcatgccgggttgacctaaccagatgcttttccctggctgctctggctcagccggggaccacagggctgaggctgtgtttggccttaggttttggatccgagacatgcagcacagggctgaggatgcgctcagggtctgggaattgttttgcagatgttctgggcaggataggctgtggcggtagcctgtgcccctggcactgcctccacccatagcaaggtccccagagctgggaggtctggggtggttgcctgtgagtaaggtggaaaatctctcttgttttctcaggttagaaatctgtgctacatggtgacaaggcgcgagagaacgaaacacgccatctgcaaactccaggagcagatattccacctgcagatgaaacttattgaacaggatctgtgtcgaggtaggcgccttccccacctgccaccgccacctccctgtgccctctcttgcggggctgggtcccaaggagggtgtgtctttggatcctggtgggggtatgtgcgtggagccaagggccactggcccccactcctacccttcaccatccaattagtaggcccagacgggggcctgcaagggtcctgagttgtgcgtcactaggcagagagccagaggttggaatgtgggcatcaggcctgccctcagggagctttctggttgactaggccacagcagttcaggagctgattgcatgtgaacaggtacagagaagaagtcctagtggctctctgctggtgctgaggcaggaagggccagaagctggtgagcttccctgaaccctggtgtgcctgggagtcagttccgaagaaggcagctgtcccagagatgtgacaggacctggctgttgtttctctctgaccctaacaggatttatgccctgcatccgcggtgtttttcactgttttattcttattattcttattctcttggcgtcacatgcgtttagtggatctggaaatcaaaggctgaaggaagcgctgacattgatcgtatctgttaattgtggatattgccagacacagggcccttcttggagcgtatacatgttaagaagggcaacacttagcccccaaaacagtaccccagtgttgcgtttacatgcagcagaaatagctggatggagagagattttgagccagggtctgccaatgccacttcagcctcagggctgagctgggcctggagaggaaagctgctgagccaccgttggagcaaatgactgaggacctctgctgcccctacttctgcccgagagctgagctgacctgattgtgctttggcatcaccacccactctggccccaacatctagccttgccaagttcaggtgctagtcatgaccatgtagagctcaccgtgtacccaaagactgtggcagcttcctggctgctggagctttccaggccccctatcttctgtttattcactcagccagcattaactgagcatggactggatagggttgctgcccttgtggaatgcaccatctggagagagagaggaatgtggtatcgcagacgctacagttgctgccagtttagggatagaagtatcagggatgtcttcccagaagcagtgatgctccaacaacatctcaggcacttggctgtggccacatatcggctgcagaaggagaagcccatgcaaggcacccacagttgaggaagcagagggtggcaagccacgagcagtgccctcaggcacaggattccagaagcatgggcaagagcctggagggtccacatccccacattggttctggggacatttgcaactccttgtcttgagtgtcaacaacaggcagctctttgttcagggcagggcagggtatttggagatgactggtttgccctgtccaaagctgctgctcacactgttgagaggcttgacgcctggggtgggacatgggctgtgtgcatatcggcgaggctgtctggcctggcggctggacaaagcctcctagtggagatgatatttggcctgtgaactgaatcaggtgaaggataggagaagaaaacagcatatttggagacttagtggccagagcatgtcttggcagagaaactggaaggaggctggaatggctgcaccaggcagaaggaagactcctaaagtggggatgacgggtaacctgggtcacatgtgcgagatcttcttgtagcctgggggaggagcttacactgtcctgagagcagtggggagcctcaggagcctgcctccagagtatctaggcattagttacatgccatgttacagatgagattgcccaggcacagtggctcatgcctaaaatcccagcactttgggagaccacagtgggaagatcacttgaagccaggagttccagaccagcctgtctctacaaaaaaaaaaaaaatacaaaaattagctgagcatggtgacacatgcctgtattcctagctgcttggggagcagaagtaggattgcttgagcccagtagtttgaggctgcaagcgagctatgattacaccactgtactccagcctgggtaacagagccaggctctgtctctaaaaaataaataaataaacagatgtggccaggcacagtggctcgcacctgtaatcccagcactttgggaggccaaggtggaaggattactggagcccaagagttcaagaccagtctgggcaaaatagcaagaccctgtctctacaaaatttgaaaattagccgggtgtggtggcatgcacctgtggtcccagctactcaggaggctgaggctggaggatcgcttgagcctgggaggtcaaggctgcagtaaactatgattgtactactgcgctccatcatgggcaacagagcaagactctctctcaaaacaaaccaaaacagatgagactgaggcctggcctgaactgaaaggatacaagggccaggggtgcaccctgaatctcccatctagtttgctgcctgactttgaaagccaaccaagagaccatggcaggagactggttcagggttgctgaccctggggttaggaatggaacccaagcctcttgacccctcaggtagtgttccttccacctacatgtctagctcctcagcctggcattcaagggcctgccctgtccagactcccttccagccattcttcccaccacccacactctctcccaagactacaggttgtgcaggtcagactggagtccaggtcctgcgagggcctctcctcgtggccctgtggccaccccaagtcccccacaggccacagtggacagttggtccaccccaccatgccagccatcccctaactccaacctttttgctgtggagggtgagcactggctgatggaggactcctgggctgccacgcagggatcttggtgctgaccgaggccactcagggtaaccatctccctcctcctctcactttccctgacacagagcggtctgggaggagagcaaagggcaagaagagtgactcgaagaggaagggctgcgagggctccaagggcagcactgagaagaaagagaaagtgaaggcggggcctgactcagtcctggggcagctgggtgagtgagggccatgctggcctgcagacacggcaggcttgaccatcaccacgcttgcagctctgtctgccctgcggaaggccagctgcacagagtaggagactgaggctcaagagcggtaaccaggcccttgcttgcccaggtgcacacaccttccacccacaaaggagacagatctcagagccccgtgtgacatcctgggaaatgccccatctgtagacctggatggaggctgggccacgcccactcaggaactgtccagtcattcccctggctggggggtcctgggtgctggattttcccagaggcccctgggacagccccatgctgggaggggaggatctgccagaaagccccatccttgtcctactctcccagaatcctctaagtgggcccttcctgcaacagcagcagactctcctggagctgcccagaggagtggctgcaggctctggccctgcccaccacctccactgtcccaggcctcctgttaggcagagcagcctaatgggagcagtgtgactcatggacctcacgtgcttcctccagagatctcagggagcatcatggagtccccttccagaccttgcctctgggatggaagccccaggtcatcctttctgtccctctgtctcaagaaggggacaacccaggcgtggtggtgcatgcctgtattcctagctgctcaggaggctgagttgggaggatcgcttgagcccaggaggttgaggctgcagtgcaccatgatcatgccactgcactccagcctgggtgacagagcaagaccctgttccttcatttcacacccctcccgcaaaaagaaggggataacttgggtgtctaacaggaaacccagtctcccgtctcgccagctgccccctcccaagacctcggtaaggaaggaaggctctgccgccctcacatctgctggcgtctcacttgcctcccctctccctgacatccaggggggactggatactgcttgctacccctattcgtacctgatccctttatccatgctctttgctgcaagcgctgggaggcaacgcttataaagactgagcgccctctggcggcctgagggcattttcctccagattcctccttccccaaccccaccagaatgggggtagtgggcaggtccaacttcgtgggtagcaacctgtgcagtgccacggggtccttgttcttggttaatgctctgctgctgccaccttgaattttctttcccatggcaggctttctggtaaaatccaaaaaacctgctagacaaactaaaagagctataacactccaccttgaaattcttaataatatttgaacaaggagcctatattttcattttacactctagcccacaaattatgaagcccatcttgagggcagcacgtccttctggagagaagcgtataagtagtccctactctttggtggtgttggcaggagggatggacaaaacaagatagctcacctgggtctggcacagggggacagagagaagacgatgcctggtggtgtgctgggagcgtcagtgggcttcctgaaagggtgggacacacgtctgctggcgtctcacttgcctcctctctcccctcagcaggcctgtccacctcattccccatcgatggcaccttcttcaacagctggctggcacagtcggtgcagatcacagcagagaacatggccatgagcgagtggccactgaacaatgggcaccgcgaggaccctgctccagggctgctgtcagaggaactgctgcaggacgaggagacactgctcagcttcatgcgggacccctcgctgcgacctggtgaccctgctaggaaggcccgaggccgcacccgcctgcctgccaagaagaaaccaccaccaccaccaccgcaggacgggcctggttcacggacgactccagacaaagcccccaagaagacctggggccaggatgcaggcagtggcaaggggggtcaagggccacctaccaggaagccaccacgtcggacatcttctcacttgccgtccagccctgcagccggggactgtcccatcctagccacccctgaaagccccccgccactggcccctgagaccccggacgaggcagcctcagtagctgctgactcagatgtccaagtgcctggccctgcagcaagccctaagcctttgggccggctccggccaccccgcgagagcaaggtaacccggagattgccgggtgccaggcctgatgctgggatgggaccaccttcagctgtggctgagaggcccaaggtcagcctgcattttgacactgagactgatggctacttctctgatggggagatgagcgactcagatgtagaggccgaggacggtggggtgcagcggggtccccgggaggcaggggcagaggaggtggtccgcatgggcgtactggcctcctaactcacccccttccctgtcccaggccctgccctggtccccccacaaggcctcagcccagtcacaactgccatttccagtctctgctgagtgtcccagaccctcgaggctgccactccgtcgtggttttatttttaatatagagagagttttgaattctacactgttgtctttcctctgtgctggcctaggacattaggattccttccacggctccggccgctaggaccctgccaggtcccgcgcaccatccctgccctgcccacgtggtattgctgggctcctggctagatgcaagcaaggtggacaagagctcaggactccagcccactgccactgggtgacacagactgtcgtttgggcattatttcatggcagatgggccagtccagggcctaccccgccttgcccccagatcccactggggtccatttggggggtcctgctacactccaccgatccccaaggaagtataataaacgatacccagccagagtctactcactgtcacaagcacaacgagtttatatgagaaagcactgagggggtgcagagggcccgctagttccaggggaactgaaagctgttcctgatcagcccgtatcatctgaggcctgcctgcccaccctgccaccctcccctcccttgctgctctgcccctgccagtgcccagcccagcggctctgggaaggggttcccagaatccctcctgagctgtgccatttactcaggggactcccaaacagccagctgccagtgcaggtggagggctgtaggggagggccagtgcccagacagggtcatggggctcagaccagcccactgtagagaatcactctgaggctccaacttccttccttccttcggggccagtctcggccgaagtctggtcacgctcagacagagctgaccagaccagaccgtttgccttttcaagtttcctagtcctgctacaagatgagcttcttccgtggtttccttttggaaactcctccttccaacaagcagtgggatcccggggcccagggcgggccggtgttggccgctggggctgttgtaagtcttgctggatgttcccctgttcctgagccttaacccctcgcacagccatcccccccccccgtcctgccatccccccccgccgtcctgccttccccaccccacccttaggtcccaggtagttgctctgaagagtttcagtagagtggccccagggtgatagctcagggaacaacaaaaaaggaattccgtgaaaacatttttttttctttgatgaattactcctgggtcacttccaccactggtaaagccagaacttctccaaaaagaaccttgcaaaaagtccagtgaatcagtcgaatcattctgtggatgccaaagaatattttgaccataatacagcacagcctggacctgacaacttgtcatttggacttttttttaaatggagttctttagcaacaaagtatagaaacatgttcattgcacacacccaaggagaagagctcaagcgcttggaagaggatgctttgctgctgctgaagtgtacctgggtgttagatttcagatcctgggctgagcccactgtgagctttcctaaactgtgagactcacagaggggaaagatactgacggtgaaaccagcatggaaaacgtctttaccatgtggttccctcctccccaaatacataaagcaaataagcaggatggggaacagcttgaccttcatccacccctaactccaaaactatcaaggtacgacagtggcattgtcatcgacactcaatttcatgtgaattttagcaaaacaggaaacaaagataatgactcagttcagaggatcggacaaatgtgtctagtccgggtggactcggagggagtggggtgggcttcaaggattctgggcgttgggatggcatgagctaccctgtagagtttagtctgcctgcccgccttggtagtagtgaccagtcagtgtcagcatcagtgtcccaaccccagtctctgtttactgcctttgaacagaacttcttccttccccatgctttgggtcacctcgggctgcaaccctgtctgtgccagattgcccggtctgaccctgcaggaagcaaagaggtgagcttaaagaacaaccaaactctgccaggggtcccagaaagcccagggtccagcagtctcagcacttggccccttgccccttcacaccatcctggggcaggggctgggcctccctggtggcaggggtgggtggagaattagggagagggtgcaacgagtctggccccttgcctcgggctggctggtgttcttccaagagcctctgctcacattgttggcctctggattctggcccttcttcattggctgttgctttggactggactgttgctgagcctgtgtcctgcagaacccagatgtctgttaggctggctggctgctgcgaggggaggggggtggcctttcatttggggtgccctttcactcccaggccaagccctggagcaatcttcttcaggcagctgtctccacctccaggatgtccagcaggctgcaaggagaaggatgccagccacccatcctcccccagttcccagcctttcccctgttggtcacagccgcttctgtctttttccggtctactgtccccagtgtagagggctttgctgtccctgagactgaggcaggttccttttccaggtcagaggtggaggtagatctttctctcaaccacatctgcctccacacacagctcctccgcagggaaggagaagctgctctgtaactcattctggctatcgtcccccttctcactgacctgaccgcccaccacctccttccccctcatcacatgacaaaggataatgtgcaagaaaagtatttttatgtatcataaatgtattttgaaacaaatgagaagaagaaaggtagaagggtttattttattaaatgagcctgacttagtgacagtgtgtgagcatttgcaatgtaagggcctcagcttccttggagaagccaccccaggtttccagacatagatgttgaattgtttgtggggggtgtgccaggccacgtctcgtgtgtccgtatgcaggcatgcctgtgtatactgtgtatgggcacactgtgggactagctgggacaattcctagagattcaactgcccaattctaaccaacattggcagcggctgaacttggcatttccttgctaactgccagatgtggccaacctttgtccatatgcaaaccactgaaaaatgatctggatttctatagcaaggcccttggggagggcactctcccatgcccttggcctcgctggccacattggccaatgagccagggctggagtctgagacctttggttgttctttaaggcacctcctgccactttctccctcagaggcacaaacactttgtgttccacgtcagtttgaggggacggtggggggatgatatgaatgtcacaggaggagacaccttctgtctttgtttcaaagaaagtgatgtgccatttgttaatatacaagagaaatattgaaaatatattgaaaagagcaattttaaattatttttggcttatgttgcaatatttattttcttgtattagaaaagattcctttgtagagaaaaaatgtatttttcattaacgcaaagacctatttctcctttttgtacattgtccatgtgcgcaacccttaacgagcaatagaatgtatggtcacctgggtgtggccagtgcccgctgtgccctgcatgattctgtgttgccgctgctgcatagttcccagccccatcctgtcctgctcactcatgggggcttccagaccccggccccaccagggcttgtgtcatagggagccctttgcactcctcgtgtgttggcaaacgcagttaataaagcaatgttttctgtgctggctggtgtgaggctccattgcattggatggggtagggaaccctgggagtcccacacacacacccgacaatgggctcagcaaaaccacggggtccctgagttttccaagggatcagctgccacctcctaaggaatcataataaagatgttcagtgcacaccaagggctataatttcagagcagtatttatatttttcattattattattattattattatttgagacaggatttcactctgtcacccaggctgcaatcttgattcactgcagccttgacatcccgcgctcaagctgtcttcccacctcagccttccgtgtagctgtgactacaggtgcatgccaccatgcctggctgattttggtaatttttgtagagacagggttttcccatgttgcccaggctggtctcaaactcctgggcccaagtgatccgtcttcctcggcctcctgaagtcctgggactacaggcgtaagccgcccctagcctcagggcagtatttcatttgatcttcaatatgttcccctggaattgagaggatgagggatgcacctaaagtcgaagatgtgctaagaggtaaagctctgcatccaaggcaggactgctgcactccccacctgctacaaccacctgtctgggaccgtaggaaagtttgggaggagcctccagggagtgtccctaggtcagtgaagatttttgcttgagtttgtttttcattcatgattttctgagcacctaccctgagccaggctctgaaaagagtgtggggaatatagctgctgtccttgcttggggtggctcacacaggcagtgagggaactgggagttttcatggaggcctgggctggtctaggggtgaaggggttcaggaagggtttctctgaggaagtgacaccattaattcattgattcattgattcattcaacaagtagtcttgaccggacacctcactgccagtgtgctgggttgtatactgtgcatgtcaccaggcccctgtccccctagaacctccagacattggagacctaatgaaaaatagttgctagcccaagggaagctgcatcggagaaagggatgacgggcattcctcatagagggtttggcctatgcaaagatggatcaagctatatcgggagggtcttgaacctcctctgagggctcagaacaaggctgtgagggacagaggttacattaagactcaaagcatcttagcttctggggccactgacttagttgtttgccacagagaattgacccatttcctctccagagcagtagacggtaggttcccaagggtgcctccagatccaatgttctgagtccacaatgcacaaggtattggaagtaaatttggggtggagtgtgtgtgtgcccaaaatgcccgtggagggaggtctccctgttagggcacctgggaacctggaaaaacaggctgtggatgttctctcagccccagctccagcagctcagctgtgaatgggaagagctcagcgtcctcaactgtggaatcagcatgggatgctggcaggaaatcagccctggggctgagggggtatctgggtggccagcccacctggccatggtaagaaactgtcagccccatggcccagctgccgtggacttggcaccacagcttctccctcctcctgcagccagcccaaagcaggaccacagtgatccagaagaatgactcaggcttgcccctcactctaaaaccacacctgtgtcggctgggccaggtggcttatacctgtaatgccagcactttgggaggccaagacaggtggatcatttgaggtcaggagtttgagaccatcctggccaacctggtgaaacctcatctctactaaaaacacaaaaaattagccaggtgtggggatgcacacctgtaatcccagctacagggactaaagggaggttgaggcaggagaattgcttgaacccgggaggcagaggttgcagtgagccaagatcatgccactgcactccagcctgggagacagcgcaagagtctgtctttaaaaaaaacaaaaataaaaacaaacaaaataaataaataaaacctcacctgtgaacctaacccagctgataaatgtagggcagggggattcagggtacatgttggtctgttctttagaaatatagtgcaagtcacatttgaaattctagtagccccatttttaaaaagtgaaaaacagggccaggtatggtggctaatgcctgtaatcccagcactttggaaggccgaggcaggaggattgcttgaacccaggagttcgagaccagcctagacaacatggcaagaccccatctctacaaaaaaaaaaattttaattggctgggcatggtggcgcacacttttagtcctaggtactcgggtggctgaggtgggaggattgcttgagcttgggaggttgaggctgcagtgagccatgatagcaccactacactatagcctgggcgacagagtgagactctgtttcaaaaaacaaacaaacaaaaacagatatagggaattttaataatatattttatttaacccattacatccaaatgtctttaaacatgtaatcaatgtaaaataactattaatgagagattttgcattcttttcacaatccagggtgtattttacacttacagcacatctcaattcagactagccacatttcaagtgctcaaagccacatgtggctagtagctaccctgttgggcagcagagccctagagaccctcagccttcccttgagttgcccaggagtcatccaggctcctatggagtgagagacagatagccatgaggaacccctgacccccttccccaagggaaggcaggaggttgaggaccaccaggcctggccctgcattcccagccctggtccctctgggatcctctctgcaccagcctacatggctgcttgagggtgggagtctcacatttgattagcactcctaggcttctcccctggagttggctatccctgcccgctgagagcccctgagcgtgggactggaggaggatggcactgacctggtcgcagctccctcatggtgggccagtcctcttgccaccaggactcacagctgatggcatagggatctgatgggaggctgggggtggtcttggggactacctttgtttttgtttttgtttttttgagacggagtctcactctgttggccagcctggagtgcagtggcgcgatccctcctcactacaacctctgcctcccgggatcaagcgattctcctgcctcagcctcccaagtagctgggactacaggcactcgccaccacgtctggctcattttttgtatttttagtagaaacggggtctcaccaggctgcccaggctggtctcgatttcctgacctcgtgatctgtctgactcggcctcccaaagtgctgggattacaggtgtgaaccactgcgcccagcctagggaaccacctttcattcatgcagatattgagatattgattcagcactcactgagaatctgctgcagggccctgaggacactgtggggacaacacgccccttccagagaccaggccaaagtgggagacagactttaagtagataatcacaaatcagtgtgcagtgacacactgagactgtgctgctagtgagagagtattaatctgtggggtgaggaaagtctccattgccctctctgaattcccttagtcgctccaaactcctgcaagatagggtctggggcgccccctgctgcccgctaggccctagccctggcaactcccaccgcgggtggcaaggcccacagggccagggccaacccctcatttccaggttgcagagctccagcctccccctcctctgtccctgctgaggctcctgcactccagcacctcctgctgcatgcccccttgccagccagggcagagtagagtcttctctatcaggcttcagtgacagggtggttgttaagggacgaggcgcctcttgggagaataaactattggctgaggtccgctgggtgcccagtcccgggttggatgggtggctaaggagacccagaccctgccaaagaaaggaaggaagttcacagcagagtggagagagagagagcacttggtccttctagagctggcctcagtcctccttgcagcctccgactgtgttcagagcggccagaggaggcagcaaaggcatcttttcttggcgatgaaagcttcaggactcacataggcacctctggcccatgctggaaatgcaggtagctccaagtggcctcgcaactaccctgtctcaaaaaaaaaaaaaaaaaaaaaaaaaaaaaaaaaagaaaagaaaattaaaataaaaataatgaataaaaaagaggagggccgggcgcggtggctcacacctgtaatcccagcactttgggaggccgaggcaagcggatcacaaggtcaagagtttgagaccagcctggccaacatggtgaaaccccgtctccactaaaaatacaaaaatcagccaggcatggtggcgggcacctgtaatcccagctactcaggaggctgaggcaggagaatcccttgaacccaggaagcagaggttgcagtgagccgagatggtgccatcacactccagcctgggtgacagagcaagactccatctgaaaaaaaaaggagattggccaggagtggtggctcatgtctgtaataccagtgctttaggaagctgaattgggaagatcgcttgagcccatgagttcaggcccagcctgagcaacatagtgagacctcatctctactgcaaaaaaaaaaaaaaaaaaaaaaaaaaaaaaagagagacagggtctcactctttgagatagggtctcactctgctgcctaggctagagcacagtggtgcaatcacagctcactgtagccttcaactcctgggctcaagtgatcctcccacctcagcccttggtctctcaaagctctgggattacaggcatgaaccaccatacctgtctgaagaaaatttttttagagagataataaaatatggacttcaaggcagccttttgagttcagatggactccctgccaagagtcaaagggagggaagaaaggatggggtttcagtcaagcaggtggcttaagggcaagctcatcgtagcagagtattgcttggcccccagtactccaagccaggcctgagctcagaagcatccgcaccagcccattctgaggaaacatgggtagggatacagggtccccatttgctggctggagagattttcagtgggtaggagggaggctgtcagatttagcaaataaaaatatagggcatgtagttacattcaaatttcagagagtagttcctcagtacattttccaaatattgcatcctgtattttccctggcattcctagtgggaagcctcaggtccctctttccactgtgttccaggcagggggctgaggcaggagcatggttttccatgttttatacactgtggcaaatcctaaactatcccaacaaccccaacatgatgacacctacagtgtgagaacaatggaaaatgggctgcagccagtgacccaggacacagctgggcctgtcttaactcagccacagcctcccttatacctgacattccaatccaatgctgaacagaagctccgtagtgtccttgaaggacctctgctccccagagctcacaagcccatttatttgctgtctcagctcaacatctaaagagttcagattggtgggagcactgttcacaatagccaagaggtaggagcaacctaaatatccattgacagatgaatggataaagaaaatgtatacacatacaatggaatattattcagccttaaaaaagaaggaaatcctgtcctgtgctacagcatggatcaacctgcaggaaattatgctaagcaaaataagccagtcaaaaaaagtcaaatgctgtatgattccacttataggaggtacttagagtagtcaaaatcatagagcagaaagtagaaaggtagttgccaggggctggggggaggaggaagagaattgattaggaggcacagagtcaggacgggagggtggttccagggctctgctgcccatcaatggcatgtggttgacaatattgtactttacacttggaaattgttgggagggtgaatttatttttttatttttgagacagggtctcactctgtcacccaggctggagtacagtggcacgatcttggtttgctgcaacctctgcatgcccccaggctcaagtgctcctcccacct

SEQ ID NO: 2765 - DNA, 2611 bp, Homo sapiens
cgcctggcgagcgcaggctcttcttccagaaactgcgaggatccgagcgtactgtttgtgcaccacaagatggaagagaagaggcgaaaatactccatcagcagtgacaactctgacaccactgacagtcatgcgacatctacatccgcatcaagatgctccaaactgcccagcagcaccaagtcgggctggccccgacagaacgaaaagaagccctccgaggttttccggacagacttgatcacagccatgaagatcccggactcataccagctcagcccggatgactactacatcctggcagacccatggcgacaggaatgggagaaaggtgtgcaggtgcctgccggggcagaggccatcccagagcccgtggtgaggatcctcccaccactggaaggcccccctgcccaggcatccccgagcagcaccatgcttggtgagggctcccagcctgattggccagggggcagccgctatgacttggacgagattgatgcctactggctggagctcatcaactcggagcttaaggagatggagaggccggagctggacgagctgacattagagcgtgtgctggaggagctggagaccctgtgccaccagaatatggccagggccattgagacgcaggaggggctgggcatcgagtacgacgaggatgttgtctgcgacgtgtgtcgctctcctgagggcgaggatggcaacgagatggtcttctgtgacaagtgcaacgtctgtgtgcatcaggcatgctacgggatcctcaaggtgcccacgggcagctggctgtgccggacgtgtgccctgggtgtccagccaaagtgcctgctctgccccaagcgaggaggagccttgaagcccactagaagtgggaccaagtgggtgcatgtcagctgtgccctatggattcctgaggtcagcatcggctgcccagagaagatggagcccatcaccaagatctcgcatatcccagccagccgctgggctctgtcctgcagcctctgcaaggaatgcacaggcacctgcatccagtgttccatgccttcctgcgtcacagcgttccatgtcacatgcgcctttgaccacggcctggaaatgcggactatattagcagacaacgatgaggtcaagttcaagtcattctgccaggagcacagtgacgggggcccacgtaatgagcccacatctgagcccacggaacccagccaggctggcgaggacctggaaaaggtgaccctgcgcaagcagcggctgcagcagctagaggaggacttctacgagctggtggagccggctgaggtggctgagcggctggacctggctgaggcactggtcgacttcatctaccagtactggaagctgaagaggaaagccaatgccaaccagccgctgctgacccccaagaccgacgaggtggacaacctggcccagcaggagcaggacgtcctctaccgccgcctgaagctcttcacccatctgcggcaggacctagagagggttagaaatctgtgctacatggtgacaaggcgcgagagaacgaaacacgccatctgcaaactccaggagcagatattccacctgcagatgaaacttattgaacaggatctgtgtcgagcaggcctgtccacctcattccccatcgatggcaccttcttcaacagctggctggcacagtcggtgcagatcacagcagagaacatggccatgagcgagtggccactgaacaatgggcaccgcgaggaccctgctccagggctgctgtcagaggaactgctgcaggacgaggagacactgctcagcttcatgcgggacccctcgctgcgacctggtgaccctgctaggaaggcccgaggccgcacccgcctgcctgccaagaagaaaccaccaccaccaccaccgcaggacgggcctggttcacggacgactccagacaaagcccccaagaagacctggggccaggatgcaggcagtggcaaggggggtcaagggccacctaccaggaagccaccacgtcggacatcttctcacttgccgtccagccctgcagccggggactgtcccatcctagccacccctgaaagccccccgccactggcccctgagaccccggacgaggcagcctcagtagctgctgactcagatgtccaagtgcctggccctgcagcaagccctaagcctttgggccggctccggccaccccgcgagagcaaggtaacccggagattgccgggtgccaggcctgatgctgggatgggaccaccttcagctgtggctgagaggcccaaggtcagcctgcattttgacactgagactgatggctacttctctgatggggagatgagcgactcagatgtagaggccgaggacggtggggtgcagcggggtccccgggaggcaggggcagaggaggtggtccgcatgggcgtactggcctcctaactcacccccttccctgtcccaggccctgccctggtccccccacaaggcctcagcccagtcacaactgccatttccagtctctgctgagtgtcccagaccctcgaggctgccactccgtcgtggttttatttttaatatagagagagttttgaattctacactgttg

SEQ ID NO: 2766 - protein, 785 aa, Homo sapiens
MEEKRRKYSISSDNSDTTDSHATSTSASRCSKLPSSTKSGWPRQNEKKPSEVFRTDLITAMKIPDSYQLSPDDYYILADPWRQEWEKGVQVPAGAEAIPEPVVRILPPLEGPPAQDSSTMLGEGSQPDWPGGSRYDLDEIDAYWLELINSELKEMERPELDELTLERVLEELETLCHQNMARAIETQEGLGIEYDEDVVCDVCRSPEGEDGNEMVFCDKCNVCVHQACYGILKVPTGSWLCRTCALGVQPKCLLCPKRGGALKPTRSGTKWVHVSCALWIPEVSIGCPEKMEPITKISHIPASRWALSCSLCKECTGTCIQCSMPSCVTAFHVTCAFDHGLEMRTILADNDEVKFKSFCQEHSDGGPRNEPTSEPTEPSQAGEDLEKVTLRKQRLQQLEEDFYELVEPAEVAERLDLAEALVDFIYQYWKLKRKANANQPLLTPKTDEVDNLAQQEQDVLYRRLKLFTHLRQDLERVRNLCYMVTRRERTKHAICKLQEQIFHLQMKLIEQDLCRAGLSTSFPIDGTFFNSWLAQSVQITAENMAMSEWPLNNGHREDPAPGLLSEELLQDEETLLSFMRDPSLRPGDPARKRRTRLPAKKKPPPPPPQDGPGSRTTPDKAPKKTWGQDAGSGKGGQGPPTRKPPRRTSSHLPSSPAAGDCPILATPESPPPLAPETPDEAASVAADSDVQVPGPADKPLGRLRPPRESKVTRRLPGARPDAGMGPPSAVAERPKVSLHFDTETDGYFSDGEMSDSDVEAEDGGVQRGPREAGAEEVVRMGVLAS

SEQ ID NO: 2767 - DNA, 3012 bp, Homo sapiens
gaaacatacacagggggttggtgaatggtgccgaccgcggccatcgcagttggaggctattttttggggggggtgagtagcgtccatggagttactttgcgcccactcctagcggcaccggcttaggtcctgcgggccgaccgtccccggcggggggcgtggggcctgggacgccgcgggcccggccgcctccctcgccgcgaccccggatggatgcgcgccccccgccctcccgcgccggccccaggagctcccggcttcgggagcatccttcccgcgccggtccctgcagcggcgcgtagccgagggcagcgcccgtcaggggggcaccgcggagcaagatggaagagaagaggcgaaaatactccatcagcagtgacaactctgacaccactgacagtcatgcgacatctacatccgcatcaagatgctccaaactgcccagcagcaccaagtcgggctggccccgacagaacgaaaagaagccctccgaggttttccggacagacttgatcacagccatgaagatcccggactcataccagctcagcccggatgactactacatcctggcagacccatggcgacaggaatgggagaaaggtgtgcaggtgcctgccggggcagaggccatcccagagcccgtggtgaggatcctcccaccactggaaggcccccctgcccaggcatccccgagcagcaccatgcttggtgagggctcccagcctgattggccagggggcagccgctatgacttggacgagattgatgcctactggctggagctcatcaactcggagcttaaggagatggagaggccggagctggacgagctgacattagagcgtgtgctggaggagctggagaccctgtgccaccagaatatggccagggccattgagacgcaggaggggctgggcatcgagtacgacgaggatgttgtctgcgacgtgtgtcgctctcctgagggcgaggatggcaacgagatggtcttctgtgacaagtgcaacgtctgtgtgcatcaggcatgctacgggatcctcaaggtgcccacgggcagctggctgtgccggacgtgtgccctgggtgtccagccaaagtgcctgctctgccccaagcgaggaggagccttgaagcccactagaagtgggaccaagtgggtgcatgtcagctgtgccctatggattcctgaggtcagcatcggctgcccagagaagatggagcccatcaccaagatctcgcatatcccagccagccgctgggctctgtcctgcagcctctgcaaggaatgcacaggcacctgcatccagtgttccatgccttcctgcgtcacagcgttccatgtcacatgcgcctttgaccacggcctggaaatgcggactatattagcagacaacgatgaggtcaagttcaagtcattctgccaggagcacagtgacgggggcccacgtaatgagcccacatctgagcccacggaacccagccaggctggcgaggacctggaaaaggtgaccctgcgcaagcagcggctgcagcagctagaggaggacttctacgagctggtggagccggctgaggtggctgagcggctggacctggctgaggcactggtcgacttcatctaccagtactggaagctgaagaggaaagccaatgccaaccagccgctgctgacccccaagaccgacgaggtggacaacctggcccagcaggagcaggacgtcctctaccgccgcctgaagctcttcacccatctgcggcaggacctagagagggttagaaatctgtgctacatggtgacaaggcgcgagagaacgaaacacgccatctgcaaactccaggagcagatattccacctgcagatgaaacttattgaacaggatctgtgtcgagagcggtctgggaggagagcaaagggcaagaagagtgactcgaagaggaagggctgcgagggctccaagggcagcactgagaagaaagagaaagtgaaggcggggcctgactcagtcctggggcagctggcaggcctgtccacctcattccccatcgatggcaccttcttcaacagctggctggcacagtcggtgcagatcacagcagagaacatggccatgagcgagtggccactgaacaatgggcaccgcgaggaccctgctccagggctgctgtcagaggaactgctgcaggacgaggagacactgctcagcttcatgcgggacccctcgctgcgacctggtgaccctgctaggaaggcccgaggccgcacccgcctgcctgccaagaagaaaccaccaccaccaccaccgcaggacgggcctggttcacggacgactccagacaaagcccccaagaagacctggggccaggatgcaggcagtggcaaggggggtcaagggccacctaccaggaagccaccacgtcggacatcttctcacttgccgtccagccctgcagccggggactgtcccatcctagccacccctgaaagccccccgccactggcccctgagaccccggacgaggcagcctcagtagctgctgactcagatgtccaagtgcctggccctgcagcaagccctaagcctttgggccggctccggccaccccgcgagagcaaggtaacccggagattgccgggtgccaggcctgatgctgggatgggaccaccttcagctgtggctgagaggcccaaggtcagcctgcattttgacactgagactgatggctacttctctgatggggagatgagcgactcagatgtagaggccgaggacggtggggtgcagcggggtccccgggaggcaggggcagaggaggtggtccgcatgggcgtactggcctcctaactcacccccttccctgtcccaggccctgccctggtccccccacaaggcctcagcccagtcacaactgccatttccagtctctgctgagtgtcccagaccctcgaggctgccactccgtcgtggttttatttttaatatagagagagttttgaattctacactgttg

SEQ ID NO: 2768 - protein, 828 aa, Homo sapiens
MEEKRRKYSISSDNSDTTDSHATSTSASRCSKLPSSTKSGWPRQNEKKPSEVFRTDLITAMKIPDSYQLSPDDYYILADPWRQEWEKGVQVPAGAEAIPEPVVRILPPLEGPPAQDSSTMLGEGSQPDWPGGSRYDLDEIDAYWLELINSELKEMERPELDELTLERVLEELETLCHQNMARAIETQEGLGIEYDEDVVCDVCRSPEGEDGNEMVFCDKCNVCVHQACYGILKVPTGSWLCRTCALGVQPKCLLCPKRGGALKPTRSGTKWVHVSCALWIPEVSIGCPEKMEPITKISHIPASRWALSCSLCKECTGTCIQCSMPSCVTAFHVTCAFDHGLEMRTILADNDEVKFKSFCQEHSDGGPRNEPTSEPTEPSQAGEDLEKVTLRKQRLQQLEEDFYELVEPAEVAERLDLAEALVDFIYQYWKLKRKANANQPLLTPKTDEVDNLAQQEQDVLYRRLKLFTHLRQDLERVRNLCYMVTRRERTKHAICKLQEQIFHLQMKLIEQDLCRERSGRRAKGKKSDSKRKGCEGSKGSTEKKEKVKAGPDSVLGQLAGLSTSFPIDGTFFNSWLAQSVQITAENMAMSEWPLNNGHREDPAPGLLSEELLQDEETLLSFMRDPSLRPGDPARKRRTRLPAKKKPPPPPPQDGPGSRTTPDKAPKKTWGQDAGSGKGGQGPPTRKPPRRTSSHLPSSPAAGDCPILATPESPPPLAPETPDEAASVAADSDVQVPGPADKPLGRLRPPRESKVTRRLPGARPDAGMGPPSAVAERPKVSLHFDTETDGYFSDGEMSDSDVEAEDGGVQRGPREAGAEEVVRMGVLAS

SEQ ID NO: 2769 - DNA, 2883 bp, Homo sapiens
gaaacatacacagggggttggtgaatggtgccgaccgcggccatcgcagttggaggctattttttggggggggtgagtagcgtccatggagttactttgcgcccactcctagcggcaccggcttaggtcctgcgggccgaccgtccccggcggggggcgtggggcctgggacgccgcgggcccggccgcctccctcgccgcgaccccggatggatgcgcgccccccgccctcccgcgccggccccaggagctcccggcttcgggagcatccttcccgcgccggtccctgcagcggcgcgtagccgagggcagcgcccgtcaggggggcaccgcggagcaagatggaagagaagaggcgaaaatactccatcagcagtgacaactctgacaccactgacagtcatgcgacatctacatccgcatcaagatgctccaaactgcccagcagcaccaagtcgggctggccccgacagaacgaaaagaagccctccgaggttttccggacagacttgatcacagccatgaagatcccggactcataccagctcagcccggatgactactacatcctggcagacccatggcgacaggaatgggagaaaggtgtgcaggtgcctgccggggcagaggccatcccagagcccgtggtgaggatcctcccaccactggaaggcccccctgcccaggcatccccgagcagcaccatgcttggtgagggctcccagcctgattggccagggggcagccgctatgacttggacgagattgatgcctactggctggagctcatcaactcggagcttaaggagatggagaggccggagctggacgagctgacattagagcgtgtgctggaggagctggagaccctgtgccaccagaatatggccagggccattgagacgcaggaggggctgggcatcgagtacgacgaggatgttgtctgcgacgtgtgtcgctctcctgagggcgaggatggcaacgagatggtcttctgtgacaagtgcaacgtctgtgtgcatcaggcatgctacgggatcctcaaggtgcccacgggcagctggctgtgccggacgtgtgccctgggtgtccagccaaagtgcctgctctgccccaagcgaggaggagccttgaagcccactagaagtgggaccaagtgggtgcatgtcagctgtgccctatggattcctgaggtcagcatcggctgcccagagaagatggagcccatcaccaagatctcgcatatcccagccagccgctgggctctgtcctgcagcctctgcaaggaatgcacaggcacctgcatccagtgttccatgccttcctgcgtcacagcgttccatgtcacatgcgcctttgaccacggcctggaaatgcggactatattagcagacaacgatgaggtcaagttcaagtcattctgccaggagcacagtgacgggggcccacgtaatgagcccacatctgagcccacggaacccagccaggctggcgaggacctggaaaaggtgaccctgcgcaagcagcggctgcagcagctagaggaggacttctacgagctggtggagccggctgaggtggctgagcggctggacctggctgaggcactggtcgacttcatctaccagtactggaagctgaagaggaaagccaatgccaaccagccgctgctgacccccaagaccgacgaggtggacaacctggcccagcaggagcaggacgtcctctaccgccgcctgaagctcttcacccatctgcggcaggacctagagagggttagaaatctgtgctacatggtgacaaggcgcgagagaacgaaacacgccatctgcaaactccaggagcagatattccacctgcagatgaaacttattgaacaggatctgtgtcgagcaggcctgtccacctcattccccatcgatggcaccttcttcaacagctggctggcacagtcggtgcagatcacagcagagaacatggccatgagcgagtggccactgaacaatgggcaccgcgaggaccctgctccagggctgctgtcagaggaactgctgcaggacgaggagacactgctcagcttcatgcgggacccctcgctgcgacctggtgaccctgctaggaaggcccgaggccgcacccgcctgcctgccaagaagaaaccaccaccaccaccaccgcaggacgggcctggttcacggacgactccagacaaagcccccaagaagacctggggccaggatgcaggcagtggcaaggggggtcaagggccacctaccaggaagccaccacgtcggacatcttctcacttgccgtccagccctgcagccggggactgtcccatcctagccacccctgaaagccccccgccactggcccctgagaccccggacgaggcagcctcagtagctgctgactcagatgtccaagtgcctggccctgcagcaagccctaagcctttgggccggctccggccaccccgcgagagcaaggtaacccggagattgccgggtgccaggcctgatgctgggatgggaccaccttcagctgtggctgagaggcccaaggtcagcctgcattttgacactgagactgatggctacttctctgatggggagatgagcgactcagatgtagaggccgaggacggtggggtgcagcggggtccccgggaggcaggggcagaggaggtggtccgcatgggcgtactggcctcctaactcacccccttccctgtcccaggccctgccctggtccccccacaaggcctcagcccagtcacaactgccatttccagtctctgctgagtgtcccagaccctcgaggctgccactccgtcgtggttttatttttaatatagagagagttttgaattctacactgttg

SEQ ID NO: 2770 - protein, 785 aa, Homo sapiens; identical to SEQ ID NO: 2766

SEQ ID NO: 2771 - DNA, 1265 bp, Homo sapiens
gacacagagcggtctgggaggagagcaaagggcaagaagagtgactcgaagaggaagggctgcgagggctccaagggcagcactgagaagaaagagaaagtgaaggcggggcctgactcagtcctggggcagctgggtgagtgagggccatgctggcctgcagacacggcaggcttgaccatcaccacgcttgcagctctgtctgccctgcggaaggccagctgcacagagtaggagactgaggctcaagagcggtaaccaggcccttgcttgcccaggcctgtccacctcattccccatcgatggcaccttcttcaacagctggctggcacagtcggtgcagatcacagcagagaacatggccatgagcgagtggccactgaacaatgggcaccgcgaggaccctgctccagggctgctgtcagaggaactgctgcaggacgaggagacactgctcagcttcatgcgggacccctcgctgcgacctggtgaccctgctaggaaggcccgaggccgcacccgcctgcctgccaagaagaaaccaccaccaccaccaccgcaggacgggcctggttcacggacgactccagacaaagcccccaagaagacctggggccaggatgcaggcagtggcaaggggggtcaagggccacctaccaggaagccaccacgtcggacatcttctcacttgccgtccagccctgcagccggggactgtcccatcctagccacccctgaaagccccccgccactggcccctgagaccccggacgaggcagcctcagtagctgctgactcagatgtccaagtgcctggccctgcagcaagccctaagcctttgggccggctccggccaccccgcgagagcaaggtaacccggagattgccgggtgccaggcctgatgctgggatgggaccaccttcagctgtggctgagaggcccaaggtcagcctgcattttgacactgagactgatggctacttctctgatggggagatgagcgactcagatgtagaggccgaggacggtggggtgcagcggggtccccgggaggcaggggcagaggaggtggtccgcatgggcgtactggcctcctaactcacccccttccctgtcccaggccctgccctggtccccccacaaggcctcagcccagtcacaactgccatttccagtctctgctgagtgtcccagaccctcgaggctgccactccgtcgtggttttatttttaatatagagagagttttgaattctacactgttg

SEQ ID NO: 2772 - protein, 242 aa, Homo sapiens
MAMSEWPLNNGHREDPAPGLLSEELLQDEETLLSFMRDPSLRPGDPARKRRTRLPAKKKPPPPPPQDGPGSRTTPDKAPKKTWGQDAGSGKGGQGPPTRKPPRRTSSHLPSSPAAGDCPILATPESPPPLAPETPDEAASVAADSDVQVPGPADKPLGRLRPPRESKVTRRLPGARPDAGMGPPSAVAERPKVSLHFDTETDGYFSDGEMSDSDVEAEDGGVQRGPREAGAEEVVRMGVLAS

SEQ ID NO: 2773 - DNA, 27292 bp, Mus musculus
  misc_feature (1)...(27292): n = A, C, G or T/U
tcgcacgtcggtcttaattagtcctcccttcagccagtccttccagggaaggaagagagccacttagcatgaacctaaaagcccttgtcttctgttcttttaccttgacgagggggtgggggtgggagttgggaggggtgaaagggggtctgggctgaaactaacacacaacgtaccgaatggtccataccttcattaaaacctaaattaatcttctccattgccacccattatatacctttctctttatcactactacccctgccaaaacccatttattcacaaaattttttattgttaaaataattttatacaacatcttcatacttctacaaactttttaattaaccatctctctcccttcataaagaaccatttatccatttcttcactatctataaaaccatcatctcatactatgtcccattcatataaccttctttatcttctactcaatcacccacctttacattctaaccttcactcttaccaatccttctttttatttattacttcccacacgacacatttataaattccctacccctataaatccctaccatccaaccccctactcaaaattttttctactcttccttaacccacaaaattttttttcttccccatagaaaataccctatttctaccttttatattaatatgctctcttttttattttatttctaccatatatatttttattctttnnnnnnnnnnnnnnnnnnnncacccaccatctatccacccatctcctcatccactgtcccatccatctacctgtctctcctcctactcatccgcctgcctatcagtctagcctccactctatccatctttctcttcatttatccctcctacccacccatttatacatcccctaccctatcctcctatccaccctccctccaatccatctttcactacttcccatagggtacctgctttatgctggcccttggggatacagtagcaagcaggatgcaccttcctcttgtcctgttcccccacacacacatacacaaatatgccccctagtgaaacccagcacagacacttttaggcctgctcccaggcctgttttatgagctagggtcagttggttctttaactcagaaatactggctcagtggtaatgacacttgcccttgtagagactccaggttaggatccctgcacacagcctgaaactccagctgcagataatcaggcactctcctctggtctctttttgagcactgtacacacacatgtttgagtatgttacatacacacacacacacacgtgcaagagggggcaggagaggagcaagaaaatacatatacatataaaaatgatcttaaaaattaaatctgaaaaaaaataaaaaacaaagctgcctcaccacgaaagggggtacaataaaacattctctctggggccccctcaactgctgccatggcagccaggcactctcatctctggggcaggccctggcatcgggattcccaggctgagtcaccagggtctgcgggcatagcacaagctccgctcttgcagaatttagagtttccttagccctcttgcaggcatggcaatcctgaacctggctggaaaaaagcaaaggccatcacttgacctatctgcctgcctccctcttgacaatctgcttgtcttcagatggtcaccactactgccagccccgaccccagctcttctggaccaggaggggctggaggtctactgagtttgattcctgcttttctgaaagccatggctgcaaagagggagatccaaggatttaaggaaatatacgctttggggtgaccctgcctcccttgaccccagattcttctttggattgaagatgcaagggagggaactatactctgactcccccaaaacaccatcctggcccttccctgccaagcttcctggctcagattcaaacccaacccacagccatccatggctgcagggagctccagcctctgaggacagaaggaagtggccaagctcacaaatcacattccttagggatgagaacagtctgctagctgcccaaggacccacaggagggtagggctcagtcactcacgaaggggctgagtccactcctagagagggactcttctttcatctgcaggacctgactgggcaaggggccaggggactggatccaaaagtccagttccactccatgcctccaattcactcagcttgactgttgtccctgtgcccgcctctaagtttggttgtttctagccttgagcttagcaggctggacaggacggaagggcgatgctcttcttgagcatgtccagagaaatcttcccaatggataaggaaaagagcgagcaaagagtggatatgaaccaacacagttgctggtacccgtatcccagcatttaggaggtctggaagatgagaagatcctgaggtccaggccagcctcagctacccaggaatttgaagccagcctgggctactggaaaccctagcttgcacacaggcatgcatggacacacatgtactggagatgatggggctaagttactagtgtctgcctagcctgcatcaaaccctgatactgcaaagaccaggcaaagtcacccacatttcaaaggtggtagcaggaggatcacaagttcaaggtcatacatactcagctccaccctgagtccaacagtctcaggtatgtgagactttgtctccatgcaaagacaaacaataaaactcaggactcaggcaggaacagtcattcctcaggtatcccttgactttgtggtccatcctctgctggtggaccgaccgacagacagacaccattacaccctgttcaatgatccctctgctgttctcctttgagatccccaccttctctgggaacaacagccccaagagaactgggcaggtgctctgaggtggggcttttccggggttggttttccccggttcccactggaagttccagcgagctgctggccagggactttggacacgtgcccgtcccgctgcctgctttggagcagagctcagcggttccgggaaactcctcgatttccttgttgcctccacgttggcaagaaagcgaaactcaagccccgcccctcctgcccaggccgacggaaccttgagagtgggtgttgggaactagggctccgaatcccagctagttcacacaccttatcgccagggtactgcgagttatctcagccaggttctcaggctgcaacagatgatggaatgttcttgtgggacaccccccctgtacttctcctgtgtgcctgtccaccccggggaaagggaccgaacaagagaccgaatggacaagaaggacgggggaggggattattaagagcaggagttcagctagaggcttgccagcttcagctatcccaggtgattgatggtctgcacagagaagtttagcacgtagccccaggccacacagcttatagatgctgagctaggtgcaaacttctggcggaaggggaaggctgggtggtggggagaaaaaaatgctctgcctcttggcaggtgactgcctggcacgggtggggcaggcctggcgtgcatgcgtgggagaatataggcgtggggttagaatggaggcagccacctgggcggcccagctgggaggctctgtggttctccgcctgcccgcttccctccctttccaggaagctagccagagcggagcctgcaactcacccccaagtcggggcggatcaggaatgtggaagttggcccaaagggcctggttgcccactctcctccaatcacgcacacccggcacccgagtgcatcacgtggagaagaggggggcccaccccaaggccaaggcaggcgagggaggctgatgtagggtgggggtggtgtctccactaccccgcaggatcagccacagtgaagtggagctgctctcatccagccctgccctgggtcacggcctcctggtctggcctcacagtctcctcggctcggctctccaggccccacagggcggatgggaactgaggcctctttcctcccaacgctgtgtttataagaaatgaaactccgcagcgggccccagtggcagcccacacggtcacacgcacactcccgcgggcgggggaggggcgatgagttccggagcggctctgacaccaccaccgggcgtcctgtgtgacttcagcctgttgggtcccagggcagaaccttgtgctttcccagtcagctgctgcatcccactcgcctcgttttggatttaaaataaatacataaataaaaataacggtacaaagtttattctgctgtgtcatacagtgtgagtgccagagctgggagcagggaggggttgatctcgtgcccaggcaattccccagaatcaaacttcggactaactgagcagaagttcaattcccatttattgaataagttaagatttcttttctgcccaggcttctcacagtcacggtggtgggaccaggagtctcatgtcaggctttgtgttggatgctttgatgtctgacttgtgtctttatttttagacagggtctaggtagcccagggtgaccctgagctgccaatcctccggcctctatttttccagtgttggaattacaagtgggcacatttgtctcatcaggtttatgctatactgggggtctaccctaggatttcatgcacgccaggcatgccctctactaattgagataggctccccatgaagaagtttgcagggaaaatggagctcgcctgcctgctaggagagtctgagcatttcaaggagccctgcctctggaccacaggggtctggaagccctgccaagagcttgtctgctttgggggcagtcaaaaacctaattcgagtctcactgggtcctgtcaatacctgggatttctgagagcatttccgatctcacacctgtctgtcagcacaagcacaggctgccaaaggaatgtctgagtacagagaaccgccatcagatgagggaacagccatttagcaaggatttgtagtgccttccaggtgccaggtatctgctggtgaacatggggaccttaggctggccttggtaaccaaggagggaggtgtcaggggaaaggatttggtataccagagaagagggtagagggtcctacagagtgtttgtatatgactttgtcaccagccctatctcctgtgctccaggctggcctggatcttactgatcttactgtatagctaaggatgactttttaacttcccattctaatgtccttgcttcccgcacagcggggggggggggggggnnnnnnnnnnnnnnnnnnnnnnnnnnnnnnnnnnnnnnnnnnnnnnnnnnnnnnnnnnnnnnnnnnnnnnnnnnnnnnnnnnnnnnnnnnnnnnnnnnnnnnnnnnnnnnnnnnnnnnnnnnnnnnnnnnnnnnnnnnnnnnnnnnnnnnnnnnnnnnnnnnnnnnnnnnnnnnnnnnnnnnnnnnnnnnnnnnnnnnnnnnnnnnnnnnnnnnnnnnnnnnnnnnnnaagtcccaaagaacctcagggcccaacactgagaagctgcgcagcacactaacccgaactgagccaggggactttggggaggcaccctatgggtgctcctgagtaggacgggcagctactctctttagctctaactccagccttggggtgtgaggcacctgctagatagactcttacagagaaaggtagcctgtgttcccccgactcaggaggcaataagaatggagagataagacacagagctgaggcctgagggcaaaggtgtgtgtgtgtggtgtgtgtgtgtgtgtgtgtgtgtgtgtgtgtgtgtgtgtgtgcagggtcgttctgattggttgctttgagggtactcattgaaactgggcattttgttctgagggttcgtttgtttgttgagacagggtttctctgtgtagccctggctgtcctggaactcactctgtagaccaggctgacctcgaactcagacatctgcctgcctctgcctcccaagtgctgggattaaaggtgttgttctgagtttttaaggggtagaaatggaagccaagtgtgggggtgcacttctgcaactccagcacttgggaggtggaggcaggaagatcaggaatttaatgccatcctaagtagactagacaatgcctcagcaggtaaaagcacttgctccgaccaactgatctttgttctctggagcccatgtaaaagccataggtggaagtggaagatcaatgttctctggcttacacatgtgccctgtggcacgtataccatcatatatgaacatgctgacacacaaaaatagtaagttaacacatttttaaaaggacaacctgggggctggtgagatggctcagcgggtaagagcacccgactgctcttccgaaggtccagagttcaaatcccagcaaccacatggtggctcacaaccacccgtaatgagatctgactcccgtttctggagtgtctgaagacagctacagtgtacttacatataataaataaataaatctaaaaaaaaaaaaaaaaaaaaggacaacctgggttacatgagacattgttttcaaacaaaaagagggggcaggtagaagtggaagttagttaggaggaagaagtattcccgcgtatgggggaaatgggggaaatggggtggggaggacagagttcagaacccagaaacacaggggaaggcttgttgataccttttagttgaggagtgtttaatggtttgggaagggctttgatagtttacctgatttcacagggaaaaactacaagaaatttgattatgaatctccctggctatggctcatgagttagacatgattcatggattagaaggagagctactgctgagcggcagcaagacaggttctgtgaggacagaaagaaggaaacaaaacatcaagggaaaagctgattggttaatgctcgggcggttcaggtgcagaggggactccctcgccgcgtgctaactcatggggacttaaaactcctgtgtttaggaaaacttggtttggtttaagatctgcgtgttcctttcacatttcaattaataatgtagaacttagcacgagtgactccattttggtttggtctattggagcctaggacaggagctccgtctaaaatagtggcctctgatattttggtttaccaatcttctctcaacaattaggggagatgggtagagattatttctggtttatagttaattgaggaccagagagaataataatttcattccttaaaaaaaaaaaaatttacttttaagagttgagtgtagatgcctagggaggccagaaaagggcatcagatttccaggagctaacatcacagatggttgtgagaagcccagtgtgggtgttgagagtccactcaggtcatctgcaagagcagcgagttgcttctttctcattgtgcttttccccagccccaggggaacgccaaaagcacaagataccaaccaagctttcagactcagcgctacagcctgtgttccccgcttttctaagaacaactgagggagcgggaagtggggtgggaagacagagggtttgagcctagctgaagatgtagctcagttggcatagcgcttgcccagcgtgtacaaagcctgggttccacccccaatgccaaaaattcccaatgaagcggtgcatacttgcatgctcaacatttgataggttaaaagcaagttcagaactcaaggtcggcctgggatatggtgagctgtctcaaaaaaaaaaaaattagaaactggctgggtggtgtggtacatgcctataatctcagcgcttgggtggtagacacagatggagctctataagtttgagagtaccctggtctacaaagctctaggacagtcaaggctacatagagaaaccctgcctagaccctccctccccccccaaaaaaaaaccatagccctatacccaatcataggcatattatttataattttaaatcaagtaccaggcaagatggtggtaccgacttgtaatcccagcattaggaaatagaagcaggaagatgagttgtttaaggctaacccaggctacagaagaccctcttccaaaaataaataaataaataaaaataaataaataaataaataaattttaaaaaaggagaacccctaaagtcaaagtgggaaaaacctcgcatagaacatttaaaagatgaaaatggtcagtttcactgttaaatcgtagcagtgagggtgggacagggacatctcctaagcagaagactgttagtgtgtgtgtagagactttgctcacagtgttgtctctattgggaaaaggtggaaataacctaaatgtcctacaacagggtatttatctatcgggtaaatttttatttatccttatgacagaaaacaggtacccatcactaacaaggctgcatatggacattccaggacacaggctgactttcattatgtatacccacacagttattttgatgtaatttgtagtctctggttgctttcagtagggtctctgtgggcttcaagagttacaaagtttctctccctaatctcattttgaattttccattggctggtcagagtgtctccacagagcaagtatacatctgttgcacagagagcaggtgtcagattcagagtcatgtgatcagaaggccctggtctctagtgattctcttaatttgcgacttcaaatacctccgtatttattctagagtctcaattcctccttccaaatcctcctgccaccttgaatctcctagctcgtctatgaggcagtgacgttacaggtacaatcgtccattgatgtgtgtattacagcttgcaacattcaaactgggtgctgtcctagacggacagctagggtgaggaaggtgacacaagagaatgacacggtagaggactgatgtacttgtgagtcagaagctgcgaggaagcgaatgaagaagcctgaggggccagagttcggagatggaacatgtatacactagcccagccgctaagagaaagaacaaactggcaaggtttactcgtgaacaccagttaacccgctgcccttgccatccccttgggacctgggtccccccttagccacaatttccctatgctgcccagaacttctccagagccaggctttggggactcagaaatgacttcaagactatcagagaggaactctctccctagggctacgtcgaggatggagagctgaagtaggtgtcatagaaggaaccacggccacttcggaattttatccacttctttggtgttaggtagtcccaaggaataagggtcgccttggtcaccgctagctagaacctcgtgtggcacaggaaagcacacccgcatcttgtgcccatgtaagcaaacacatcatctctccccataaggacaaggtgttcccccatcacttcagactagcaagtgagctattgacattttatggttacggagtccttgagtccttcaacggctggccctgcagagtccaggctgggagttcctactgccccgtatttccaagttaggccttctgcctcaatttcccagagcagccaagtggcaagtaaggcggtacagggacataatctctcccttcttgacacttcattaccagactgattttgagggtgatttagtcccggggacccttctggagagggaatcaggtgttctagagacatagggagttaggtgtctcccgtggagaaggggaagaccatcataggagccagcaggctgggagtctgcagaaagagggggacggtctcggctttccaagacaggcaagggggcaggggagtggagtggagcaaggggcgggcccgcggtagccccggggcggtggcgcgggcccgagggggtggggagcacagctgccttgtacttccccttcgccgcttagctctacaacagcctgatttccccgaaatgatgaggccgagtgggccaatgggcgcgcaggagcggcgcggcgggggcgtggccgagtccgggccggggaatcccgctaagtgtttagatttcttcgcggcgccgcggactcgccagtgcgcaccactccttcgtcgaggtaggacgtgctttcacagtctaagccgaaccgaaccgaaccgaaccgaaccgaaccgggccgagttgcgccgaggtcagccgaggtggccagaggaccccagcatctcgggcatctttcgcttcgtgcgcgcatcgcgtacctacaccgcaactccgtgcctcgctctccggcaccctctgcgaatcgctcctgcagcaaaggtgagctcgccggagctgcgcgggcaccgacgggtgccgtggaacaaaaggcgcacgggacaccaggaagtgggggccagagacaccctgggtcgcggtggcgcgctggctcgggagggcgctgcaagcgggcgggaggcgggccgcggcgtgcaccgccctctggccgcgctcggcggtctgcgtgcgcggagccgctgcggggcctcttggtagcccagagtggccgtcgcgcgcacccgcgagcagcgccgggggactcggatgtccgcctgcgcgcacttttggcggtcgcagcttggctcccagctcttgctttcggacgcgcagtgttcggtgcagaggttggctcgctgccttgactggctggaccgggtcgtgaactactgggctttcgggaggaggtgccacaggtgttgcttgcgccacttctcttaacagcaggggaaaccaggccggaaggggttgcgccccagcctgtatgttgtgggcactggctgtcaagaggggacatagactggattggagtgggtgggtagaagtgcccgagatggaggttgacttgcttgcttgcacagcctggaaggtgcagggctgggggtgacaagcaaaagtagtcccttccttcttccaaagattgaattttgagagaaaagttctgtcattgagatgtctgtcttttggctttttttttttttttgcacatatatcctgcaaccatccatccatccagacttgcttggttgtttattcctgagactgactgggagagactgaaaagaatgggcaggtggctttgcccatgatgctggagagtttcattctacttcagggtccctaatctatgacctgggtacctggctgatggcaggagagtgggggagggtaatgacctgggtgtgaggacaggagaaggtaattgagcgagcggccttgggtggagcagggcagtgcccagggttgtttaacagactccaaacacaggcctctgtcttttccctccagccaccatgccaatcactcgaatgcggatgagaccctggctagagatgcagattaattccaaccaaatcccagggctgatctggatcaataaagtgagtgttatcctgcgtattcctgccactgtttaatgcatgttctcttggggcgccaaatttcatgagtgaacgttaagagagcaggaaaatgtatttcccagtgggtgctgcatgccagaacgtgcaaggtctgacttctgcctcctgcttcttccttcctgaagctgtggccagctcaccctcctagtggtacagtcctcagcaccaaaacttctcagcttctgcagagcctgggttcctctctcttccaagagaaacactgtatacataagtcttacatggctccagttggatagacaagacagacagaaaagcagtcgatagtggttaggaacgggactagttacgtaggagacccaagaagccacagctggcatgcatggcagtatagcagcagcagtagcattggtgataattaatatgtgcttggcaccttttttgatatgttaccaaattgtgcattttaaccggcatagtaatcctgtgagatgggtctcgcgtaaggaaactgaggcactttaaggtagattacaaagtcatgtaaaaagtgtgaaacccaagaccaacttgaaccaacttgattgaaatagtatacagttaaccagcagtaacaagagtggtggtggtaagagcctcctggatcttggggctggtgagcttgctcagcaggtaaaggcaccaccttccagtgagcctgaaggcctaactttgatccctagagtcctctcatggtaggaggttggcctctgacctgtacataagtgccctggcttgtatctctctctcctctctctctctctctttctctctctctctctctctctctcacacacacactcacaatacacgcataaaaatttaaaaaacagaactaaaaaaaaacttaactcatggtggctgttgttcccatacatactttttattaaaaacaaacagtcccccacccacccacccccacacatacacaaaccttttctctttatgtcttacctaaggggagaagagtagggcaatattacataggcagccctcacccaggtctggttcagggatcccttgggagtatgagcaggagcctatctatgtaggagtcactgtgccaggcgtcctgaggagactctaaagcaagaaggtcccatgttccaatgctcggtagccagagagaagcatccaaggcctgccaggccagggctgagaagggggtgctgcttaggttctcagcacatccacagtgtggggcaggggtgtctttgagcttctggtgctgtggctcatcagaacctaagccccctactgcccttcctaaaagatgcagagtgccctgttacaggcagccaagacgggtcaatccaggccagatgtcggggtaaaaaggggaagtcagccttttcccatacttgggggctgcgcatcctcggtcgcactctgagctgactcggtcttctatgtacactgttcaggaagagatgatcttccagattccatggaagcacgctgctaagcacggctgggacatcaacaaggatgcctgtctgttccggagctgggccattcacacaggtgggcagggtgggggagggggcagaggagagacagggggagacatacactaccatcagtgttctgggtggcctctgagctccctgacacagcatgcagaattactggagcaggggggtgagatgcacctatgtttttctaggacagaatcattgttctagcaagttctcagaggatttataaaggcaaaaaaaaaaaaatgttagaaagcatgtgtgctttaaggagtctgtatagaatacagttcctagaaaaaacagttgtgagtcagggtaccaagagacttccatcttcctttctcaaggtccttgacctaagccccatctggttggtggcctcctttcttcccttcaggagtcaggccctcattccaattcagacctgttagtaactgtcctcggggccggcgctgtgcccacttgtactgcagaaacatcagataaggcctcagtcccagtagtctctggctgctgagaacctaagcagggagactgttgaggtccaagtcagcgcagttatgggggacggagactcaagtgagcccatttgagtccttcacagtctgctggatgtctaagccaactctgggcatgtgagaagccccagggcccgttgacagttggtttttgctagtatggatgtctggggttcccttgcctttcttctcccagcccagggagcagctgctgtatgcatttttactcttccgtcctgtaggccgatacaaagcaggagaaaaagagccagatcccaagacatggaaggcaaacttccgttgtgccatgaactccctgccagacatcgaggaagtgaaggatcagagtaggaacaagggcagctctgctgtgcgggtgtaccggatgctgccacccctcaccaggaaccagaggaaaggtagccaagggcactgggtcctcgggaggaaggggagggaagacgggcagaaggaagaccagctgcccctcacacagcctgttcttcccacagagagaaagtccaagtccagccgagacactaagagcaaaaccaagaggaaggtgagtggctctaggcagcccagcctgtaggtagggtgggcagtgagtaagtgccacagcaaacctaagctgtctcctctttgtagctgtgtggagatgttagcccggacactttctctgatggactcagcagctctaccctacctgatgaccacagcagttacaccactcagggctacctgggtcaggacttggatatggaaagggacataactccaggtgaggtggccactttggcaagggtgcgtttagatgccaagaggcatcgcacgaacctatcagggaggagtaaggggtggaggggccgatgaattgcagactaagaacacatcccgtcctgacctgcactttctgctgtactctctcccagcactgtcaccgtgtgtcgtcagcagcagtctctctgagtggcatatgcagatggacattataccagatagcaccactgatctgtataacctacaggtgtcacccatgccttccacctccgaaggtttgtacttggggccctggcctgtcttgtctcgagagggggaatggagtctgcttagagatctatgtgtcaaattgggcgttggtatccacctttaacctcagcactaggaagcaggcaggcaggcgggccagccttgtctacatagtgagttctagaacagctgggcctacacagagaaaccatcacggggagagggcgaagaaacctctgtgcttttgagctgatagagccgggcactgttttacccctgcagcaagaaagcaagttcctggggcacaggagaccgcaggggaccggccagagctctcatgtgctccaggccaagagggggggaattgggccacaacttggtcaaaggtggctagtgctcctggcttccctgcactcgggttgtctgagggtgaggaaggaagtgaaggggtgggagggatacagcctccctccatggttggggagggtgagtcatgaggcagtgtcctgttctgggatctccagggcaggcaggtgctggttaggaggcttggggaggtggtgtgaagctgcaggcaagcagacatggccaacctctgcctctcctcacagccgcaacagacgaggatgaggaagggaagatagccgaagaccttatgaaggtaaatcccctttgcatattacatccgggaggagaccgcaagctagggacagcttccgggtcgctttgggcaggtgctgttacctgtagttacacaagtagccctccctccttcgtgtgttgtggggggactgctacctcagcaagtgagaagcctagtctctcacgggccatcttgaagcaagcctcagggtctcagacggctctgagtcagccctcgtgagcgctgtgtcctccgccccagcatacccagcccatcaagtttgggagatgcacatctgggagatgcacatcaggtttcaataatcagctttggggatctgtactaggatgactttaggaggaaaaaaaacaaaataagaaaccctctggtttttttcttagcaagttcttttgtggtttactttttcagctgcagttttcaaagtgaccataaatgtttttaaggtagttttatcccgagtctggcccatgagcacagaacttttgaaatgtgtgcctagttgcttgtctctggcttttctggcttgttatgctaaccttggctttaagctgccctgccagttcctgtgtcctcccccagtagaggggactcatgcaggttctgtgccagagggggacagcgacacacaggaggggcgggggccagcagggcccaggtcgctttgtgctcccctccctagacagttttgcatattgttacccataaacagtcaaggttatgatcctgcttgggaagggttaggtcacccaagggaagggccacagggtgagtgcactggcaggcagctgatggcttcatgctctctccccagctctttgaacagtctgagtggcagccgacacacatcgatggcaagggatacttgctcaatgagccagggacccagctctcttctgtctatggagacttcagctgcaaagaggaaccagagattgacagccctcgaggtaagaggcttctaggtccttctgggttctgggagaagggggaagctgttggaggcagagccagagccagattaaagcatcccagcatgccttttaaaccaggccaacaggtacagcatgaagtgagaattcctagctgcccctgtgctggggctggtctatagaagagatggagttgctgtgggctgtggacagctgggtgagagtcacatacccttccttacttatacagcctttttcttttttggtcatcttctaggggacattgggataggcatacaacatgtcttcacggagatgaagaatatggactccatcatgtggatggacagcctgctgggcaactctgtgaggctgccgccctctattcaggccattccttgtgcaccatagtttgggtctctgacccgttcttgccctcctgagtgagttaggccttggcatcatggtggctgtgatacaaaaaaagctagactcctgtgggccccttgacacatggcaaagcatagtcccactgcaaacaggggaccatcctccttgggtcagtgggctctcagggcttaggaggcagagtctgagttttcttgtgaggtgaagctggccctgactcctaggaagatggattggggggtctgaggtgtaaggcagaggccatggacaggagtcatcttctagctttttaaaagccttgttgcatagagagggtcttatcgctgggctggccctgaggggaatagaccagcgcccacagaagagcatagcactggccctagagctggctctgtactaggagacaattgcactaaatgagtcctattcccaaagaactgctgcccttcccaaccgagccctgggatggttcccaagccagtgaaatgtgaagggaaaaaaaatggggtcctgtgaaggttggctcccttagcctcagagggaatctgcctcactacctgctccagctgtggggctcaggaaaaaaaaatggcactttctctgtggactttgccacatttctgatcagaggtgtacactaacatttctccccagtctaggcctttgcatttatttatatagtgccttgcctggtgcctgctgtctcctcaggccttggcagtcctcagcaggcccagggaaaaggggggttgtgagcgccttggcgtgactcttgactatctattagaaacgccacctaactgctaaatggtgtttggtcatgtggtggacctgtgtaaatatgtatatttgtctttttataaaaatttaagttgtttacagcgtgtggctttttatttagaaatcagaattggtcttactttttaaggaaacctcctgatgggagtcttttgctggctttctgcctgggcttcagctgagcattgacatgcgtcgatcacgaatctttccagttatggtcaagaagaagatggcaggaggagggggcgtcatgccacagggacatgctcatttatactcatttgccacggaagggagtttttattttaatttttcacttcatgtgcctgaatgtatgtctatgtaagggtgtcagatcctctggaaattgagtcacagacagctgtaagctgccatgtggtgctgaaaattgaatttggatcctcagggagagcagccagtgtgctcttcactgctgagccatctctccggctgggtttttggttttgttgtttgtttgtttttgagacagcgccccacagtgtatccgtggctttcctggaactcactgtgtagaccaggctggcctcaaactcaaagagctctgcctgcctctgagtttgtatgtgtaggtcagaggtcaacaactcctagaggttggttctttaactttgtaggtcttccggccggcttgggagttgattttgaactcttggggcccagttgtctgtcagcctgtgacacattcagcctgttggttctgttgagcaaacaggaaccatttcaaacaacagacaattggtgtgacactgaccatttagacaacagtgcaggcaatgtccccagggcctgctgtgctgctggtcttgctgggtactgacactcgtcaagcctgagaactgagtagctgaaaatgtgtccagagatacattcaggaacttgatgtttaatttcaagaaaagtttgaatcgccccaggtgactgtggtttggactcacctggaaacggtttggggctgaatgactgaaggacaggacggaatgaaggactgattgctggctagttcacgcctacctgcttattttagatgttaattctgagcgctgaataccaaccccacagcatacattatacatgcacataggacgatcagagggctacttcctttggtgtcttattcctcgggtactttatggttttgtgtttgagatggtctctggcctggactgtcaccgggtagcctgtccctaactggctgagctccaggggtccgtttccctgattcccgcgttgcagttactgggaatcactgtcacctgcaccaccacacctgactttataagggctctggggcttgaactctcaggcctgcacacttcaaagcaagtgctttacagactgagccaacaccccccacactgcccctcccccactcccatgcccttgtgctgaagtaaaaaccaacagttctttaagacaaggccctactcctgtaagtacctgaggtgcaaggtctcgggacttctgtaagactgtaagagtagtcactgttcttttgttttgttttttgagacagggattctctgtgtagccctggctgtccaggaactcattctatatagaccaggctggcctcgaactcagaaatccacctgcctctaccttcggagtgctgatattaaaggcatgtgccaccactggatgtggtcatccttaattgtcatcatgctgtgtgagtggcaggtgggttcctgctgggtgaccatcctgtatgagggtgggggtggggtccttaattgcaggaagatcacctccttagttctttgatgacctattccttgctaagaactagatttgaggtggttagactcatgaggcatctatggagtttcctagtgggtgactttctaagtcatggtgggtaggagtgagtagtgtgaagccagctggactggaggaacccaatctaccacagacagaccacttctgactttaatctccttcaatttgatccccaatggagagtaggcagttgtgatacatggaagtcccaagcagcaggggaagtctcatgctctaataagcaaagcttatcaattatcagaaacgtgcaatggatcaaaggcattctgctatcagctcccaacctccaggaccaagatggagtccaaagctcctcttatggatagagccatgggatgtccagagagggatcaaacctcccagggcagctagatcctagggaccaaccaaaccttgaggatcatcacgattagtaagagtggtcgcaccctagatttcagcccttgcctggaagatgagcactgtaaaataagactgctcaaataaaggtggcagctggagcctggaatggtgcaatatgagtataaattgagcctaatttaggcctacaataattctaagaactttacagtgcttctgagggctgttcctaaaagtttctgtctaaccactaatggatactcttggctgagcaactggaaggtcactgaaggatgaattttcttggggttatgatgataatgatagctatcaaggaccactctccaatggggttaactgataaaaaggtggggttcataggaaaagccccacttttgccagctcaggtgaggcagttgtagagtctatactggattttacgtggttatggctggtggcccaaattcatagatatttgggggcatttctgctgagtcactggggttcctccttgccttattccaaaggtatcactttagctgaggtggcttgtttattcacttcttggaagcaagccagagacaatgtatcagcttctaacatctgtctgtgccctggctcaaaggataagaaatttctcaccgggcagtggtggtgcacacctttaatctcagcacttgggaggtagaggcaggcagatttctgagttcaaggccagcctggtctacagagtgagttccaggacagccagggctacacagagaaaccctgtctccaaaaacaaaacaaaacaacaaaaaaagatttctcaagtttctctcaaagcctctcgtgaggccagtggctgagagctgagaccctggggaaggcttggtaggaggtggagcccctttccactggaagcaaagcattcttgttggggccaggccttgcccaacaggtcagatccaaaactctactcctgtacaggggagggcagtgtgcaggtccatgagtgtgccgggactgtcctgttagaactcagcaggaagcctttgcttgtgtcatatgctgtttcttaacccatgtgaattggtcagatccctgcctcgctgtcccagaggcaggaggcctgggtgggaatgagctggggcataccttatctcagggctccctgggggactaatctgaggcctcactggctggccttgtagtttccctagctccaaggagctcctaagagacttatttctgcttttactttattttagtctttttttttttaagacagggtctctctctctctctctctctctatatatatatatatatgtatatatatatatatatatatatatatatgtctggctgtcctagaactcaatatgtagactaaactgaccttaaactcccagagatctatctacttgtctctgcttcccaagtactgggattaaagtatgcccagcagttgctgttcctcctcaggagatttcaaaagcccctaattctggcagtgaggtctgtgatgtctacagttagagtttcctttcaattggggagatgctggaatcatgaggtaatgcatgaatatcaagtggaaatgacaagaggcagacatctacctgccaaccatctaccaggagaactgaatcaacagcgagggctcagctggactacatttaggtggacatgacaacacagcccagccccacatacacaagcacacatgcacatacctctccccaccaccaatcacttgctcacaaaccagaaatcgatgttcaacaaggctaaggggctcgcccaagatgacttagctaatcattatggaggctggcttctaaaccacctctgtccatgcccagaacccagtctggttccatccacagtatcatggtttctgcaagaaggaaacagagaatagctggggaccccatgccaagaaggtatttgggactcttgagctgtggccacaccctccgacaccctggagtctagggtctagacagttgtctgtacttccctggggccccagtggcaagaagcttggccttcaagagaagcaatgctttatttacctgggcctaggaagctgcctggtgtttcaagggctagggccccagggagcagagatacagacaaggcttgtaacttgacctcagagcagggggcagcttggttgtaggtgtttgctccagaggactctggcctgccagggcttagctccaggcttcaaagcatactttgttagccatgtttctgtctgagcaaagtgaccagttctgctctaaaccaagtccatctgggaggcggaggcaagcagatctttctgagttctggcatacataatgagttctaggcctgccaacatgccagcctgccagggctatagagagagaccgtgcctcaaacaaacaaagcaacaacaaaaccccaccatgaacaaagcaagaagttctggcatgttgaccacaacaggccaatgttaggctgcggttggggatgcagaccccacctgtgggaggtagagcgtcattgtcatagctggggacccgtggttcccttccaactcttttagctagcttactggaatatagaggggagccgcatgtttcgtgacagccagagcaaagactggatggagcctggcagtcctttgcatgaggattgcaggaggaggactgtgaggagggcaggaaggaaggcctgaaggggtggtccagtttcccacggccgttcatcagcactctggtgctggagagcactgaacagccggacacagatgctgagcccaggagagcccatgctcccagctggcggagtcagctttaggtcacttgggaggatcctattctcagtctctgcccattctaagaggtgtcatgtgggtcctcatagacaaagtgttagccctctcctgtgtgcctaggtggtccatggagagctgaattctattggactggaaactccccggggacaaatgtctcctctctacattctcacagtgcttcgaccccaacttacatttgagcacccatgtccttggcatgtactttgctgagcttgcctggaccctaagtttcaagagagcagctgtgggatcggggtacctgtgagtgactaggcctgcctctgcagtagagtcctgaccaaccagcaatcaaaggtgaaggtttggggacaagggccactgtgtgtatgacagatgtagcacagtctgcctgtgttcccagcgggactgaagttggaaagtcattcttttttttttttttttttttaaagatttatttatttattatatgtaagtacactgtagctgtcttcagacacaccagaagagggagtcagatctcattacgggtggttgtgagccaccatgtggttgctgggatttgaacttcagaccttcggaaaagcagccgggtgctcttacccactgatgggtattctattttaaaaacatacaagaatacctagtagggccgggcgtggtggcacacgcctttaatcccagcactggggaggcagaggcaggcagatttctgagttcgaggccagcctggtctacagagtgagttctaggacagccagggctacacagagaaaccctgtctcaaaaaaccaaaaaaaaaaaaaaaaaaaaaaaaagaatacctagtaggatagccaagtgggtaagggcacttgccgccaagtctgattcccctgaactcactatggaaaaagagaaccagctcccacaggttgctctctgacttcgacacatgtgctgggtcatatgcactatataaatactcattaaaacacacacacactcaagtgctatctcattataaagaaagggtgtggatgtgggtggtggggaagtggggacgatttgtgaggagttgggggagaggaaacagagaacagaatatattgtatgaaaagaatcttattttcaatacgcaaataaaaacatggtttagttatgcaaagaggaagcggtatgaggaaataaaaacatttattaaaggcatctgcaggacagcacccggaagtgaccagggcattacacttttagaagttctgatgtaagcacattgtggcattcgctcatgcgtgcagctgaggatgctgtgccaggccggcataggtagaagatacctcactccccaacctcatctttctagcatcttcggatctcaagggctggtcatacaggaagcagacttgggaggtgcagaggagacggcaccaagggtttcagtctgctcagaaatggagagagggtccctgggatttgagatttctagttcatcagagaaggtcccagggccagctgcttaccctacttgggggtcaaggttttgtctagcctttcttgcctctgctctcccgctaaggggcagacagaggcctagctagaatttcccctccagctcccagcctaggctcaaagggcagaagaggaaggaatgaaggcagacaggctgtcacctcttgagaaagggctcaggggaattctggctatcatggaagtcaggggtatacaatggagcctctaatatcttcctgctgctacaccaggccagagctgccctcagattctgcaagactcaggccaggctctgacctgctcctctgcaaagtgcaggcatttggtaggaaaggcctagccctctgggctcccacagctggggtgcatctgaccccaccctcccctcctccatctgcataccccttccccctattgtccagctcaccctctcccttccaagaactgggagcaagagggtgggagatgagtccaggacaggctgagctaaatgaggaggaagcaggagggaggctatgtaatgacaggcatatcccacctgtggtccagtgtgtgtgcctgaagatgagagatgcttggaaaacctggaagagtgggtgaacatggtaggcagaataaaaatccatggtggggtagatacctaccttctaatacccagagcccatgacttcactatgttctgtggcaacaagggatccagcctgctaatcagtttaatctgaaatagagaggcgtctgggtttggttgcatgggcctataaacttaattactcaagagactaaggctcaagaggatgttagaaaaaaacatatttatttgtgggggggggggggtgtgccattgcatgtgtgtagctgtcaaaggacaacttgaaggacttgttttcctctgcccaccatgtgggtcctggggcctagaactcaggtcgtcagggttaagtgcctttacccctgaaactctgcattcatcctgctctggggtatcttaaagttgagatttgctaggctacacgttgagttcaaggcactctgagctgatgtaacaggaccctatctcaaaatttaaaggtttttttctttctttttttttttttttttggtttttcaagacagggtttctctgtatagccctcgctgtcctggaactcactttgtagaacaggctggcctcaaactcagaaatccacctgcctctgcctcccaagtgctgggattaaaggcgtgtgccatcgccgccgccaccaccaccaccgcccagctaagggtttctttctttttttttggtatttatttcatttacatttccaatgctatcccaaaagttccccatatgctcccccacccccggctaagggtttcaagttccatttatttgtttgtttattgagacagggtctcactacaaagctctggatgtcctgaaactcactctgtaaacaaggctggccttgaactcacagagattccccctgcctctgactcctgagtgctgggattaaaggcatacaccgctatactcagccatttacaagggttcttctaagtgggaaagaggaggacaagggagatagaaccagagacatgacaataaggaaaagacaggaccatctatcactggttttgaatctagaaggaggcaccatgaaactaagaaatggaggaagcctttaaaaactggacaatgaaggggatttaaaaaccttttttttttttttttttttttttttttttttttttttttttgaggcaggaaactcattcttctatatatagcccagactggccttaggctttagaacattctggctcagtcttttgagtgctggggttacaggtgtgtgctgccttgcccataggctgtttcctagagcccatgtttgctatacaccctgaggatagccctgcgggacctcttctgtctcttggccccctcagaattgtaactgtgtgctagtctaggccacgaagtgcaaggacatctcttacagcggcaacaggaaactgacactcctcagaagcttctagaagggaggctgcagctgtaccaggacctagaccttgattggagtcagaatcacaggacaaacatgttacctctcaaatgaaccctccctgggatggccagggagaagatcctgtggatctcctctgtcctagggcccagggagcactgggagtgtagaggtttagtaaaagagcctgtccatctgggaaaatcaaagcctgggataggccaagaaggacagtgcctctgcaggacacgccgatagggaacctgcccaaggttgagcagtctctggatgagcgcctgtaaactgaggccctcaggacagccagacagaacctataggacctggctaaggactctccagggtaaagcctgtggtcacactcactggtcttcagtgcttagctgtccttgctaggggggtccagtgtggctcggggaaggcatttaaaggaagttactgcattaggtaccaaccagatctgcataactagcttaactagctgtgtggcctcacccaggctactggctccactggcggcctcagcatcttcattcacaaagtggaagcgatgttggttgtcaacttgacacacctaggaagagagaatgaggacccaggctgtgatagtgccaccatcggattggcctgaggttggtcagtgccaacaagctgagcaagcttcaggatggcagccagcaggcagtgttcctgtctctgctgtgcttcctgaccgggccctcctctgactgatggcgtaacctgtaagccaaagagaacctttcttccctacgttgtctgtggtcagtgttaatcacaacagaacacccattgaacagtggagagaacagggtctgtctcagaggctcacagagcttgtgggtctgtgagagaaacaaggatcctgccagaaccgtagtccgcctgccttttggtgtgtgtgtgtgtgtgtgtgtgtgtgtgtgtgtgtgtgtgagatcagtgcatcctgaggggaaggaaggacaagtgcaaagtcattagaagctcttctcaccctcaggcaggaggctgtagcccagccatgagagcagggcccggccgaggctcctcacctctgtagcagctcacacaggatgcggattcgagagccacccttgtccccacaggatgtcctgctggctacagctttgcactatgcttgtttgttttatgtaccaacctcctaatggggtctcactatatacctcagaaactggctttgaattcacagcaatcctcctgccttagtcttctgaatgataggattacaagtgtgcaaatgtgtgtttctaagcctggctctttttttttcccccttcttccttttttttttttttttcccccggagacagagtttctctgtgtagccctggctgtcctggaactcactttgtagaccaggctggcctcgaactcagaaatccacctgcctctgcctcccaagtgctctattaaagcgtgcgccaccactgcccagaaccaccttcttttaaggaatgtttttttgtgcactcatgaactctccacatcccacaccatggatgcct

SEQ ID NO: 2774 - DNA, 1888 bp, Mus musculus
tcgaggtaggacgtgctttcacagtctaagccgaaccgaaccgaaccgaaccgaaccgaaccgggccgagttgcgccgaggtcagccgaggtggccagaggaccccagcatctcgggcatctttcgcttcgtgcgcgcatcgcgtacctacaccgcaactccgtgcctcgctctccggcaccctctgcgaatcgctcctgcagcaaaggccgatacaaagcaggagaaaaagagccagatcccaagacatggaaggcaaacttccgttgtgccatgaactccctgccagacatcgaggaagtgaaggatcagagtaggaacaagggcagctctgctgtgcgggtgtaccggatgctgccacccctcaccaggaaccagaggaaagagagaaagtccaagtccagccgagacactaagagcaaaaccaagaggaagctgtgtggagatgttagcccggacactttctctgatggactcagcagctctaccctacctgatgaccacagcagttacaccactcagggctacctgggtcaggacttggatatggaaagggacataactccagcactgtcaccgtgtgtcgtcagcagcagtctctctgagtggcatatgcagatggacattataccagatagcaccactgatctgtataacctacaggtgtcacccatgccttccacctccgaagccgcaacagacgaggatgaggaagggaagatagccgaagaccttatgaagctctttgaacagtctgagtggcagccgacacacatcgatggcaagggatacttgctcaatgagccagggacccagctctcttctgtctatggagacttcagctgcaaagaggaaccagagattgacagccctcgaggggacattgggataggcatacaacatgtcttcacggagatgaagaatatggactccatcatgtggatggacagcctgctgggcaactctgtgaggctgccgccctctattcaggccattccttgtgcaccatagtttgggtctctgacccgttcttgccctcctgagtgagttaggccttggcatcatggtggctgtgatacaaaaaaagctagactcctgtgggccccttgacacatggcaaagcatagtcccactgcaaacaggggaccatcctccttgggtcagtgggctctcagggcttaggaggcagagtctgagttttcttgtgaggtgaagctggccctgactcctaggaagatggattggggggtctgaggtgtaaggcagaggccatggacaggagtcatcttctagctttttaaaagccttgttgcatagagagggtcttatcgctgggctggccctgaggggaatagaccagcgcccacagaagagcatagcactggccctagagctggctctgtactaggagacaattgcactaaatgagtcctattcccaaagaactgctgcccttcccaaccgagccctgggatggttcccaagccagtgaaatgtgaagggaaaaaaaatggggtcctgtgaaggttggctcccttagcctcagagggaatctgcctcactacctgctccagctgtggggctcaggaaaaaaaaatggcactttctctgtggactttgccacatttctgatcagaggtgtacactaacatttctccccagtctaggcctttgcatttatttatatagtgccttgcctggtgcctgctgtctcctcaggccttggcagtcctcagcaggcccagggaaaaggggggttgtgagcgccttggcgtgactcttgactatctattagaaacgccacctaactgctaaatggtgtttggtcatgtggtggacctgtgtaaatatgtatatttgtctttttataaaaatttaagttgtttac

SEQ ID NO: 2775 - protein, 245 aa, Mus musculus
MNSLPDIEEVKDQSRNKGSSAVRVYRMLPPLTRNQRKERKSKSSRDTKSKTKRKLCGDVSPDTFSDGLSSSTLPDDHSSYTTQGYLGQDLDMERDITPALSPCVVSSSLSEWHMQMDIIPDSTTDLYNLQVSPMPSTSEAATDEDEEGKIAEDLMKLFEQSEWQPTHIDGKGYLLNEPGTQLSSVYGDFSCKEEPEIDSPRGDIGIGIQHVFTEMKNMDSIMWMDSLLGNSVRLPPSIQAIPCAP

SEQ ID NO: 2776 - DNA, 2119 bp, Mus musculus
cgcggcgccgcggactcgccagtgcgcaccactccttcgtcgaggtaggacgtgctttcacagtctaagccgaaccgaaccgaaccgaaccgaaccgaaccgggccgagttgcgccgaggtcagccgaggtggccagaggaccccagcatctcgggcatctttcgcttcgtgcgcgcatcgcgtacctacaccgcaactccgtgcctcgctctccggcaccctctgcgaatcgctcctgcagcaaagccaccatgccaatcactcgaatgcggatgagaccctggctagagatgcagattaattccaaccaaatcccagggctgatctggatcaataaagaagagatgatcttccagattccatggaagcacgctgctaagcacggctgggacatcaacaaggatgcctgtctgttccggagctgggccattcacacaggccgatacaaagcaggagaaaaagagccagatcccaagacatggaaggcaaacttccgttgtgccatgaactccctgccagacatcgaggaagtgaaggatcagagtaggaacaagggcagctctgctgtgcgggtgtaccggatgctgccacccctcaccaggaaccagaggaaagagagaaagtccaagtccagccgagacactaagagcaaaaccaagaggaagctgtgtggagatgttagcccggacactttctctgatggactcagcagctctaccctacctgatgaccacagcagttacaccactcagggctacctgggtcaggacttggatatggaaagggacataactccagcactgtcaccgtgtgtcgtcagcagcagtctctctgagtggcatatgcagatggacattataccagatagcaccactgatctgtataacctacaggtgtcacccatgccttccacctccgaagccgcaacagacgaggatgaggaagggaagatagccgaagaccttatgaagctctttgaacagtctgagtggcagccgacacacatcgatggcaagggatacttgctcaatgagccagggacccagctctcttctgtctatggagacttcagctgcaaagaggaaccagagattgacagccctcgaggggacattgggataggcatacaacatgtcttcacggagatgaagaatatggactccatcatgtggatggacagcctgctgggcaactctgtgaggctgccgccctctattcaggccattccttgtgcaccatagtttgggtctctgacccgttcttgccctcctgagtgagttaggccttggcatcatggtggctgtgatacaaaaaaagctagactcctgtgggccccttgacacatggcaaagcatagtcccactgcaaacaggggaccatcctccttgggtcagtgggctctcagggcttaggaggcagagtctgagttttcttgtgaggtgaagctggccctgactcctaggaagatggattggggggtctgaggtgtaaggcagaggccatggacaggagtcatcttctagctttttaaaagccttgttgcatagagagggtcttatcgctgggctggccctgaggggaatagaccagcgcccacagaagagcatagcactggccctagagctggctctgtactaggagacaattgcactaaatgagtcctattcccaaagaactgctgcccttcccaaccgagccctgggatggttcccaagccagtgaaatgtgaagggaaaaaaaatggggtcctgtgaaggttggctcccttagcctcagagggaatctgcctcactacctgctccagctgtggggctcaggaaaaaaaaatggcactttctctgtggactttgccacatttctgatcagaggtgtacactaacatttctccccagtctaggcctttgcatttatttatatagtgccttgcctggtgcctgctgtctcctcaggccttggcagtcctcagcaggcccagggaaaaggggggttgtgagcgccttggcgtgactcttgactatctattagaaacgccacctaactgctaaatggtgtttggtcatgtggtggacctgtgtaaatatgtatatttgtctttttataaaaatttaagttgtttac

SEQ ID NO: 2777 - protein, 329 aa, Mus musculus
MPITRMRMRPWLEMQINSNQIPGLIWINKEEMIFQIPWKHAAKHGWDINKDACLFRSWAIHTGRYKAGEKEPDPKTWKANFRCAMNSLPDIEEVKDQSRNKGSSAVRVYRMLPPLTRNQRKERKSKSSRDTKSKTKRKLCGDVSPDTFSDGLSSSTLPDDHSSYTTQGYLGQDLDMERDITPALSPCVVSSSLSEWHMQMDIIPDSTTDLYNLQVSPMPSTSEAATDEDEEGKIAEDLMKLFEQSEWQPTHIDGKGYLLNEPGTQLSSVYGDFSCKEEPEIDSPRGDIGIGIQHVFTEMKNMDSIMWMDSLLGNSVRLPPSIQAIPCAP

SEQ ID NO: 2778 - DNA, 2006 bp, Mus musculus
cacttttggcggtcgcagcttggctcccagctcttgctttcggacgcgcagtgttcggtgcagaggttggctcgctgccttgactggctggaccgggtcgtgaactactgggctttcgggaggaggtgccacagccaccatgccaatcactcgaatgcggatgagaccctggctagagatgcagattaattccaaccaaatcccagggctgatctggatcaataaagaagagatgatcttccagattccatggaagcacgctgctaagcacggctgggacatcaacaaggatgcctgtctgttccggagctgggccattcacacaggccgatacaaagcaggagaaaaagagccagatcccaagacatggaaggcaaacttccgttgtgccatgaactccctgccagacatcgaggaagtgaaggatcagagtaggaacaagggcagctctgctgtgcgggtgtaccggatgctgccacccctcaccaggaaccagaggaaagagagaaagtccaagtccagccgagacactaagagcaaaaccaagaggaagctgtgtggagatgttagcccggacactttctctgatggactcagcagctctaccctacctgatgaccacagcagttacaccactcagggctacctgggtcaggacttggatatggaaagggacataactccagcactgtcaccgtgtgtcgtcagcagcagtctctctgagtggcatatgcagatggacattataccagatagcaccactgatctgtataacctacaggtgtcacccatgccttccacctccgaagccgcaacagacgaggatgaggaagggaagatagccgaagaccttatgaagctctttgaacagtctgagtggcagccgacacacatcgatggcaagggatacttgctcaatgagccagggacccagctctcttctgtctatggagacttcagctgcaaagaggaaccagagattgacagccctcgaggggacattgggataggcatacaacatgtcttcacggagatgaagaatatggactccatcatgtggatggacagcctgctgggcaactctgtgaggctgccgccctctattcaggccattccttgtgcaccatagtttgggtctctgacccgttcttgccctcctgagtgagttaggccttggcatcatggtggctgtgatacaaaaaaagctagactcctgtgggccccttgacacatggcaaagcatagtcccactgcaaacaggggaccatcctccttgggtcagtgggctctcagggcttaggaggcagagtctgagttttcttgtgaggtgaagctggccctgactcctaggaagatggattggggggtctgaggtgtaaggcagaggccatggacaggagtcatcttctagctttttaaaagccttgttgcatagagagggtcttatcgctgggctggccctgaggggaatagaccagcgcccacagaagagcatagcactggccctagagctggctctgtactaggagacaattgcactaaatgagtcctattcccaaagaactgctgcccttcccaaccgagccctgggatggttcccaagccagtgaaatgtgaagggaaaaaaaatggggtcctgtgaaggttggctcccttagcctcagagggaatctgcctcactacctgctccagctgtggggctcaggaaaaaaaaatggcactttctctgtggactttgccacatttctgatcagaggtgtacactaacatttctccccagtctaggcctttgcatttatttatatagtgccttgcctggtgcctgctgtctcctcaggccttggcagtcctcagcaggcccagggaaaaggggggttgtgagcgccttggcgtgactcttgactatctattagaaacgccacctaactgctaaatggtgtttggtcatgtggtggacctgtgtaaatatgtatatttgtctttttataaaaatttaagttgtttac

SEQ ID NO: 2779 - protein, 329 aa, Mus musculus; identical to SEQ ID NO: 2777

SEQ ID NO: 2780 - DNA, 2108 bp, Mus musculus
gagcagcgccgggggactcggatgtccgcctgcgcgcacttttggcggtcgcagcttggctcccagctcttgctttcggacgcgcagtgttcggtgcagaggttggctcgctgccttgactggctggaccgggtcgtgaactactgggctttcgggaggaggtgccacaggtgttgcttgcgccacttctcttaacagcaggggaaaccaggccggaaggggttgcgccccagcctccaccatgccaatcactcgaatgcggatgagaccctggctagagatgcagattaattccaaccaaatcccagggctgatctggatcaataaagaagagatgatcttccagattccatggaagcacgctgctaagcacggctgggacatcaacaaggatgcctgtctgttccggagctgggccattcacacaggccgatacaaagcaggagaaaaagagccagatcccaagacatggaaggcaaacttccgttgtgccatgaactccctgccagacatcgaggaagtgaaggatcagagtaggaacaagggcagctctgctgtgcgggtgtaccggatgctgccacccctcaccaggaaccagaggaaagagagaaagtccaagtccagccgagacactaagagcaaaaccaagaggaagctgtgtggagatgttagcccggacactttctctgatggactcagcagctctaccctacctgatgaccacagcagttacaccactcagggctacctgggtcaggacttggatatggaaagggacataactccagcactgtcaccgtgtgtcgtcagcagcagtctctctgagtggcatatgcagatggacattataccagatagcaccactgatctgtataacctacaggtgtcacccatgccttccacctccgaagccgcaacagacgaggatgaggaagggaagatagccgaagaccttatgaagctctttgaacagtctgagtggcagccgacacacatcgatggcaagggatacttgctcaatgagccagggacccagctctcttctgtctatggagacttcagctgcaaagaggaaccagagattgacagccctcgaggggacattgggataggcatacaacatgtcttcacggagatgaagaatatggactccatcatgtggatggacagcctgctgggcaactctgtgaggctgccgccctctattcaggccattccttgtgcaccatagtttgggtctctgacccgttcttgccctcctgagtgagttaggccttggcatcatggtggctgtgatacaaaaaaagctagactcctgtgggccccttgacacatggcaaagcatagtcccactgcaaacaggggaccatcctccttgggtcagtgggctctcagggcttaggaggcagagtctgagttttcttgtgaggtgaagctggccctgactcctaggaagatggattggggggtctgaggtgtaaggcagaggccatggacaggagtcatcttctagctttttaaaagccttgttgcatagagagggtcttatcgctgggctggccctgaggggaatagaccagcgcccacagaagagcatagcactggccctagagctggctctgtactaggagacaattgcactaaatgagtcctattcccaaagaactgctgcccttcccaaccgagccctgggatggttcccaagccagtgaaatgtgaagggaaaaaaaatggggtcctgtgaaggttggctcccttagcctcagagggaatctgcctcactacctgctccagctgtggggctcaggaaaaaaaaatggcactttctctgtggactttgccacatttctgatcagaggtgtacactaacatttctccccagtctaggcctttgcatttatttatatagtgccttgcctggtgcctgctgtctcctcaggccttggcagtcctcagcaggcccagggaaaaggggggttgtgagcgccttggcgtgactcttgactatctattagaaacgccacctaactgctaaatggtgtttggtcatgtggtggacctgtgtaaatatgtatatttgtctttttataaaaatttaagttgtttac

SEQ ID NO: 2781 - protein, 329 aa, Mus musculus; identical to SEQ ID NO: 2777

SEQ ID NO: 2782 - DNA, 1960 bp, Mus musculus
ggactcggatgtccgcctgcgcgcacttttggcggtcgcagcttggctcccagctcttgctttcggacgcgcagtgttcggtgcagagccaccatgccaatcactcgaatgcggatgagaccctggctagagatgcagattaattccaaccaaatcccagggctgatctggatcaataaagaagagatgatcttccagattccatggaagcacgctgctaagcacggctgggacatcaacaaggatgcctgtctgttccggagctgggccattcacacaggccgatacaaagcaggagaaaaagagccagatcccaagacatggaaggcaaacttccgttgtgccatgaactccctgccagacatcgaggaagtgaaggatcagagtaggaacaagggcagctctgctgtgcgggtgtaccggatgctgccacccctcaccaggaaccagaggaaagagagaaagtccaagtccagccgagacactaagagcaaaaccaagaggaagctgtgtggagatgttagcccggacactttctctgatggactcagcagctctaccctacctgatgaccacagcagttacaccactcagggctacctgggtcaggacttggatatggaaagggacataactccagcactgtcaccgtgtgtcgtcagcagcagtctctctgagtggcatatgcagatggacattataccagatagcaccactgatctgtataacctacaggtgtcacccatgccttccacctccgaagccgcaacagacgaggatgaggaagggaagatagccgaagaccttatgaagctctttgaacagtctgagtggcagccgacacacatcgatggcaagggatacttgctcaatgagccagggacccagctctcttctgtctatggagacttcagctgcaaagaggaaccagagattgacagccctcgaggggacattgggataggcatacaacatgtcttcacggagatgaagaatatggactccatcatgtggatggacagcctgctgggcaactctgtgaggctgccgccctctattcaggccattccttgtgcaccatagtttgggtctctgacccgttcttgccctcctgagtgagttaggccttggcatcatggtggctgtgatacaaaaaaagctagactcctgtgggccccttgacacatggcaaagcatagtcccactgcaaacaggggaccatcctccttgggtcagtgggctctcagggcttaggaggcagagtctgagttttcttgtgaggtgaagctggccctgactcctaggaagatggattggggggtctgaggtgtaaggcagaggccatggacaggagtcatcttctagctttttaaaagccttgttgcatagagagggtcttatcgctgggctggccctgaggggaatagaccagcgcccacagaagagcatagcactggccctagagctggctctgtactaggagacaattgcactaaatgagtcctattcccaaagaactgctgcccttcccaaccgagccctgggatggttcccaagccagtgaaatgtgaagggaaaaaaaatggggtcctgtgaaggttggctcccttagcctcagagggaatctgcctcactacctgctccagctgtggggctcaggaaaaaaaaatggcactttctctgtggactttgccacatttctgatcagaggtgtacactaacatttctccccagtctaggcctttgcatttatttatatagtgccttgcctggtgcctgctgtctcctcaggccttggcagtcctcagcaggcccagggaaaaggggggttgtgagcgccttggcgtgactcttgactatctattagaaacgccacctaactgctaaatggtgtttggtcatgtggtggacctgtgtaaatatgtatatttgtctttttataaaaatttaagttgtttac

SEQ ID NO: 2783 - protein, 329 aa, Mus musculus; identical to SEQ ID NO: 2777

SEQ ID NO: 2784 - DNA, 28091 bp, Homo sapiens
gatcacttgagctgcctctagtctacctcccagcctccagtgtgcagaagggaccagatagggtggagcaagcaggcagggcaggtgcttagggtgaaacctttaaggagctactcaccgtcagactcacccaagtatagggttggcccctgagagcgagtacctccttaaatgttgtgcctttaggaaactatctcaccctagtcttgccctggtgtgccacaggcgtaatcctctgtagcagccacagaaagttttctaaagcataggtcaggccaccagtggccctcacaagacctgccctagcatttaattcaacagacacctgatgatagaccctggtctgggccttggctccagaaaggaaggcaacatcagtccagccctgagcggcctctgtctaccaggatagagtccactcttgagcacagcatccaggctcttcagagtgtggcccctactggttggtccagcctcagcttctggggcagctactccaggccacaccaaaagcgagatccgttctgcacttctgagctgccaagcctttccttgggctgttttcacattctggaatgccctcccctactattagcctattaacctttgactcatcctttgaggctttgctgaactgtcccctcctcagagtagccatctgtgaacaatgactgagataacctgctccgtctccatactcccagcatctctgcctctttgcctcttactcgaggtatgacatacgtctggcactgcaatcagagcacacttactaagtgcctactgcctgagagcaatgtgctgggtgccagagtgggggtgtgggggtggttctgagcatcctctgtccttggagagctcacatgcaggttagtagtggagaccacggtgcttacttctaagtcccctcacagggcccagcgtaggcccaaggctgagaagcattccaggaccatcagctgtccctaaatctttagccttctggagtcacctcctccactaaaagcaaagcataacacactcatgccccagcccatggggctgtgagaagccctctccaatattcacggggattctcaaggaagaaataacggcttttgcttcctggaggtgactagccaccagaggcctcctggcttagagctcccagcatacccttgtccattttgctcccaattatgcacccagacctttaaacactcccagtgcagcaattcatgctggctatctgatgtggtgacacattcactgtggtttgtcacctgtcaaggtggagggcggtcatgctttctcccacaccatccaggcaggtgggtctctgctgaccctttgctcctcttgccagtcaatcagtcaattggtcaacagatgctttcccaaggacttactcatgcagagaaaaaaactggaatctttcacacctggctgaggtcctacctaaatttctttgtggacctactttccaggagaggaatggaacagccagctaatgttaacagctcctttcccctgttctgtgtctgggtggcccttgccactaggctcccagtctctgcaggactttgaggggccacacatgtcaacagggctatgggaaagggagcagaggtccccttggagagatagaacctggcagaaacaaccacagcgctgcttggagaagccacattcttcctcccctccttctggggcacccaccagtttctgtggaaattgtcttattgcaaagaccatcgtggggaaaatgtgcatgctgctgaggccatctgaatccaccatccatattcctatctatccatctgtctgttcgtccatccatccatccatccatccatccatccatccaaccatgtcacactggttcatggggcacctgctctctgctcagctgaggctggctcctgaggctacaacagtgaacagggccgagcacccacagggacacctgttctcctgtctctgccctgctttccttccataaatataccaataactcagcatttgctgagtccagaccacaaagacacattcctgtgggtatttattagcttgagctacatctaccatttctaagatgtaacatcaaatggagcccaacacagacattctgaggaccaggtcctctgccaggtcaaatttatgggctaggattagagttggattccctggatcaaaaatactatttggaccgggcagaggaccagcatcactgtttctaaccctgggccacaggagaaagaagggacaacaacctatttgatctgtggcctcactaaaagctgccacggttggtgggcccctccgtggcactccttcactgtcctgagcctcatttccagggctgcccctggagttgggattcccaggttgagtcaccagggttgccaggcgctcatggcacaagctccactcttgcagtatttggactttccctggccctctcccaggccagccaccctgatcctaagcctgggctggtgaaagtcagtgttggcccatacagggatgctagggaggtcttgctgcctctccttccactggctagctggctgcttccagaatagccaccactgatacctgccccagccccagctcttctgggctgagggagctccatttagtctgatttatgtctttccaagagccatggtctcagggccataaggaaagagatccttaccatagacttgtggtctcaaaggcatgcatttaggaaacatgggcttgccagtgacactgtccaccttgaccccaggtactgctgtgggctgcagagatcagggagggtactggactctccctctgccacccaaactcccagccttcttgtctcagatccagggccaacccaccataatccctggcctgagctccaagccctggggagggaaggaagtggctgaccccacggccagcattcctctgtgatgactacagtccgccttctgcccagccatcccagctggaaggcagttctcagggaactacaagggaagcccctcccacaaaagccaaggcatcttctgcagagtggggcttccttcaactggggacatggcaggacctgagtgggctaggggtcctgtgggggagcaggtcagaaggcatatggacctcacagatgcctcgaactcaccctactccttttctcacttagtaaacagtcacaagccccccgtggaggttggtgggttctagatccaggagactagaccagacagtcagggctcactctcaagggctccaagtcatgttcggggaaatcctccaacaaataagcaaaagaggacactacggatatgatctcagtaaggagacctcatcgtataaggacaataagatgggatgtgacagtgaggggacagctggggacctcagtcatttgaggggatatcccaattcctcagatcccacctgcctgcgcacagtcccctctttccccgcgtgcacaccctcaaaccccttagcttgtagaactcctccctcattccctaaaggccaccctgcaggcaggtccatccttcacacccccaccctcagcatgaacaccatccggagaggcctgggcaggtgcattcaggtggggcttttccggggccggttttccccggctcccgctggaacttccagctggccactggccggtaacactggacgcccgcccgtcccccggcccccgccgctgcgcagacctcagcgctcccagcgtggttcggttcccggaaactcctcgatttccctgttgccgccgcgtttgcaagaaaccgaaacccaggctccgccccttcggcgcggccccgcggaacccggcgatggggctgacccccactggatggccggacccaagccctcccctacccggcccctgcgccccgccccaccgccagctgcaaggcccaggcggaggtgggagccatctgagtgcctgcgcgccgaaccccggcgggcagcatccgtccagccgctcagcaccacccgcgcctccaacgggagagccgcaggtctatcccaagtctcaggctgcaacggatggcagtgccccggcaagggacgcaacgcggccttcccctgcggcaatttacaagcgggcgccttttctgtgcatcccctatgtccctgcgaaaccgagcggaaggggaaggtggggggggagcagggaagtgcagaggtgttcgcggaaagctctgcaccccgattgttgctagctccatctcgcagggtgagataatgggcacagagaagtttagtaacttgcctgaggtcacacagcctgtagctgctgacccggctgcaaacccatggcctatagcaagaggctgggcggggaaggaggaggaagtgccttggtcgcgggcaggtgagccgcctggcaggggcggggctgccagcttgctgggggtaggggtggaagtggggtggggaggaataggtagggaggaggcgggcagccaccagggctgggaggatctgcagttctcctgctggccctccctttccaggaagccggccagcttggagccggctgctcaccccgactcaccccccgcctgggcggagcaggaatgtggaagttggcccgaaaggactgtgccccctccccgtcaaacaccccccccccgcgtcccccaccaagttctggccggggctgtggagcgtgggtcacctgggggcgaaggactccacatcacggtgaagtggaggtgctgcagcccccacaaagaccgagaagcctgccaggggcgccccgggcgaacggcagtgggcgtgggccgttctgcagcacccattggcgcgggggaggagagtgctgatcccatcaagccccgctccaggtcgcggccgctgggcctggcccaggagcctcccccggcctcggggccccatgggactgacagggggctgagttctctttcctcccaacggcggtgtttataagaaatgaagctccgcagcggccatcagcggcagcccacactgtcaccccgccccgctctcagggggttccggaacagccctgagcactggagcaattccttggctcagtattctatcatgaccccctagtgattttccagccagcttcagccccacattctgcatttaggaattttataacagtgcaacgtttattctgctgtgtcatacagcatattttgccaaacctttgagaggggaggggctggtctggtgccccagtgtatctccagaaccaaacctggggttcaccaaaaagcaggcctgcgtgattcatatgtgttgaatgaattaagggactttctttctctccagttaggctccttgcaggcagggtgatgacccttggattctgccttcaagcttttggatgcttttatttctggcttgtgttctgcaattcacagtttaggactgcctgcctcccaggtttctgtgaaaatcgagatgaaggctttgagcatttcagagagccctactacttctggacctggaacctggaaggcatgctggggagtttgtctgctttggggaccgtggccccctctctgggtagcaggctccacaggtagcaggtctcccagtcgaaaacctagttcaggtcgggcgccgtggctcatgcctataatcccagcactttgggaggccgaggcggtggatcacctgaggtcaggagttggagaacagcctggccaatgtggtgaaactccatctccaccaaaaatacaaaaattagctgggcatggtggcgggtgcctgtaatcccagctacttgggaggctgaggcaggagaattgctgaacccctggaggtagaggttgcagtgagccaagatcacgtcactgcactccagcctgggtgacagagcgagactccgtctcaaaaaaacaaaacaaaaaaacacctagtttaaacctcactggcacctgcacctcagctctcacaaactctcatttctgagcacacactcatctctatcagcagaggatttaaccacaggttgccaagaaatgtctgtatctgagagaattcataatctgagatagaaggaacactaaactccagaggaagaggggtcacacatcaacttaactaggatttactgagtgcctaccatggtagccactcttcgggggagtgcaaggatggcggcatcaccttagtgtggtccgtgtggccctgtgcattgatgtgtgtgtgcatggtgacatgttgggagccatgcttctgggcttcaggactaactgcagcccacttagggggtgaacagtgttttgagagcctgagggaggggactggggacaagaattgtctgtcagggtagaggctcccacagggtgtgtgaatgtgtgtgtgagatgatcttgccttcagcatcctgattgcagaagtcacttcaaaggagcccctgccagccagttagcctcctcttgccagcacagaaaaatccaggtcccaatacagagaggccacacaatgaattcaccctcattgagtgaggctatggatgagaggcatctgtaaggaagaccttgcacagtgcagggtgctggctaccctcagctaacccctagctcgcttcagctgctgggcatgaggaacctgcttagatttctcacagaaaacatggagagttctttttctcacagaaaaaatgtagagtttgttccccagagtttgttcccaccatgtagaaagtgaccagtggtgaaaaggaaacataggaaagttaaggaccaaagggtccaaggagggaaaagaaaggacttctggttggttgctttgcgggcattttgaagagatcaggcatatgctctgggccttaaaaaaagacacagagattgaagtggtggggtgggcaagggagagagagatggagagagggtgagtgttgccaagtatcctgaggagacagggatgaggggacaaacacagtgtgttcagataatggaaatacagtgaaaggttcatgcgttcctgttcatacatttcatttgacttatgtcttacagtttggaaataattttgatagtctaattttacaattaggagagatggagagagattatctctattttacagatgagaaaactgagccccagagagggacagtaacttgctaagatcacatagcaagtggaaaaagcacaataagaacccaggctttcagactcaaatcctgtgttctcttttcatccccctttagtttcatcttccctactgccaagggtagggaagctgtcagggacagaaggttggaatgggaccccaggacaagactgagcagagatttgaatgtggggctgaatgtaggggagctcagaaggctcctgggtggccccgagtgttagggagatcatccgagttagggagatcattccagtgcagaggcaccatcttccccatctacctgggcaaggcaaggaggcccaaggggaggttggggcaacaatagtctggtcctggactatgaaatcacaacccgatacagggaaggaagacccagaagaccaggtgggaaagaaaagggctggctccgaattaataagagcctacaggagcctatgtgttctgctggggatcacagaatgttctacatcttagaatgtgattcatcaaaagccattacaataaaaatgttgggtacttaaacatggcttagctttatttcactgatttggagtatagcacccctagtcataataagcatattcttacaggcttcaaaataaagtaagaatccctaaggttaaaaaaaaaaaaaaggtcaaagatgtaaatgtaaatgacagtttcattggtaaatcctaactggggaatttctcctaagcaaaaaattattgatatgcacaaagatttagctaatagtgttgtttgtattacgaaaaaatggaaataacctaactgtcctacaataggggattaattgggtaaatttttatttatccttgtgaaagaataatgtatacctattacaaatgacattgcataagtacatttcatgacatggaaagatgctcattatggctaaatatacatatgcatatacgggtatatttatacctgtatctgtgaattaaaattaagtttttgttttaaagcattttttatagtgtcctgttgccttcacagggtcactgtggtcaacttatcagaccacaaagatgcaaacttcctttccctaatctcatcctgaattttccagtggatgtgtcaggttctcaggggaaggacaagcatctatttgctgtaccaagaaaggatcccacgactcaggggtcacttgttttctcttattcttgctcagaaggtcttggtccctgtagcaagtccccacttccatttgtcacttaaagtaccccaaaacccacctttccattccagagtgtcattgccctccactttgcttaacactcagttaggttccttcctcagtttctcctacctcctttcctctcctagctcctgacccacctctatctggtagacagttttgcccattcctgctggtatcctgggaaccaggtttggcattggtcacagcactcagattgcaatgcgccagaatgggattaacccatgcatttcctctacgggagggaggtagagtgactggcaagtcgaatgttgcatgggtgtgtctatttatagcctgcaaaatggggtgctgccctggagggagagctggggtgaaggaaatgacacgcctgggagagtaacttacttctgcaggagctttagggagatgaaggaagaagcctcctgggccagagttttggatggaaaatgaacacccagtcaagtctctaggactatacgtggggcggggactagttgtgcgcgagagttaagtaggggccttaccaaggagcatgggacctgggctccccaaccctttggctagccccatggcgttgatcagccctgagctaattcctccatgctgcccagaacctctctgggccaagccctggggactcagagatgacagcaatgcttccattgcggaactcccatacgcgggccacagggaggctctggaggcggcctgaggcaagagtgctaggagggatcagagctagcccacccctaccctcactcagccgtctgggcttctctgaaccccttctcctcctctgttccctaaagccagccagggggagtcccagggaggcagaccgaaaaggggtggggtgtcatcctggtcactattagaccctgcaacggcgaccttgaaaactactcagcgtctgttgcccgagtggagcatagtgctttacaatctcttcccatcacagcaaaccatcaaggtagggctactattattttatggttgaaaaacagaggtcctgcgtcccttgggggctgtgccagcagcggccaagttgggatttcccctggtccagcagccccagacagcacacggggcagggtaggctttctgccttcttcacttccccagggcaggtgagtgacctggagggagggggtcacccctaaaaacaggggtagtgctaggactgaaaccctcccttcttgatatcccactggcaagcttgaggagccaggctgccagtcgggagattcggcccagtgttcccactggagagggcggcaagtgcccgggcgatcccctcacctgcgttcgggagatatacccccgcccccgccccgccaggagggtgaaaagatggccccaggagccagccggctgggacaaggcggagtgagaggacaggctggggccaggggcgctgggctgtcccgggcagccctcctccgggcaagccggagcaggggtggattgggagcgctcggggcgggcccgcggtggccccggggcggtggcgcccggccggagagggtggggcggagcagccgccctgtacttccccttcgccgctagctctacaacagcctgatttccccgaaatgacggcacgcagccggccaatgggcgcccgcgcggctgtccgggggcggggccggccagggctggggaatcccgctaagtgtttggattgctcggtggcgccgctgccctggcagagctcgccactccttagtcgaggcaagacgtgcgcccgagccccgccgaaccgaggccacccggagccgtgcccagtccacgccggccgtgcccggcggccttaagaacccggcaacctctgccttcttccctcttccactcggagtcgcgctccgcgcgccctcactgcagcccctgcgtcgccgggaccctcgcgcgcgaccgccgaatcgctcctgcagcagaggtgagtacgcctttgaggcgcggggcaccggcggcgtcgaataaaaggcgcgcggggcaccaggaagtggggggtcgaaagctccaggctggagactcgccggcgcgcggcgttgcccgggcctccgcgcgggctccggggggcgccggaggagctgcgagccgcgggccgcggcgcggggagggcgggacgcggcgtggaccgcccacccggacgaggctgccggcgcccggcagctttcgcagatctgcgtgcgcgcagccgccaggggcctgtaggtggcccgctatgttcgtcccgcgcatccacacgccgtgccggggaccgagtgtcagcccacgcgtgggcgcccagtgctcccggctttcggcggtcccagctccgcgcccaggcgacaggttttgggctccctgtgctggtggcaagggctggcttactgcccaggtggctggagggaatcgtgacctacggagactgcgggaagaggcgccacaggtgttccttgggccacttctccagaggaggggaaaccgggccggaagggttagcgtcctggtcttagcgttgtgggcgctgtggctgtcaggaaggcgtagaatggattcaggggggcgggagggggctgttcagggtgacggctagccctttgctagctagtggttacaactcaagtcaagggaatttcttcttggcatcaagcaaaagaagtccctcccttcccaaaggatttgaattttgagcgaaaagttctgaaattagggtatctgtgcattttgtctcttttcctgcatatgaatcctgaagccatcacttgcatgcctgtctcctccagagactggctgggaggggctgaaggaaggggcaaaagcatttttgcctaagatgctgaaaaaatttggagagcagttttattccagcgcagctcccctccgcactgagtgtagtacctagcagctggctgaggtgaggggagggtaactaagtgacctcgggtggggcaggtcactgcccaggtactgttcaacagattccagactggagcctctgtgttctctttacagccaacatgcccatcactcggatgcgcatgagaccctggctagagatgcagattaattccaaccaaatcccggggctcatctggattaataaagtgagtgtaactctttgggttttcctgccactgttttaacccatgtacttctggagggaccaaagcttcagatgcagctcaaaaagggaagtgataacgggacaagcaggtgtttctcccagtgggtcctgcatgcagggagtgtgcacggcccagcctgggcctcacttgcatgactcctgccttcttcccttcttgaggtagggcacccacctgaaggcacttccagtttccagcagcaagactttccagcatctgcagagctggagttctgctctcctctaagcgagacccttacaaacatacacagcactctgcagggctccaatcgaacaaatagaagactgagaagtggatgctgctgggcagaaacgtgcctggcttagcagaggacaaacgagttaatcttgcaccagtcactctggcccaagaagcctatagctggtgcacttggggcaacatagaccctatagacttagtagcaatgatagtattcataataatagctaatgcttactgaacactccctgtgtgcctggcacctgctaagtatgttatttacattgtgtcatttaatcctcgcagtagtcctgtgggttagatcttactaatgtcatcattttcagataagtaaacagaggcactgagaggtagatcataagatcacacaaaaagtgatgaagccaagatttgaacttgaacggtctgactcagaaatctttactgttaaccataagtgatataataacagtaagaccttagacttcatatttgtcactgtgtccctacacatcctctggtttttaatcctcaaaattttgttggatatgttttctcatttccgagaagagaaaactgaggggcaaagagatacagtgacaatgccagggttacacagtgttcaccatccaagtctagcccagagctccctcagtggtatgaccaggaccccctgtgtaagagcccatgctcccaggtgtcctgaggagtcctttctaatggaagaagttcttacttccatgtgggtgcttacaagccagagagaaacatcccagagcttcaaaaccagggctttgggggagggtgccctgtgtgggtcctagcacatgtgtaacaggcagagggaggtctttgtgagctaataatgctgcagctcatccaaactaggtgtccctcctgagagatccagagtggtctgtttaagccagcctcaagatgggtgtccaagccagatgtcaggggaaaaaaggggaagtcagccttttctcagacctgtctggctgggcaggcctgggtctcagactcagccccaaagtctgtggtctctgacctgacacagccttatgtgtatgtgtgtattgttcaggaggagatgatcttccagatcccatggaagcatgctgccaagcatggctgggacatcaacaaggatgcctgtttgttccggagctgggccattcacacaggtgtgtgcctgggactcaggcctaggaagcccagggtagagacaagaggaggcactcacgttaacacagaggctcttcactggggtccctgagctccctgagacaacatgcagaattactgggaagaggggctggtggcagacttgtgtttctggagaagagagtcgatcatctcagcaaattctcaaagggaaaagccaagatcttagaaagtgtgtggcttcagggggtttgtggctagatgaaagttctccctggcaaaagcatctgtgaaaagcagctgtaagccagggcactgaaagagacccaggtctgcctttttcttcgtgttgaccaaggcccttggtccaagcctcatgtggttggtggcctcctttatccttgagagatggagctctaggcccatctcagaacagtcagcccacccatttagtaactgttctctgctgcccagtctgtgcccactctaccctctggctgctgatagcccaaggaggaagactgggcatagtctgagacacagatagtacactttggggatatggggactctagtgcttctggctgggcccttcactgaggcccgctagatgtgtttaagccaagcctgggcatttgagaaggcccagggcctaggacctgcagagtgtcaccgggagtacctgctggtttgaccactgtggctctctggtagcataagaggtcaggggtaccttgccttcctccttcaggccaggggcagctgaggatccctacccatggccctgacgatcctcttttttctcctgccctctaggccgatacaaagcaggggaaaaggagccagatcccaagacgtggaaggccaactttcgctgtgccatgaactccctgccagatatcgaggaggtgaaagaccagagcaggaacaagggcagctcagctgtgcgagtgtaccggatgcttccacctctcaccaagaaccagagaaaaggtatccaaggactctgggtccttgggaagccctcagggagggagggtagaaggaggtcagctggggctggagagcctgcaccaaggctgacagcccgtctgccccacagaaagaaagtcgaagtccagccgagatgctaagagcaaggccaagaggaaggtgagtgtggtcctaagcagccaggcctttggtcacctgtgggccagggtgagcagtggaagaaatgctaaggtgggcctgggcctaagctgctttctccctcgacagtcatgtggggattccagccctgataccttctctgatggactcagcagctccactctgcctgatgaccacagcagctacacagttccaggctacatgcaggacttggaggtggagcaggccctgactccaggtgagctggtccaggtctggcaggagaccccacaggtcagtgggatgactctttctcttggaggcatggtgctggcacatggtggcccattagtgcaggctgcagggttggtcggagggcgctcgatgtcttgcaaactaagaaagcacacaaccttgacctgtggcttctgctgttccccagcactgtcgccatgtgctgtcagcagcactctccccgactggcacatcccagtggaagttgtgccggacagcaccagtgatctgtacaacttccaggtgtcacccatgccctccacctctgaaggttggtgctcctggggcctggcctgcctgcttgactgtctgggtcctgtgaagggcttcctgagagagaaaagatgatcagaactccacctggcactgaattgattgagttgggcattgcccagtcttagccaccatagggggaggcaagcgacggggacactaggaaggcagttcagagtgggctgcagtacagtgggggctggtgagaggagggaagggggccaggggctgcattttggggtgctggttctccttcctcctctgtagcccagcatctgagggtgaggaaggaagtagggtaggggtgggaagcggcgtggcttcagggtttgagaggctgagtcaccaggccagggtcctgttctggaatctctatggcagataggtccaccgggagggtgtgtgtgtgtgtgtgtgtgtcagagagacagagagacagagaaagggcagggggatctggtgggctggaactggaactgcagggtgagtgtggctgactgccagccaacctctctgctttccccatccacagctacaacagatgaggatgaggaagggaaattacctgaggacatcatgaaggtaaagccccttcctacctgggcactcttgaagtgaccgtttctcagtgaggagagagaaccagtgaagcttccaaatcagaggatgggtagctgctgttgtcacctggctgcttgcattgtcccacaagtgccacattcacgtggcttgactggtgggaaagccaccatgggaagggaaggcaggtgggaggcctggcctctgacaggccgtcctgaagcaagccttggggcatcagacagctctgtgagtcaggcactatcagcgatgggtccctggcctgcatcctctgccccaacatgccccagccctgctagttcgggaaatgcacatcaggcttcaataatcagcctttaggatccgttaatatgatgatggctttatagaaaaagttagcaaattatcctccaggtttttttttctgcttcagttttgaaagtgaatatagtttttgcagccgggggcagtggctcatgcctgtaatcccagcactttggaaggcgaaggtgggtggatcacctgaggtcaggagtttgagaccagcctgactaacatggtgaaacccatctctaccaaaaatataaaaattagctgggcctggtggcgcatgcctgtaatcccagctactctgaaggctgaggcaggagaatcgcttgaacctgagaggcggaggttgcagtgagctgagattgtgtcattgcactccagcctgggcaacaagagcaaaactccatttcaaaaaaaagtttttgcagtagttgtacgccagctgttccattagcccaaaaaattgagacatggatgtcgttccttatctctagcttttctagtcatcttttcttgatttattatgctaacctttgttttaagccacattccctcttactatgtccttacacagttgagagggaagtcgtggagatgctataccagagagtgggtgtgagaggggtgggaaaatgaattgaggaccagtgccaacatgcatttctgcctcctccctcccgggcccttgtcctgactgcagtgcacttctgcatcctatctgagattgtgaaaatggccaagggtgtgatactggctgagaggagctggctcattgagggcagggccacagggtgagtctgcactggaagggagttgatagcctcttgctcttctgtccccagctcttggagcagtcggagtggcagccaacaaacgtggatgggaaggggtacctactcaatgaacctggagtccagcccacctctgtctatggagactttagctgtaaggaggagccagaaattgacagcccagggggtaagaaggccctggatccttatggcttcttagatgagggagaaccacgtagggatggagaaagcttgggggcagggccagggagcagggcggtaaagcatctggggtactgacacattgtgaattagctacggctgccatgccttaaggtttgcctgaagctgagtggatgtttactgctgtgctgggaagagcagaggccatgtctatggccttcaggggtagggggaagcacacctgatgccaccgtcccctaccctcatacaaccttcttcacatcttctaggggatattgggctgagtctacagcgtgtcttcacagatctgaagaacatggatgccacctggctggacagcctgctgaccccagtccggttgccctccatccaggccattccctgtgcaccgtagcagggcccctgggcccctcttattcctctaggcaagcaggacctggcatcatggtggatatggtgcagagaagctggacttctgtgggcccctcaacagccaagtgtgaccccactgccaagtggggatggggcctccctccttgggtcattgacctctcagggcctggcaggccagtgtctgggtttttcttgtggtgtaaagctggccctgcctcctgggaagatgaggttctgagaccagtgtatcaggtcagggacttggacaggagtcagtgtctggctttttcctctgagcccagctgcctggagagggtctcgctgtcactggctggctcctaggggaacagaccagtgaccccagaaaagcataacaccaatcccagggctggctctgcactaagagaaaattgcactaaatgaatctcgttcccaaagaactacccccttttcagctgagccctggggactgttccaaagccagtgaaatgtgaaggaaagtggggtccttcggggcgatgctccctcagcctcagaggagctctaccctgctccctgctttggctgaggggcttgggaaaaaaacttggcactttttcgtgtggatcttgccacatttctgatcagaggtgtacactaacatttcccccgagctcttggcctttgcatttatttatacagtgccttgctcggcgcccaccaccccctcaagccccagcagccctcaacaggcccagggagggaagtgtgagcgccttggtatgacttaaaattggaaatgtcatctaaccattaagtcatgtgtgaacacataaggacgtgtgtaaatatgtacatttgtctttttataaaaagtaaattgtttataaggggtgtggcctttttagagagaaatttaacttgtagatgattttactttttatggaaacactgatggacttattattggcatcccgcctgaacttgactttggggtgaacagggacatgcatctgttataaaatcctttcggacaggcgcggtggctcacacctgtaatcccagcactttgggaggccgagatgggtggatcacctgaggtcaggagttcgagaccagcctggtgaaactccatttctactaaaaatgcaaaaattagctgggcgtggttgcgggtgcttgtaatcccagctactcaggaggctgaggcaagagaatcgcttgaacctgggaggtggaggttgcagtgagccgagaacatgccattgcactccagcccgggcaccaaaaaaaaaaaaaaaaaaaaaacctttcatttggccgggcatggtggcttatgcctgtaatcctggcactttgggaggccaaggtgggcagatcacctgaggtcaggagtttgagaccagcctggccaacatggtgaaacctcatctctactaaaaatacaaaaattaggccgggcgcggtggctcacgcctgtaatcccagcactttgggaggcagaggcgggcggatcacgaggtcaggagatcaagaccatcctggctaacacggtgaaaccccgtctctactaaaaatataaaaaattagccgggcctagtggcgggtgcctgtagtcccagctactcgggaggctgaggcaggagaatggcatgaaccccggaggcagagcttgcagcgagccgagattgcaccactgcactccagcctgggcgacagagcgagactccgtctcaaaaaaaaaaaaaaaattagccgggcctggtggcgggcgcctgtaatcccagctactgtggaggctgaagcacaagaatcacttgaacccgggagatgaaggttgcagtgagctgagactgtgccactgcactccagcctgggtgacaagagcgagactttgtctcaaaaaaaaaaaaatccttttgtttatgttcacatagacaatggcagaaggaggggacattcctgtcataggaacatgcttatataaacatagtcacctgtccttgactatcaccagggctgtcagttgattctgggctcctggggcccaaggagtgttaagttttgaggcatgtgccataggtgatgtgtcctgctaacacacagatgctgctccaaaaagtcagttgatatgacacagtcacagacagaacagtcagcagcccaagaaaggtcctcacggctgctgtgctgggtagcacttgccatccagtttctagagtgatgaaatgctctgtctgtaccgttcaatacagtaggcactggcactagccacatgtgccagctaagcacttgaaatgtggccagtgcaataaggaattgaacttttaattgcatttaataaactgtatgtaaatagtcacatgtggtcagtggttaccatattgaacagtgcaggtagatactggactgggggcagatctgagggagaggggtttgagtagtgggaggacactggggataggggcttggggctatttacctgccattttgagtagtttgctattttagcagccaacaataactattggtgctgaataccagccctgcagtgtagcatgagacaggtccatgcacacatgcattaggaaaacaccttcatgaagcaggattctgcctgggctgatgcacacaacctctatggagggtaaacagtgtttctgaagaccgtagtttgggaacccctgacatatgacaatgcccccttagataagctcaagttacaggaatgtctgagggtggaaggtgtggatatgtgcttttcctgtctccctcttcagtgtctggccatggggcataaacactacccagcagtaggtaggctggccaagagaagccagcttgcatcaccagcatcatctagggaatggaatcatggcagtaatacgttgcttaggaaacaaaagctctatggacacatcttccaccttctcagtcccagaaaccatatgtactgtgaccccgctcactaggcccagccctcgggaagagtgtgggcccttgaaaagggaagactgagtgagaaaatgatgagaaaactacaaaatgggcagaggtcagtctgacacattcattctctgtcaagctcaggaagtactggtccctgatcttggagatgctgtgtgagtggcaggtggactcctgctgggtaaatattctatatgtggatgcctggacaggcccctatcccaggccctgcttgtcagaagctccccttgggccgagcgcggtggctcacacttgtaatcttggcactttgggaggccgaggcaggtggattgcctgagttcaggagttcaaaaccaggctgggcaacatggtgaaaccctgtctctactaaaaaaaaactaaccaggcgtggtggtgcatgcctgtaattccagctactagggaggctgaggcaggccaatcacttgaacccaggaggtggaggttgcagtgagctgagatcacgccactgcactctagcctgggcaacagagcgagactctgtctcaaaaaaaaaaaaaaaaagaagttctacttggaagctccacttggatttctcaagaatagcttcacctgggaacagaggaatagacaggatggacttttccagctccttcagggaccagccctttttaagatttggattgaggtggctagccacctgtggcttccatctgggttctcctagtgggtgatggcaggtggtgcagagcaaggtagagtggactgacgggaggaaagtgataccacccagaacaagcagcagctctgacttctttttctcctgcccttcaatctaatccctgatggagggtaggcagtgagtatgtgaagtcttaggcagctgtggaaatctctcaagttctaaaagcaaagttaattgcttgtaaattaccaaaaagagagaggaattatgtccatcagcttccaatctccacaaccaagatggagtcctcaatttccccatcccctctgatcccaggagtcctaaatgattggtagcaattgcttggaatctccagggagggacctcaaaactctcccctggcccccatcacaatggagctgggtcctagggaccaagcctggagtagtgtgggatagagccagacctttcaggatggagagctgtcccatcacatcctaccaagacttcagccttttcctaggaaaagaaactaaataaggtctgacagctcacctaaaggtgatggcagctgacactaccgagtcattagccaaacagtgcctgaaacggagcagtattagtaagatctgaaccaagtttgtgcttaataattagatcattctaaggacctgacagtgcttctgtgggtcattctcaagagtttcagtataagcactaatggtggaagttctaggttgagggagctaggaggttgttgaaagatctgttttgctggggttgtgatgagataactgtcatcaaggaccactttccactggggtaaactgacaaaagtggtgctcagccacaccagctagatttctcatgttgggccaagtttacagacatttgcgggcatttgtggttagtcatgggtttccttgccttaactccaaaagggtatagctggctggtcactttcattgggctggtttattcattcagctcacttggcaataggaagaaagctagaagctaataggcaaaccatcccttcttggtgtgtcagctttcaacatctctcagtgcactgtgtgcagggtgttgtgaccattacaactccaaaggaaagagctttctctgatttttctggaagtctccagtggggcctgccaaagtgggaactgaaatcctggggtagccctgggaagtggagtttttttctctaggagtgatgtctcctggttggtggggctgggaaacagccaggttgtcattctctgggaccacttgatctttcacactgtgtacagatccaaaactctgcccttatacttggaggggaaagggggtacagatgtcctccaggcagtcctgttggagcacccagggctaatatagtgaccctatagaaagcttttgtctctgtcagatgtaatgctgttccttaacttgggcacaactgatcttccaattcatcagaactcagcactaacctttccccagttctgctggctgtcacagaggaaggaggcctggggtgggagaaggggaagctggtgccctccttttccaggggtgaaagtacttggcagggtggagcttggctttatcatccggagctcccttgtggggccaagtctaaggcctcagaagggtatagctggctggccgcatagttttcctagctccaggcagctctcaagagacccatttatgctggttttctcagggtaaggagttacagaagtccacctctgctggctcagtggtaagacacaagcctgcagagtctgctgagtgaaacttcagctggggagatactggaggctatggagcaaggacatggggactgaatgaaagaggggaggcagacgtccagcccaccattcctcacccaaggagatgatcccacaagctcacaaatgagcagaactggaaaagacctcaaagtgtggctggataatggcaacacaggcctcgagtgctcactttgtgctgggtgctatgccaagcaccacgtgtgtaccacggcactggcaccccaccacggcccttgttcacagaccaggaaaccaactctcaccacctaatcagtatggagccttggttccaacccacatcatctatctgtgcccagaatccaggttggttccatatcaggctgcctgagagaagaacacggaggcctgcacaagaagctggggagagctagcaaggggcagggcccgagcaccttatgccaagcaagcacttgtggatgctgagggaaggcggcaaaagctgcagctgctgtgctgccctgccttcagctctcctcccttcccccagcacacacaccttccaacacccctggcaacatggctctgccgctacaggccccagggccccaacagggtagggtttgccccacctatgccctggaggccacctgcagtttcgaagggtggggccccagggggccgagacacagacaggcttgtaacttggcctcagtgcagggggcagcttggccacaccaggcctgtttggagcaaacgggggactctggcctgctaggccttatctcagctcccaggatcaaagaggactttttagccatgtttctgtctcagcaagacaacctagtctgttctgctttaaaccagaccctctgttgggtcctggagttcctcagaggtctggaccctggatggctgtgagactcaggaccatgcacagatgcattctcattcccagccaccaggctcgggtcagaccctatggctctggtgggcctaattcctggtttcttgatccctgagaacacctggcacctctggcagctggccagttgccgccttacatcaggcgggcgctgggattcacctgcaggcttcctttagggaaggccctcccctgccctcctgtgccagcccagaggggcagcctgggtgaggtcttcacatccatttcgggccaaatgccttggattggctggatcccctcctgtttctgccctccttctttccttcaaagcaacaaggttgtgggggtgtccagttctgctaccacctctccctcacactgtcaatctggaatttgtccagaattggggcccaagtagtgagttcttacacagtggttaaacaaacaaacaaacaaaaaccccacacaactcagctacaccttggctcagagaggccatgggatataccgaggatctcagatcaggagggaggcccctggagaggtgtggcggggatcatgtgcttctctggtttcttggagaaagctgactttgtgtaacaagggaggcatatggacatggagttggtgtttggggatgtgggaaccattaggccagaattacaagaagtcctgtcatgtcggccacactagggcaacagtggactggggcaggggctgatgacctgattgtggaggcagtggagggctgtttctgctggggacccagggctcccctccaagtgctcctgcttggcttgttgggatggggagaggagctggagttgggatgggtcacagcgaaggctacagcctggcattcccatatggggtaggggtggggtggggtgggacagggaggaggacctgaaggggtgtccaactttccgagacttggaacagcctggtgagtgttcatcaccattcttctgtcataggtggcgagcagccagagttctgggcacaggagaccatctacccccaagcttgtgcggcctgcctcaggtcactgaagaggaccccatttttggtctttggccatcctaagacttgtacaatggagccctggggccctcccttctctgaccagtgacagccctcacaggcaaagcctcaccctctagggcctgtcccttcctgtctgccagtccccacagggtctgcggggtacccaatctcgccaaccagactggaagctccccaggggcaagcagcttatctcttccatattctcacagtgttcagccaggattggcacttcagagcatctcctgctgctcagcagagatgtagttagcatctctctatagtagcactttctgagtccctcccctgggggaaccaggctagactctggggtccagaggagcaggcaggctgagaggcaaaaagggcacagaggaataaccaaccctgcccctgcagtagagccctgggcaaaacaggccatgaccaaccagcagccaaggtcaaagtccccagaacaagggccagtgtgtgcatgacatgcagcaggaccgcttgtctctttcggcagtactggagatagaaggctgagtcattaacaactttcttttattaaaaatgtacataagtaaaaggaacatggtttaattgtgcaaagagtaagaaatacagatgagcaaataacacgtattaaagccacctacgatataccacccagaagtaaccaggctgttgaatttttagagactggggtgcaaacacattttttcactcccttgtgcatatatctgggagctctgccatatacagacacagacgcggtgtccacaggcgatgcctctgctgggaatgctgcaagcaggagtctatcctttcctggtactggctcgggggccctcctcagcgcccaggtcactctagcatccaggagtccaaaggcccggctgtgcaggctgcagaggtgatctagagtagattaggaggtgcaaaaggcttggagataggctgaccaactgttccagtttgcttaggactgaggagtttcccaggatttgggactttcagtgctaaaactgggaaagtcccaggcaaaccagggccagttggtcaccctccctgagggccaaaggctttgtcctgcccctcctgccctgtgctccccatctgccctcctgctggggttctggatcccccatccccacaccaagcagcccagggacagaggcctggctggggccttgcctcccgtggaagctcctgaaagttccagcctgaggcctagggagggacaggggaaagggaataaattaaggcagacagtctgtcatcacccaagaaaagggccaggtgaactgtggctgttaagggcagctagggatgtacaagcagaagggttccaatacttggctggccacccctccagccctggagctgagtgtgtggtccccagaggccccagagccagagaagtgcagggtgtctggattgaaaggcctcagctccctgggctcccagagccctggtgcctcaggccttaccttccccctcctccatctccacaccccctggcacttcctgctcagctcttctctacctaagactgggagcagaggatgaaggaagaggaatccaggacagaccgagctgaaagaggagcaggcaggtgggaggggacttgggtagaaaggacctctctgatagtggcgggaacatcctgactgtggtctggcccagccggctgtctatgcctgaggatgcctgaggatggggggcccttggaaaactcagaagagaggctaggtgtggaaggcagagtattggtccacagtggaataaagaggtccacgtcctaatgcatgagcctatgaatatgttgctacatggcaaagaggaattaaaactgcagatggaattaaggttgctaaccagctcacttgcaaatagagagattaccctggattattggtgtgggcccagtgtaatcacaagggttcttaaatgaagaaggaggaggcagaagggtcagaaccagagagatcgcattgtgaaaaacctgaccagccagtgctggctttgaaagtggaggaaggggttgcaggccaaggaatgcaggcagcctctaaaagctggaaagggaaaggaaggaaagggattctccactagagcccccaggaagaaatgcagctctgttgacaccttgagtttagcccagtgagacctgttttggacttctgactacagaactataagaaaagaaacgggccaggtgcagtggcttacacctgtaatcctagcactttgggaggctgaggcaggcagattgcttgtgcccaggagtttgagaccagccagggcaacatagtgagaccctgtctctataaagtatacaaaaaattagccaggtgtggtagcacgtgcctttagtcctggctacttgggaggctgaggtaggaggatggcctgagcccaggagggagaggttgcagtgagtcaagattgagccactgcactccagcctgagtgacagagcaagaccctgtatccaaaaaaataaataaataaaaaattgtgttgttttaagcccctgtttatgataatttgttagagcagcaataggaaactgatccactgggaaaccatttgggggatgcagctgcccaaaatccctgcacgtgggttggactcagcctcacaaggctctacagcctctctgtgaaagactccattccctctgggagaagctcagactctaaagccctgggcagggaatgggcctccatggcatggagggggtcaagaaggatgccccccaggatagtgcctctgctggacctctctataggaagcagctgcctctttgagccccctccccaaacctcagtgagctgaggtgctggctctgagtggtcatggaggggcttgcctgaggtcaggccacctaggacagctagtcagaggccacagggcttggcttaagattcccaggaaggagttgcatggcccctccacacatccacaatactcataacactctcagtccttggccttactaagggaatactaaggggactcagtttagctctggaaaagctaggactactggaaaaaaaagtatagaggaaaaaaaatagttactggatgccagccagatctgcaaaaagtccccactctgccacttactagctatgtggcctcaaataagccactagaccttttgtagcctcagtttcttcatctgtaaaatgggtataacatcatttgtcttatctgtctcacagggtgtgtgagtctcaggtgagataacacacgagaaaacattgtgccgcacaacttgagatgcaaacagtaacgatcacaaccccacatgccttttgatagggtgaatgatcacagcatcctgtgttagggaggaaagggtgagcacagacgcttcaaaactctgtcttacccataggcagaagggtgtagcctggccaggggagaaaaggacccagccactgccaccgccccgcagctcacaccggatgtgcgacagagccaccatgcagccccacaggatgtcctccaaccactacagactgtggggctttgctttttttttttttttttttttttttaagaaaaaggttttctagtttcttctacattaaaaacaatccctccttctcataaagcacaattttacagaggaaaagggagatgtgaaactatacacaattcaaatctaattaatatataatttttttgtggaatacagatggagggaatacatcacaatactaaaggtgattatctttggatggtgggattacaggtgattatatattttttatatttctatagtttaaaaatattccatgatgacctataattacttttacttattttttgagacaaaatctcaccctgttgaccaaggctggagcgcagtggtgcaatctcggcttagtgcaatctcgg

SEQ ID NO: 2785 - DNA, 2480 bp, Homo sapiens
cggtggcgccgctgccctggcagagctcgccactccttagtcgaggcaagacgtgcgcccgagccccgccgaaccgaggccacccggagccgtgcccagtccacgccggccgtgcccggcggccttaagaacccggcaacctctgccttcttccctcttccactcggagtcgcgctccgcgcgccctcactgcagcccctgcgtcgccgggaccctcgcgcgcgaccgccgaatcgctcctgcagcagagccaacatgcccatcactcggatgcgcatgagaccctggctagagatgcagattaattccaaccaaatcccggggctcatctggattaataaagaggagatgatcttccagatcccatggaagcatgctgccaagcatggctgggacatcaacaaggatgcctgtttgttccggagctgggccattcacacaggccgatacaaagcaggggaaaaggagccagatcccaagacgtggaaggccaactttcgctgtgccatgaactccctgccagatatcgaggaggtgaaagaccagagcaggaacaagggcagctcagctgtgcgagtgtaccggatgcttccacctctcaccaagaaccagagaaaagaaagaaagtcgaagtccagccgagatgctaagagcaaggccaagaggaagtcatgtggggattccagccctgataccttctctgatggactcagcagctccactctgcctgatgaccacagcagctacacagttccaggctacatgcaggacttggaggtggagcaggccctgactccagcactgtcgccatgtgctgtcagcagcactctccccgactggcacatcccagtggaagttgtgccggacagcaccagtgatctgtacaacttccaggtgtcacccatgccctccacctctgaagctacaacagatgaggatgaggaagggaaattacctgaggacatcatgaagctcttggagcagtcggagtggcagccaacaaacgtggatgggaaggggtacctactcaatgaacctggagtccagcccacctctgtctatggagactttagctgtaaggaggagccagaaattgacagcccagggggggatattgggctgagtctacagcgtgtcttcacagatctgaagaacatggatgccacctggctggacagcctgctgaccccagtccggttgccctccatccaggccattccctgtgcaccgtagcagggcccctgggcccctcttattcctctaggcaagcaggacctggcatcatggtggatatggtgcagagaagctggacttctgtgggcccctcaacagccaagtgtgaccccactgccaagtggggatggggcctccctccttgggtcattgacctctcagggcctggcaggccagtgtctgggtttttcttgtggtgtaaagctggccctgcctcctgggaagatgaggttctgagaccagtgtatcaggtcagggacttggacaggagtcagtgtctggctttttcctctgagcccagctgcctggagagggtctcgctgtcactggctggctcctaggggaacagaccagtgaccccagaaaagcataacaccaatcccagggctggctctgcactaagagaaaattgcactaaatgaatctcgttcccaaagaactacccccttttcagctgagccctggggactgttccaaagccagtgaaatgtgaaggaaagtggggtccttcggggcgatgctccctcagcctcagaggagctctaccctgctccctgctttggctgaggggcttgggaaaaaaacttggcactttttcgtgtggatcttgccacatttctgatcagaggtgtacactaacatttcccccgagctcttggcctttgcatttatttatacagtgccttgctcggcgcccaccaccccctcaagccccagcagccctcaacaggcccagggagggaagtgtgagcgccttggtatgacttaaaattggaaatgtcatctaaccattaagtcatgtgtgaacacataaggacgtgtgtaaatatgtacatttgtctttttataaaaagtaaattgtttataaggggtgtggcctttttagagagaaatttaacttgtagatgattttactttttatggaaacactgatggacttattattggcatcccgcctgaacttgactttggggtgaacagggacatgcatctgttataaaatcctttcggacaggcgcggtggctcacacctgtaatcccagcactttgggaggccgagatgggtggatcacctgaggtcaggagttcgagaccagcctggtgaaactccatttctactaaaaatgcaaaaattagctgggcgtggttgcgggtgcttgtaatcccagctactcaggaggctgaggcaagagaatcgcttgaacctgggaggtggaggttgcagtgagccgagaacatgccattgc

SEQ ID NO: 2786 - protein, 325 aa, Homo sapiens
MPITRMRMRPWLEMQINSNQIPGLIWINKEEMIFQIPWKHAAKHGWDINKDACLFRSWAIHTGRYKAGEKEPDPKTWKANFRCAMNSLPDIEEVKDQSRNKGSSAVRVYRMLPPLTKNQRKERKSKSSRDAKSKAKRKSCGDSSPDTFSDGLSSSTLPDDHSSYTVPGYMQDLEVEQALTPALSPCAVSSTLPDWHIPVEVVPDSTSDLYNFQVSPMPSTSEATTDEDEEGKLPEDIMKLLEQSEWQPTNVDGKGYLLNEPGVQPTSVYGDFSCKEEPEIDSPGGDIGLSLQRVFTDLKNMDATWLDSLLTPVRLPSIQAIPCAP

SEQ ID NO: 2787 - DNA, 34080 bp, Mus musculus
agtgatggaacatccatagcccaccctctatccatgacagtatgttgacagcccaatcttgtggaggctctgtgcaggtaaccacagcagctaggcatttatgagtgccatagttatgctgtctggaagccagctctggagcattcctccatcccttacttgttttccagtttatttactttcttctgtggggttctctgggctatagatggaatgatacatatgtcctgcttagaaaaaaaatattcaatgttcacttactgtcttagttagggtttcattgctgtgaagagacaccacaaccaaggcgacttttataaaagacaacatttaattgggactgacttacagtttcagaggttcagtctattgtcatcatggtgggaggaagcatgacagtatccaggcagacatggtgctggaggagaaagagttctacatcttgatctgaaggcaggcagaaggaggctctcttctgtaggcagctaaaagctcacactgggtggagcttgggcataggagtccttgaagcctgcctatacagtgatatacttcctctaacaaggctacacctcctccaataagaccacatctcctaatagcgccactcctaatagtgccatatgaatggtgaaagcatattcaaaccaccacattccactccctggcccccataggcttattcaaacatgagtctacagggaccatacctagccatagcataacacaaaatacatttactccaacttcaaaagtccccttggtttataacagtctcaacaatgtcataagtccaaagttcaaagtctcttctgagattcatgccatctcttaactgtaatcccctataaaatcaaaacaaaaaagcagatcacaaacttccagcatcacaggatatacattaccattcgaagcatagtgaggaaatactggaccgaagcaagactgaaaaccaagttgggagaactccaaactctacatctccatatctgatgtcaaagtgctctttgatccaaactcttatctttctcagctttcctcagcaggtatcccacagctctggcatccctaataccttgaggtctccaaggcaacttcaatttcacagcttcttgttccaatgtctgggatccatacatgatttttctgggctcctcgaaaggacttgggtcacttccctagctctgccctctgtaccactccaggctctaggtgactctactccctcctccagctgttcttggggtcatcccatcatctccaatatgccatggtcttctgctgcaaataagcctcaccaataacttctcataggctctcttcatggtgccagccctcagcttctctgcatgaccccttcatttctgggccatcaactgcaactgatagctgtaccttcaccaatggccttccctggcctctcacagtgccatgcctcaactgctcttcatgacctcttcgtcccttcaatgccttcaaaaccagtaccacttgggtaattcttacatattaccaagtctggctgccagcacaatgtctgtcttagtcagggtttctattcctgcacaaacatcatgaccaagaagcaagttggggaggaaagggtttattcagcttacacttccatgctgctcttcatcaccaaagaagtcaggactggaactcaagcaggtcaggaagcaggagctgatgcagaggccatggagggatgttctttactgacttgcctcacctggcttgctcagcctgctgtcttatagaaccctctctcttaagaccaccagcccagagatggtcccacccacaaggggcctttcccccttgatcactaattgagaaaatgccttagagttggatctcatggaggcatttcctcaactgaagctcctttctctgtgataactccagctgtgtcaagttgacacaaaactagccagtacacttgaccccttgtcaacttgacacacaaaaacatcactattaagcctcaacccttacaatcttattcatccccaagatctaaataactttaaaagtcccacagtctttacatattcttaaaatttcaatctctttaaaatatccatctcttttaaaatccaaagtctttttacaattaaaaatctcttaactgtgggctccactaaaacagtttcttccttcaagagggaaaatatcagggcacagtcacaatcaaaagcaaaaatcaatctccaaccatctaatgtctgggatctcttatttcttctttttgtcttatttccctagtcataacctccagggagacactgaccaatagtggtggaaagaacattgtttggaatctatcttaatggaactttctagactgttaagcccaacactggatttggggttctgatatttctctctctctctctctctctctctctctctctcttgatgagaatttttcctactctgtggtttgtggatagctggtaaattttcatcaagcatcttttgagataatgacaaaattcattttcttccagtctaataaattaataattagatttaatgaggcccaggcagttttattaactccagaaaaacaattcccatgatggcaatcctgtttccctcttgactacacttggcaattagctgggccaccatttgctccaggggctgactggtattaggaccaatccttatgaggaactgtggaagcggtccatctctctctggcactggaacaccatgcttctctggaagagaatgcttgttctccttcactgggccagcaatacttcatgctccaaagcttgatgtcacagccatttgtaatcaacttgtctcagtcctggacacagccacttctcagaacttgtgagtcccagagtgctgagccacaggcactttccacagccagtgctcactgtcaagcccagacccggcaccttcacttccttttccctgagatgaagcactttcttctttaaccctctactcacgagttcttcctttacactctcacattctcttagcataatctggcttcccatgtgcgagagctgggtgtagaccctctatcccttaagcaggtctatcttcccattaatacagtgggttcccacaaagcatccgatgtggccaggcatcctctaggtcgggttcaagacaagtgagcacaccactgtccttgtcggtgggtatgagagctgcttcccatattcactcctgagcccagatatgtacagcaatggagttagctttgggaaacaaaggaactgaaggacggtgacgcttcttaagcagccaagaaaacagccacccaggacatgaggctgactcacaggccctgctctcctgcactccagtggcctccagtagcctcagttcagctttcctaggctggatctggccttttctgctctaatccccatagccccttgcacctggattcccagacctctgggccagctggcagctgctagcctccagaagaatggctctgccccatttgctcgacaacatgggaggtcaggctcacaccagatggtcacggttggggtgtccagtggcctgaccggaggtgaggtcagccttgaatagtccttaccagcccgtgactcagtcaatactggctactgggtaccactagtcaaaatacttcattaagactgatcagagtaaaaaagctactcctgggctggggatgcagcttagttagggatacagctcaattggtagcatccttgtctagcacacttagagccctgggcaccacataactgtcatggcggcacatctgtgattccaacatgttaggggtagagagaggaggatgaagcctggaagatcatcctaggctgagctgaggccagctggggcaataagaaacactacctcaaaaagctttaaaagtgtacagaagaaaagatggggctgagacagtatgctggagataggccaatgtccgctggaccctctgccctgttagcatcgtagctttgtgtcccctcagcagcaggaaatggaagccccaaatatgctagtgagaaagtcatgggcaatgggggtgtgagactccatcctgagaagaagagccaggaattttaatctttgcagttttttccaagtgaggcaatacagttgtgtgcattacaaaggcttaattgtccaactctcagccctagaacagtgcctgacacagaaggctcaaaaatacccattgaggaaatggacaaatcctaaatagcatgtgccgtaattccggaaacaatatttccacatgtctcgtcttttattttactggatgggtagaaatagagacatggcctggaactccccagccggcctaggagccccggatgtcagctctggaggttgggagggggtcctcaggctggagaatagatggtcctggtcaggtcattgctaaatgtgtctataaatgtgtcgatagaacaaaagctacagacatacagttgtgctggagtccaaaaccagtacagccatgaacagcaagcaacgcatcaggcaggggagtcacggtaacttgattgctgtagcctcagcccctatttcgcctctgtcgcctctgtactttgggtgctacctttcctgtaccacatggctgggcctctctttactgggctggggaaggaaagctcatggatccttactttcacctggtgttatgatgggaaagccttggctaaaagcgttgaggacgtagagtgaacacatatcccagctgctcaccccaggggctgatttgtaaagtgaagcattttctcctcacaagggtcagtgtagctggactggcagagagctccagctgccagggggaaacaaaatacccagagaaacttgtttggggctgtttcaaattatcttgattgacttccattatcagcttgacgggatttggaaccgcctaggagacacacctcggggcatgtctgtgagggcaattccagagagatggaacagagggagagaaaattcaacctgagtgtgagtcgcaacatctcagggggcaggtgaagaaccgaaatgaacagagaggaagaaacaagagtgcggagacgtgaggtgtaaggtgcgaggtgaacccaccgtgttcctctccctctgcttcgtgcctgctgaggcaccacgactggtcaccctcctgcctttccatcttcctcactgtggtgttctgtagtctcggactatgagtgaaaagaaccctttcttgtttagtttttggtttggtttgggttttttttgggggggggtgcagggatatgttatcatagcaacaaaagcaaacaaaaagctaataccggggaatacagagagaattactaccttcagagctgggacaggctgggtaatccctggcagggtgcctgcatcctttgtccggagtgacaattaaactgagtacaaagaggagggtcacccttaggcgagggtggagcctagtgtcttttaagactgctacctcaaggtctcagttgcacaacacccaatcacatgggtttcaccggcagaggctgacaggctgtgttgtcacctccctgtcagggctgggccacctctgcctttcccacctgccttctgctacccctgtgtgagatgctatccaccccaacaccctccttctcccaggcctcagggctggggcctcatgggctcagctggatacacctgttcccgccctgccacccaagagtctctttgttgggtctcagaacaggctgttttcctctgtgaaaacagaatcggagcaggtctgacgagggtgacggaggcacaggtggcgactacaaggacagctgagacacagctatatatcagcagaagggccatttgtaggaaggtacccacccagcatccgtgctccaaatcaaccacttgaaactgtgtgagctcagggtggcccctcacacctccccccggaatctgtttcctgaacagctttgtttccacttttgtatctgtcctggaacctggctgagggccagccactagggtcctgttggcaaaaccagcttcattcctgtttggcccctgggatactgactccctccagagcctccaggatctcaccctccttagagatggtacctggtaccttaaagcccagcctcttgagtcccgttgactctgtctaggctagacacacagccagcatttgctaagttgttgttgagggattgaatggcacaaaactggaactgggaaagtccctttgctatagccacaccctcttctgtgttccatggaaccaaacacggcttaaagaccggctgagctgcactcttgatagagttttgtcctccttgatcatgtcgggcatagttcccaacccagctttcaggctggacgtctccagccctcctttcttcctcctgttacctggaccatgactctggctatgtctaccctttgcagtgtctccagatcctgcctagggcctgacttggctccctatcaccataatgctgaccaaacggccctcctgtgtgtagcatcctgtcctagatgtgagcactcactagcacctgacctcaatcataggctactgagagaacaagtccttgagtagccagaggaaatatggcctggagctggaccagacaggacacagaaatgagactttttcagttctctcctctggttgctctctgtgattctgctgtgatcagaagtgtggactgggcataacaaaaggagaagacccaagctatggaggctgcagacctccagctatgttagcagcttacagcagctgggggtggagtgggggatgggctggctcttgaatgagtgacatgttggctctgaggagctgagcaggagtagagcaggcttcatacacagacttatggtcactgggctacagtggctcagcctcttagtgctctggctagcaccgtggcctcccaagaaggtacttttagtatgagctggcccatcaactttactctgccctacccatggctttgtgtatccctggacagtctgagctgagcattccctcagcctgaagttgttcatgctccgccctccccttcaccctaggctcaggtccaagggcatctcccaagggcgtctgttcatactggagcctgccaactctaccaacccatcaaggaaagagtgctgtggtttcctctggccttggacagccctggctacacacagaggacctgggcatcacgccctgaactacttggggctccttagaaggacaaggcccctaagtgtggtctctaaggcagcattctgccgagctccctcataccctcctctgctctttctgaatcatggccaaggtctaagctaggataatgactcccatatcagttctgacattgttaatagcaaatatgaatacccaagttctctgttgggtgctggagaaagtgagacagacacagttcttgccctatggtgcctcaatcctagaccttggcagccccaagccttggcatatgaaggccggccactcaatacatttttgatgagtgaatggggaaggtttgaaatgagcagtctgcttacactcagcagtccatgtgcctgaagacatatgaaggccactagggtagaggtgagccatgaccagccaccacccatccccacctgaagcaagcctctagcttggacagcagcctcgtgacttgctacatcaccaccataaagattcaacacagcaatcctccaggaccaaagccatcaagacaggaagggaactacaaagccttcagcttaagcctacaaagccttagtcgtgttggaggggccatatgacctgacactgagttgacctactgctccaacctcaagttaactcagaagtagccacactgctaaggactacccctaccctccaggaccacagcctacccaggcctctctcctataggaaggtgcttttaaaggtgggctgctgatgctttcaggtcagggatgtcaccaagagcccacgtggatgatgacagccacaggcctggatatctatcgtgcatccttctaacctgcccaggctctgcacaatgctgatatagcagaatctagaaccatcctccccactcccccctcatctccaaccccgtgagagaagcctctgaagaaagatggcagcgaggtcatcctcaggaaggccctcctccaagaaagtaatgtgagtattcaagatgggaaagacaagtcttggggaggtgcaaatcaatcgagagaaacaagaacatctgggaaaaaaagttcccagaatccactatgaggtgcattggaaagggagtttccacagattcctgaagaactatgttcgtctccccaccactccccacctcccctgcagcaaggttcattgctgtcacatatactgtggctcttgagggtccagatgagaggtctctgaccacggcccatgctctacattcaaccctcaggacaaccagtggttggtggttgaaccccttctactccacttagaaggatccaatggctgggagcatctggttgccagcccccagagaccatgcagggaccattctgtcggtccttcccatatgcctgtcaatgtgggacccctgtttgcatgaagccgagcacaaacctctgccacacagtattgcgagcccaacatctgtgtgtccctctcactctccacacactcaagcatgcatccgtgtcacacactcaatccatgtcactcctctcccacctgaggggatagcagcaccctccctaccaggaggacatcccggcctgggacctcctacttggtacctctcaagcggcctgggatctcctacttggtacctctcaagttgtcctactctttgtcaccaggaagacatcaggacagacacccctacattgtagctctctgacagttcttctcttttccagatgtaggagattcagtggtccctctcatctcttaccctgtgagcatcagcatcacacacacacagtccgagtcactcacgtgtcacatgtcacaacagggtaagagagaacacagggttgccaagaatattgactaactaggatcttgcctcctctgggtatggagaagcaattgatggctgatgtggtcagactgaggtacccagagagtagtctggccaaaccattgtacctccagaagctgttaaaggacatccgggcacacagtggttggaagtgaagacttggggaagagaggagccctggagagtggggtgggggcgagctccaaatacttctgctcctccactgggagacaggcactgctccagcctgctctcctttccagaaagctaagagatacaacacccctggcagacaagatgacctgaagggagatggaaacaagacaaggcccaagaagccgagggtggggggtggggtacctggaaaaaaaaaacatgcgccttgcttctagatgccagaaaaaggtcaactcctctaggagatcagctttgcctttgcaaactagtttgggcacctttctatttctactgcacccacgccccccgtagcccaccaaatagatccatggcctgctgctgtcttgggtctgtgtccctagtccagggcttctcaagcccaaggttctaagtgtgccggtgttcagagggttccatgcgctgaaaggtggggaggcaggttggcccgccagaacgtggaagtggtttgggaacaaggcacggccccatcccccatcagagccaccgcagtcctgcatccctccccgggctagagcaccggcccgtaaaagcgacttcaaagggccggtgcctagtgtctgagtttccacagcctgctcggctcctcagccaggcagaactcagacatccaagcggaccctattctgggggcttcaataagcgggtggggggtgcggggtttagcctgggaaagtgaggggcgggtcctcggagcccccaaagtgggagggtcgggagtccgcgggaccaatcggtgtgcgcgcggggcgcgggcacgaacggaggggggatcgggggcgggcagcccgggggcggggcgcggcggccaggcggcggcaacagcggcggcgactcctccgtgtccggctccagctctggctgcagctccggcccgcgatgacccactcggtgaccctgcgcggcccttcaccctggggcttccgcctggtgggcggccgggacttcagtgctcccctcaccatctcgcgggtgagtccgacccccgcggggcagcggggtagtcccggggcttagaccttgtccttgtagtagacccaggacccagatcctcgacgtgtcgaaagcttgaaagcagagtgttggtcttggtgacccacataatgtgaaggggggttccagcagggcaacacagtcccaccccgcttcccgcacagcctgcctgccccgtttggtggtgagaatccccaagagttcatacaccaacttcccgctgctaagtttctttaggggaagttgctgtgggccagggaagaaccctcagacatgggccaggagtctggacagctctacagaggcccagaaactcctcagatccaaccctgcctgaagttttggggcaaagtaactgaaaacccacttcccctgttaaaggtccgggtggccttaggagggtcttgctgtcctcggaagtccacccacttccccactctgaacttcagtttctcctctctggcctcagtcactctgggggaagtgaccaagagggactgttagcttccaggcaagggggagacaatgaggcatggttccccctccttacaaaccaacacaaagccatggaccaggacagcctcagcccagttccccacgggtcccaggatcataccctgctcctagatctaaggcagaggcaaagaggagggggcacagccctggagagggagttggtctgaagatagagcagggaggagctccggcctgaggcagggattccccagccttggagccaaaagagaagagaacccaggctctgcccttagtggctctgggtccagaaggaggggacagatgtggacatcccttcaccccacagaggctgcttgagtctttggggaagtgtgtcgggggactggagaaccactttgctgcttcttctggccctgaaggctgggctaagctttcgagatttctttttcagttcttgggaagaggtagtcactgggtgggtgtggaattgtggaatcctctatatgggggcctgggtgacaggcaggaccagctgtcctaggaggcttccaacatctgtctttaccactaggtccctggggccaagtgaggtatgccttcagcacatccctgtgactttcatctccttgttctccctagagatccccgctgggggtgggaagtgggggggggggggcagagcatctatgtctgcctggtgggtctgtgtatctacaaagaaagaacggtgagggtgttaggccagccggcaggccaggcaccctgggtgtgaggccgctgacaggctcagtggccgtggctgactgctggaggcggctgagagctaagacatctgttgcccacgcggctgcctgtccaacagggaaaggccttcagtcgtcagcagaggctgcccaggccttgtttggcactgatggggacttggtgggaggagatgcaggcccctgatggaccatttgggagagaggaatcccctttttcctccagagtcatgtggcaggagctcagacatacggagccagggtaactgagcctgggttagggtgggatttgggagatttacagagctggggaggtacaggccacaacttgcctagcaggtacctcaggggcaagagtacaggggttggtgatataggtgggggtgccctcacgaaagggcttgtagatcctttctgtgttctctcagagcccctcctatgtttccagagtctcccttacccagagtccagtagaaacggacagcctcatgcagacagtgggtggctgattgttaagctgggctgggagcttacagtcttggcccaggaagtgtctaggaaccccaagaataatgtgcagggcttcttccttatagacaaactgtaatgactactggtcttcaagcatcacaatgtgccaggccccaccctatcgggtgttggaagcagcacctcccctgcagccagtccttggaaagagtgttgatgcatgcctagcctctggtagagatgtcatatgccacgactgtcactggaagtccccaaaacaatccttagactcctggcctcatatggtagattgagaggctgaggcacagagaagttaaagaacacagagcaaggggctgtgagcagaaatctgggtctgtttggaggttgctgtaactgtttatgaagtgatatgaccctctgtggctcccacgcaccacaggcgtctgcagtgggcacagtcggggctggaatgcagcaggtgagagactgattcataccccagattcccatctgacctcattgctcccctccccctttttcttctgtctgtctggttatcttgtactgcacagcgagacagttgaccaagttccactccatccaaggatgcccttgtttagaacattccatggttcccaaccccatgagaaatgccagcatctctcaccccagggaccgcagaccctgcaaaagctagtccctgcaacttttctgccttgatcactcccacaatcccttcactaaggatgctataagccacacaagtctcctgctttcttgcctagataagccattgtaatgctgggtttctacctggaatgttaccccttcacctgcgatacactcttccttttgcaaaaaaaaaaaaagcacagtggttaacactataagttttgctttggacccacctgacctaggttagaattcagactcagccatttattaactaaacatgtctttgtcttctttgcacctcggttgcctagtctaggaaatgggcttgccttgagaactcaggagacaatgcttagagagggcggctgggagtcacggtttcctggcttcgagccctctttgaccagaactccccaagctcaatggagctggccacatcccagacacctctgcttccaggaacttcctccacctacagggacctgaatgcacctcttgtgctggctgagtcatcttgtagcaagctagccctaaggaagaagactcttgtccagtggggggactgggccaaaatgtcccggctccagccccctctttattcatctgtaggtagacatgagaacagctttagcctcatctggtgactgagaggttgtcctgtgccagatacggtaaagtgctggcagagatcaggtatctataaagaacagagagctctgagcaaaagcttgacaggagaatgggattggatggtgccaagtgggcacctgccccaagaggacaggcttgtgcaagtgcctagtgcccaagcccagcgagtgaatatttagggtggacttgttggctaagggatcatgctttagaagagaactttgcttgagggagatgaggagataactcagtcagtaaagagtttgtcgtgtaaacacacagacctgactgcgtttaatctccagcccccacattaaaaagccaggtgcagggctggggagatggctccgtgggcaaaatgattgcataaggctctgagtttgaatccccaggactcacgcaaaagcatgcctgtaacctcagcactggggtaggtggtgacagacagagagattccagaagctcactggccagagagtctagccaaaagtggtgcactccaggttcggcaagagtgcaggtagtgggtggaccacgcctttaatcccagcactcgggaggcagagacatgcagatctctgagttcaaggcccgcctggtctacagagcaagttctaagacagccagggctacacagagaaaccccgtctcaaaacagacaaacaaacaaacaaacaacccactaccaccaacaacaaaaaaactgtctctataaagacagagcaagacagtggatgccaactttggcttctacacacacacacacacacacacacacacactcatatttacatatatgaataccacatgttgggggtgggggaaaataatatttcttgaggcagcctattttagggcaatgtagcttgggcagtgcccacatcatgcttctagccaaggatctgccagcacctggctttgtccactctctattggaaactggctgagctgagcctggctgagttgccaggaactcccaccaccagccacagccacactgataagaacaaggtcattagcaattcttaagccacagagaggcgctggctgctgatactgggtaagaatggtgactccttgtctgttctctatttgtccccaagttcttatttagatagcgctgagcctgtccctaccctcatcacatgaccttcatcagatgacccaaagtgcttgagtctgttgagtcaatagaggtggctaggggatcctacaggggaagcagagatggagttgtaaccccagagtgcaggctggtagttggaactggatggctttgaacttgcctgaggcgttgtacacacctcctccttttagttgtaaagatgcattagaaatgtgggggtgcaggtaataggcgcacaaggagttactctcagagtaatggggctctgtgctgaggcctaaggcaggagtgggctaggtggtaagcagggttagtcaggagagtgtacctgctggaaggagagcagcatgtgggcaaataaagatgtgagtgctgtctggtgcctttatataccctacaggtgtttatacccaccatagcaatggtggagcaagtgaatgtgtggcgggcatgagagatgagatcaaataagtaaggtcgggggctgcttgagtagagcattgtcagtgtgaaacacttatgacacgtccatgctctgtgtgtgtctgggcatatgtgtccttgtgtgtctgagtgtcccttgcatgtcgtagtgtgcctacattccacttggcccgggctagaggaagcccctcatataaccttacatctaacaaggtccgcaggggctccagactgaggttttgaagtccaaggccacaaggggacctcagccagcctcttagcttgcccacctacctactggtcacactggcacaaggccacactggccaggttctgaggttgatgggaatctagtgcaggcgtccatgtagtaactgtgccaaccgtgtggtttttctaaccacaggttcatgctgggagcaaagcggccctggctgccctgtgcccaggtgacttgatccaagccatcaacggcgagagcactgagctcatgacacacctggaggcccagaaccgcattaaaggctgccacgatcatcttacgctctcggtcagcaggtgtgtatgggcaggctgggctggagacgtgatcggagtgaggaggggtgctagccagtctggtgagctgagccagcccagcctttgtgcctcactccggcccaacctaagcattggtgcagtcatggtgcttagacagcactggttagagctgggaggagcctttacaatccagggtttggagcgctttgctgcccttgtgggagcagaaataagatcttaagctgggtggtgcacacctgtagccccagtacctagaaggctgagctaggagaagcaaacattcaaggttagtctgaactgtgtggtgagatcttatctcaaagcaaaagcaaccgccccaccctgcacctcccatcaatccttttccctccaccaaggaccagtctgatgcacagctcatcttcagactaacttacaaatgtaaaacctagcgtaggccccactttacagatgaaactagcaaggtagaggacacctaaagttgcatagccaggcaatagagagtaagtgagcatgctctctcttctctctcctcttcttttctcctccctctcttttcttctcccctcccccacttccccctcttccttccctccccctctctctcttcttttagtggctgccaacctttctaaccaatcccacagctgttctgcctcaacagctgtctttaccagggcctatgactctgtctggttaaatctggatttggaacaggctttccttccgtggaccttgtaacgaacgctgagtatcccgtcgtcatgaaggtgctgtggtgaacactcagccctttcctgggcttaggctctgcctttttaatcagttcccactagcagttggcttaattctggctgagtgagagcttcatccgccttccctgcctgggcccagaggacataactcagttttgccacattcactgctaacggggactttccacgaccccccgtggatctgtgtgggcgaaaccatccccaaaccacaacacagttaacccatgcctgattgatccattggctcggagcttttaaacacaacgagaaacgttattaggtagcccctgtttgtgcctggcccgtagccaggtccctgttgggctcaggaatcttggacatgcccttggcactgagcagcccagctgcaagtctttattccattgggcacacagcaaggacgcctcagcttcatctagacccttctatcttaggtacccacaagggctctatgagcctgggtttctttcccatacatccagttccttactctctgccagactgcggcatggctggttaaggaaagctttgcccgcaagtagcctctgaggcctcccagcttggctgggttcctgggccctgactcacctctggctttgttctctagctaaatgagggcagccctagggatggcagagctgtgaggaggctcaaagggtcctgagtcaggagattcccagagagaatgatgtcagggatggtagcagggtggaggtcccctttccttccttccttcctttcctggtcatttgttccgatctaggcatggatggagccagaaggccactgctgtgttgcattttgggaattacagccccagcatgcagtgtggccacgggacagatgagtgtccatggtccatgtcacagtgccgtctgacttccaacaagtgctttatgcagaccccaaacctctccaatcctaaatcaagggctgccttgtgaccttgacactgagtagtaaggaggtgccaggctctctcagtcagaatgacaccctaagactctccctccctccaccatctccagtcctccctcacacaccagacttggggcaatttgaccacgtggccacctagactagaccctcaacccaaccctctttctactgggctcccttacaggcctctgtctctgctccctgttcagcccactcctcaaggcttatgcctgggccccagacacatcctccacctctttaagaggctctgctgagggccagccagcctaatgacctggctagagtgagggacttggcattcttagaacagcttccctgcctctggtgccccactgattctcccacaacctgagatatgcaggaaaggctttgtttccttctagacttattttctatggggccaaagtcaggcttccaatagttcaagtcagatcccattgtactgtagatcaggaccttcctcctatcaaccacaacactgccatgatagtctttattgccatcgcttgttgctttgcatagcccaacctttgcttctccttttgtttaaacaagcttactactcacccgaggagccctgaaggagagcccactacatgactaagccctccgttcttatctgacatcttaggccactctcatggcccttagaccacaggtttgtgccattcttgggcaggtatttagaaaagcatccagacagggcatccctggtgtgtcatgactagaagtcagagcaagtagaagacatggttggagatattttaaaggggtcactcgggaacctagctgtgtggctagagccagggctgtgaggaaaggattgggccccagaagactgtgggcagtgtgaacagagatgaaagcacagaatccatgtggacgtagtgtcaaatcaccgagccattgcgctgggtatggtggcacactggggagcagaggtaggtgggtctctttaaggtcaaggccaatctagtctacatagtgagtttccaggacacacaggactacatagagagaccttgcctcaatcaatcaatcatcaatcaatcaatcttccctgaaaaggaggcatgagtgagcttcaaccccagtcataagactttgagaggcctcaggaggcctcttggttaaggaacattatttccacactctaaccagccttattatacatcgcctgccaacccagggtccacacaccctcctggcttgccttccatagagctactgagtggcagggctgggcccacagcctttaggcctgcccgtcctgcttatggcaggtttacgatgtttttctccctcctgagtggtgtttggcttttggtttctatggcgaagcaggaatttcctaatggcctgtttcccatctgggctgggcagacctcagtgatgactctgcctgagtgggtggaggcagcaggacgggaggtgctcccccacagcctccatttcacctccccgagagccactcaggccccggccagaggctacggaggtcagaggatgagccgactggctcccactggctcccggcttatccatgtgtgaggcctggcttgccttgctgtgccctgagcctcctggagtggagtttctgcaggccaccatgagggaggagaatgtctgaggtgcaagccctctcctgcaaggtctttaggaatgagaccagaaaggcaccaggccactggcaggaaagggagcacagctctgccccaggagggtgacgacctgagctgtggcttcttgcttcagcagacagcaccatgctaaagagagggggaatgttggatatttctcttctcccccagctctggtttcaggcatgggatggagactaataagcagacatatctcactatcccaattcctgccacaggcctgagaataagaactggcccagtgctcctgatgacaaggctcaagcacataggatccacattgaccctgagtcccaggtaggtatagacactgctcacctggcccagctagctcagagtgaacccaggacaagaggcaggcatggccaacagacttcagtgaaattctcacactgatggtcagacagccagggtatactgaagtagacagctcctctaggacatgcctgcttctatcccttgccctggagcccctgcagtgtgcttgacccaactccaggctagcctgcattcttggctagggtgcctgggatgggatggggctgggctaggtcttggctcaagatctctccacacagagctgaagtttactcccacacccagagagacccaatcaaaaagaagtcagcaggcttagagagagatgagggtaggcaggtggctgtgaggaatcaggctgtggccattcctgtcttgcacgaccctcatgcactctaaagctggagaggtcccttttcatgtcccagaggagttgcagctgtcacactgtcctcaaggagagagagcaaacctggctgcactgagttctcatgagaagagaagccaagtgcaccaaattccagatacctagaccatgctccacatccctggacaaggtcactcctgggctaatctgtgatgtagcttgaatccagagtactcagtatgagaggtgtggcttctgggcctgctcttgtctgctctctccacatggaagaaaaaggaccaggacagagagacatttcaataagaagtcagagagggctctccagaggaaggagattcaagtccaaaccttaggacccagacagagcgggtaggaagaggaaatgcaccccacaagcacctgaagcccaggggtgcgtgtgctttgagatcagagcagtgacaggggaggttggtgaaggcagagggtgagctgatttgtcccagacttcagctcatcccgggaaacatttggatcttagtagcttgctttgtctgaggcccttcaggcagggagaagagaacagatttggcagaaggaaaaaaaaaaaaaaaacaggcaacagggagcagaaggcgggcgggctgttcctgtgagacgcctggctcctctcagcatcagtgctgaaagggacagggcagagactagttgggagcggagggagtcaccagggactcaaggccagtgggctccagggggctcccctgtggcgtttgaaagctggcatggcaatatgcctttcctttggggttgggaggctgggactgagagtagcttcaaacagggtctggtggctagagctgcagggggacttctcctgcccccattctttttctcacagtttttcttcaaaggccagcagcgatggtccttactccttactgtaaggggagtgaatttccacaatcaacagagcagtttccttagctgctgccccccttttgtatttaaaaggtcgtaggctccatgggtggcgacaaaaacaccctccccgcctctgcggggctgtgtccccaggagcacagacacagggctcattgtccccacactgccccctcctctgagtgtggaggtggggctggctggaaccatttagggagaagaaaactacacttacccctaggccaatacagggcacccctggcacgcatccccaagaggaatgggtaactgcagcctcaggaccacgttctctgcaaggccacagaggaccctcttttctcagggccctggagggacagaaggcacacgggccgcccagggtgggagaagcatctggctaagaaaagctttctggagtaggggggccttgaacacccagactgctgaaagctgagattcggcctaagaagagatccacctgttcctttgggtgcagcgtttgcctatgtctggtcacccctttttgttggcattcttctgacccaagtaccaagctgtcactcagggcagggggcaaaaggttgtgtggaacactgccacccaaagagaggaaaaagagggggagggcatgcagggattcccaccaacagccatccagtgaagcactttgcgtggtgtgatcagtgtggtcttacttcatcccctactgaggggctctgatggctagagagccatcgcattctccagggtaggggaagaaacaggttcagagagatgaaagtcaccagttcagtgacagaactgccactcaaaccactgagttcagacctagagaagctgctgcatgggtggtcacaggaggggccagagctcaccaatgaccctgctcccacaccctgctgagctgagtagggggtgagtgaggacttcagtcccccccagtctctgctgactcccattcctctctttccattgaagtctcatgcagagcccagccccaccccctccccgccccacccctaccgaccacaacccatctggtccccattagaggccagccctgcctgcctgtctaccctgcagatacatgtgtgagggtgctcaggtttctaggggctttcactgggcctgatgggagactggggtcctgctgctgttgccaccccagcagcattgatggggccccacttagccagcaagcctcttgctttttgtttggatttgaaggggaaagtggtaccttaatgggggtggggggcggtgattaatgcagagccttgaaagctagactgttcggtgctagaagctgcctgagcccaaactggtctctttcctgctaggaaagggtctccccatcacagagtggagagacatatatatgtatttgtatatgtgatatatgagtgtgtgtataaacatacatgtgtatatatatatacatgtgtgtataacacatatgtatatttatgtatatattatatttatatgtgtgtgtgtgtgtgatcccccaggctgagacagacccatggcctgaacttgagtcttgtcccctaaatgaggaattctcatgccatcccaggtttagccacatggccttcctcaggatgaccagcactggctcccagtgtatgtgagacctcgcattcatggataggaatatgtaaggagactggctgtgtgtgtgtgtgtgtgtgtgtgtgtgtgtgtattgtccttacccatgtatgtgtctttaaatgcacttatgagagtatgtgtgccctgttcacattgcagtgtgtgtttgcgtgcctgagggctgaggtcagcatagttttggactctgcatggacatacacacccagaccctgttcagagccacagagcccctaccttgtccttataagctgagaggcaagctcaggccactctccctccaaccatggacactaggctgctcttggagtggtgagacccagtctctgctccttgcttgctctgccccaagaaagctacttttgctgcttttctgtggactaggactagaatgcaggcccagaggagctgaccctcctagaaatacccctgcacctcagacttcccttggaaggaccttcaagaaagaactaagggccccttctgactgtagaatacgagttcctattcgtattccaaccatggacccttttgccggctgggcaaatagcctggaaatgtcagaacagaggtagctagccaacacagtcaataggaggggtcaaaggtcagagggcctcctagtgcctccagatcttgctcttacaggactgcagtccagccaccagcaggcgctcctcagtctctgggattagtctggaggacaacagatcgggcctgggatctccatatggtcagccacctcgccttccagtccctcacaatggcagcagcaacgaggccaccctgccagcccagatgagcgctctgcatgtgtctccacccaccaggtaggacagaggccgggcctttgaagtcacacccagatcaatcttaatccttcaaatctctacagttccttcctggcccttgtcgtttgatctaagagcctcaactcacatagttatagtttgacttagaaggctgccaggcccaaggctggaattaccatgctggctttccatctctccccttcccagtgccgacacagccagggttctccctcggaaccgggactgcagggtagacctgggttcagaggtatacaggatgttaagggagccagcagagcccacagcctcggagccgaaacagtcaggatccttccgctacctgcagggcatgctagaggctggcgagggcggtaagactcccaacaccttacctcccctgcctcccctccccctaccgtgcccagtttacccttcaccttccaacaccacccaatccacaccttctagccatccaccccctcttcaaatccctctgtgccttactgtgactgtgctctcaccctcccgattcccactccaccacccacgtgactctcctttacctcatacaaaccaagaacttgtcctctaagcttctggtcatcgtgttccagaagcaacatcctgctgaagtagggttcttatctcacctaccccatccataccacctgccctctggatttcaggggatcggcctgggtctggtggtccccggaacctcaaaccagcagccagcaagctcggtgctccactgagtggcctgcaggggctaccagagtgcacgcgctgcggccacgggatcgtgtgagtacccagtctgcccacctgcacccccacgaccccacttctgttttccaaggccatgggtagaggcttgtcctagaatctgtcagtcacctgtccctctgtcctccacaacaggggaaccattgtcaaggcgagagacaagctctaccatccggagtgcttcatgtgcagcgactgcggcctgaatctcaaacagcgtgggtacttcttcctagatgaacggctgtactgtgagaatcacgccaaggctcgagtcaagccgccggagggatatgatgtggtggctgtataccccaatgctaaggtggaacttgtctgagctggaaaatcttgtcttgcctctgcttcacttaatgttccctcatggcctgtgtaaatatatgtcctcctggcctttctaataaagtccttctgcttgctctggaactagctagtgtctggcctgataacctccagtgcaggccatagctccaatgtgttgtaagatcggttcaggtgtcaggcctgttctagacattagattcagtggtgagccagacagctctcatgttgttcccacagcctgagttggatggcagagtaagccataagggatagtgtcgttaatactatggtctgctgctgtagtgtaacaaggagcctggcctgggtgaggtcaggaaagctgagaatcaagagacggagggaggcaagagatctctatagaatcaagacctatgcaaaaaaaaaaaaaaaaaaaaaaaaaagcatggaccatgacagccctggtgtgcccgttgtccgcatgagtggccaggggtggtccctagcctgcatgggtggtgcccccttcctggtactctcttcctaagtcgctctctgtccatacactctatttttcttctcctcttccttcctcctcccactagggggcaagcttgactttttcttgagacaaaagtcagcgctttagaactaacactgcctttccctctaagaagcttggtccttttcccccacctgcagtagaaattctacactccttggatgcgccccagttcactcgaagtgaggtctgccttgtaccttttggttacataaacctattcagactctcacttttaaaactataaaagttaccgggttgatgaatgactgttgatcgccatgttccgcacagtctggggaataagctaccatttcggttttattaaacatgcagtaaggtaaatttaaaagaataagtggcagatgggtggatggatggatggatggatggatggttagaagcaaaacagaaccaacttggcctcaaaatgtccaataggaatcgactagggaagcccttttaaggcagtcagttggagtttctaatgaagagaattccctccggtgaggattcccaataaaaggacaaatagcaacagatagagatgacatcatcaaacagacagccacaacacccagccgaaactgactggggaagctgaggcagcaattaaaatttctgagtaaactttctgagcttcggcgcttcctgattcaggccctttcatatcatgggataaacagtagtaatgtctggtctgtactgctagccactctcacctctctgtcccagagttagaggggcagcccattcacaggctggcatggggccttagaaggtactttgacgggtctggagagatggctcagtggttaagagaactggctactcttccagaggtcctggacacagctcacaaccatctgcaactccagttccagaggagctgatgccctcacacagacatgcaagccaaacaccaagttggagtctctgaaatggtggggaggagagcaacccttattaccctgcttccagagtcggcttctcgatgaactcaaacagcacatagcgctgtaccactacgacatgcatttcgaacccacagctgtccaggatcctaaatctgtggacctaccccactgcttgctctgggtgagaaaccacctcggctcatttgttcaatgagcctgaataatgtccatttgtgctgtgtattctgggctaccagaaggctgctatcagctcacattctaaccatctgcattcaacaagacccacccacttcctccctctctccgacactgaaagtttccacacattatttttggtaaataagatttactgtgtgttggctgcgtgtccagtcctgaaatgacagcgagaaacagtgtctttcccctcagtcccttacagaagttctcataggaattaccctaaaatttttgaccacttaccccagatttacttaacttcttattaataactgataggaattttccatacctcaccttgtatgtatgtgcgtaatattagcttttgtccctgagtgtgcacaggtatgtggagaccagcggctgatgttgggtgccatcctctgttgctcttccaacgtaagttctgagacagggcttctcactggttcagtgaggccaggttgcaggtcagctcccggacttctcctctccccagctccccagcactgagattatagtgtgtgccaccacgcagggctttttacataggtgttggggacctgaactcaggtccccttcaccaagtgagcacctccccaactgcttttataagattctttgagctggattttattcccccgatccatttgctgttcccctgacatcgagtggctttaatgatgactgtgttggagtttagaggttaatcgttccacctcattcttctttcacaaacatgtcagaggtgttctcaaccatttccagtagtcagtgactaggtgtgttgagctctggaaaataaacatctctgaaccgtggctggggtgctccctggatctagagagagagctgccacagaggactttcctccaaagacccccttcccatccccggaaagtgggtagctctatctctgtggcctccaccccattctttctattcaggtgccttggggactacctgctttctccttgagccaagtctggagctacctctgtcctacccagaccccagagagtgtgggggctctagggtcagaacctactctatctagcacatacatgtgtgcttttacatgcatgggcaatcattcagggggtgcatgcatgtgtgtgtgcgtgtgtacactcacacacacacacatgcacatgcgcacacacacacacacacacacactccttttccctccgccgtctctatcctcacttcaattgctataagctttctctgggaagtaagtcctggaaaacagctgcccagttcctgcatccccgacctcagttcatgcattcacctaagcattgaccagatgtgttactaggaaaacattctgaacaaccaggacataaaaactgggcctggaggtgtagcttcaccagccgggtacttgcctagcaggtacaaaatcctgggttcaattcccagcactgcataaaatgggagtgatggttcacacctgtaattcctggatggggtgggacttgggggagagaatgctggtagaattagatgctcagggccatccttggctatgtagcaagttctaggccaacctgggctatggtaagatcatatctcacacacaccccaaagtataaaccatgaacagtagtatgaagaaaatgaggttgctcaatggaaatttcgatcatttgttttatctgaggcttctggaaagccctcacagaacaggtgacaggagcgggcacctgaggtgatggtgagcacctgctggccagctggggaaagtcacatgctgttggaaggagcagaaaatgcaacttcccatagggctgggaagaggctgtactctcgggtcctaagaagagtgagcggtgtctggagaggtgtgagtgaggggactgaacagtgggtgaggtcaggcccatgtggggtggatatctgtgttggctgtgttgaccttgtagacacaggaaaggattttggcttgtaccccagagggctggcatcattggacttacggtttaaacaggatggttctggctgctgcgggaagactctactgtaaggggcaaaggtgggagcaggaagcatgactgtgtccatccctgactaattgctaactagcccacatccctccacctccggagctaccccagttgaggtcctctgcatgacctacccaggctggcctccctgtctccatgaataacaacgggacgtttgaaaatgacagtgctctgatacttctgtcttaaatcttccatagttcctcattgctcattgacaacctaaagccccaatccctactcaaaagacctccctactcacacccctagaaccccaatgacctatctgtgtgctcagcctcaagctccctacagattctcccatgcttccttgatcttcctcctgcttctctgaatgaccagcaagttttatctccccttactccccaagaaccaaagaaaggggtgagggcagaaagtacccaacacttccatgtgctagcatccttcaaaaaaggaccctgccaggctggctggccttcataagacatgctgtgtagccaagggtgaccttgaactcctgatccacttgagtccgatgctggggttacagccatgtaccaccacaaccagcttcctccaagttacttaatggaatcagagcctataaaatgcttgagggtagtcaaaaggtgtctgtattaagcaagaattgtcctatatcctttgccactatggagagctgtgtctgggtccccaacaatatcagatatcttcactagtgtctgacctggacccatttgggggctataagactgaggcctcagtggttccctacagggcccagggttagcctcagccatgtgcactaagaacccccactatccaggcagccagtgagtccatctgtctccccagccactagaagactgggactcaaaggcactcccactctgcaccagcttttttactggcagaagcatcagtgggtgggcagacactctgctgctttctgggttgtttctctcctataggcacacaggaagccagcacccagccagacttggagggaggaattataccgaatggtacctttaatggagctgatatgcctcaggccctccagccctccctgtttagtcgatatcatccttctatattccctgcatcaacttaaaaggaagcaagacaatccttgtcttgtgtacgagctcagaaaaggctgatggacttgccctggtgccactctcttccagctaatctcagcagcaaggacaaataggacaattatttgtttcctcccttaagagtgatacatgctccaccaacatcctagtggctctgaccagcctgcttcaaatgggagatgatctgtctctgattagcaagagcagcagaatagctcagcgcccagactctctgactgattcaacacagacctggacccccaacctgcccagaacacagaacagtggaagctaggcctgagtcagaggtgaggtcttatatcagtcagtattcagctgctatgccaaaatactggaaatacaaacttaaaaggcagggaatatttcttttgcttcatagttcctatccatggttggttggctccactgtttggggcctgtggcagcactgtggatcatggctgagtaatggaggaggcctggtcactttttggtgtcggggatggggggaacacagagaaactgggtcccaaaattcccttcaaatgcatgcccccagtgagctaaggtcttccttcccacctcctaaaggtttcactccatcctaagagacagatagctttgtgattaaaatcaatggctgttcttccaaaggccccagcacccacatggcatctcacagttgtctgtaactgataccagggtgctcaatgccttcttctggcctttgtgagcatcagacactcacttggtgcaaagacatatatgcaggcagaacatgcgtgcacgtaaaataataatttctaaaattaaaaaaaaaaaaaaagaatctcactatgcagcccaggtcgacctggaattctctagatagcctggagttacaggaatgtgtcaccatgacaggctcctttcttgtagtatatactatattttatactacgcatgcttggaaaaatacctgttccagagagcttccccatatgaataatgttcaggctccctggataaaatttcggcaactcccaggagggtgtccccggggcattaactctgccggccgcaggtgacaaatctccctaaggttaacttctggacatgtttattttgctccagaatcaacaagatgtgaacaaaatgacatcctaggtgtgacattaccttttcaaggctgtcttagttagggtttctatgactgtgaagagacaccatagccacagcaactcttataaagggaaacattaaactggggctggcttacaattcagaggtctagcccatcatcatcatgacagaaagcatggtggcacacaggcagacatggtattgtcaaggtagctgacagttctacatctggatttgcagtcagcaggagagagagtgagccatgaggcctggcttgagcttctgagatctcaaaccccaatcctggtgacactctttctctaacaaggtcacacctctaaaagtgtcactccttatgagtctatgggggccattttcattcagaccaccacaaaggttcatggacttgttttcttgctcccaacaaaagaggaagtgagcaaagggggcttccctgaggccaacactccacaagactggaaatgagtcccaagctagggggcatctttttgagaccctgactcagtgctccttcatggccatcatgttcctccatgagttttgtggcttctcagagtagtaatttggaaataccctcaagtgggagagtgacacctgagtcagaaagcagaatcttgagaaaggaataaagagaccagtacgtaacacgcagccatagcctgagactgcctctccactgggaggttagattatctccaggctgatgccaatggctcaggagattaaatggtctctcagtcctgattagaggcctatcagggatggtggaatatagaaagcctctgaagaggtcagaaacaatgaagaaagattttcctcgattctaacaaccttctgagttaaggttggaagattcagcaagtatttctgtctattcaaggatgttccacaggaagagtgtggtttgtggattttattggttggttttatgggatgcattggcggggggggggtgtttattttgagacagggtttttctgtgtacctctggctgtcctggaactcactttgtagaccaggctggtcttgaactcagaaatctgcctgcctctgcctcccaagtgctgggattaaaggcatgcgcgaccacgcccagctctttttttttttttttttttaagaaaaatactcacatatctattgtgttagttgcttttctattgctggagaaaagtaccatgaccaaggcaatttataagataaagtgtttaaaagggcttatgcttccagaggattggagtccatgatggagaaacaaaggcttggtggcttgagagctcacatcttaaactcttagcaggaggcagaaagtgtgctaggtgggagactcttgaagccccagagaccgactacatgacacacctcctccaagagagccacacatcctaactcttcccaaacagttccaccaaatgaggaccaagtattcacacacaggagctttgggggccatttttcattcaaactaccatacaaatgtttttctagtaaagcccaaatgacggtatataatttcataatttcagtttcctaaaatattgatgaaaaatgtatctatggaaagaattgtggaatttgtactttctctctctctctctctctctctctctctctctctctctctttgctgtttcacacacacacacacacacacacacacacacacacacacacacaattaaagtatttttagggctggagagatggctcagcgggtaagagcactgactgctcttctgaagatcctgagttcaaattccagcaaccccatggtggctcacaaccatccgtaatgagatcttacgccctcttctggtgtgtctgaagtcagctacagtgtacttatgtataataaataaatcttatcatttatatataataaataagtatttttaaaaaggaaaacaaagtggcacattggtggattcaactctctgtgatttctgtctactgcaggatgccccatgtcttccccaccatgatgggccaaatctcctaaaccatgagctgaaatgaccccttattccctcaggtggctttagtcagacatcctgtagcagcacagagagaagtcaccaatacaatcctcaaagcgctgcaagaagtgctacaagctagtaaacctagagttagctggaataaatggaggccagacgcatatccttcagcattcacccagagggcaaggcaacatcttcaaaaacacacctcttgtgaggataatgagatgactccatgggtaagggggcttgctgagtgaggacctgagttcaaatctcagtacccagctttagtttggttttgtttttaagtcaagtgtggctctggtctcatgcaagtcacattccaccataaaaagtagaaaggatcaatgagattactggtcaccagcctaagaccctgtctccaagaagtttagtggagagtgacagagagggacactagatctcttcctctgttctccacatgcacagaaacatatgcattgcacacacaacacatgcacataaccaccctcacaaatgtaccatacacacacaaaaggcagacaaacaatattatattatattatatatgtgtatataaaattacatacatatatatatatatatatatatatatatatatatatatatatattcattccatctcttgaaatttttaatgggatagcatccagataatattgggcatctacttcatatctgaagaactccatacatagaggaagtttcagaaattgtctatagttcaagaactaacctttctcaacaggcagagtctgccattaagattttggaaacccaaaatgtggctaaacgggagagagaaacgaggatttgtaaagtagtcttcctattggcagcttctctgccgttccatctgtaaaacccaggagaaagaaagaagccatctcccatcagagcccatggcttccactctgagatttgtcacccactaaaactaggggctgaagcagtgcacattttacaaacagaagggacactggcaaagggacagacccaaactgtcctcagggagggaaggtaggaaccaaaccaatccattttggtttctcttgaaaagataaaaactaacctggtagtggtggctcatgcctttaatcctggcactcaagaagcaaggcagatggctatctgagttcaaagccagcctagtctacacagtaagttctaggatagtcagggctacacagagaaaccctgtctcaaacaaacaaacaaacaaacaaacaaacaaacactaatggggccaagtggctctcagcctggctccctttagtgccacccaggtgtgcatcaagaagtcctgggtcacccgggaaatagctggcaggaaagctgagctcttattggacacccaggtgttatatccaagaaagcacgtgacagggagtgggaagacatgaactaaacgttttccccagctcatggtgtgtggtcctattttaacataaaaattaattacattttggtttatttatttgggaaggggacatttcattgcacaaatatgaaggtcaaaatgcaacttgtgggagtttctcattccactgtgttagtcccaaggatcgaactcaggctgtctgacttagcaaaaggcactcccttctcagcagccccaggtgggctctttagatatttgtttctgtctgttcctgcgtttcccaacccttctcaaggaagtgtcctagttaggtttctgttgttacaataaatcaaaagaaatttgaggaggaaaggatttgttcagactacagattcagactacagtctatcactgagggaagccgagtcaggaactaaagcaggaccatggagggatgctggttactggcttgctccccatggctcgttccatctgctttattataccactcaagaccacctgcccaaggatggcacagcccacaacattctggaccttcccacatcaattatcaatcaaggaaatcccctacacacacacacacacacacacacacacacacacacacctgcagacctatcttatggagacattttttttttctcaactgaggctctttcttccctcatgcctctagcttgtgtcaagtagacaaaaactaaccaatcatg

SEQ ID NO: 2788 - DNA, 683 bp, Mus musculus
ggcggccaggcggcggcaacagcggcggcgactcctccgtgtccggctccagctctggctgcagctccggcccgcgatgacccactcggtgaccctgcgcggcccttcaccctggggcttccgcctggtgggcggccgggacttcagtgctcccctcaccatctcgcgggttcatgctgggagcaaagcggccctggctgccctgtgcccaggtgacttgatccaagccatcaacggcgagagcactgagctcatgacacacctggaggcccagaaccgcattaaaggctgccacgatcatcttacgctctcggtcagcaggcctgagaataagaactggcccagtgctcctgatgacaaggctcaagcacataggatccacattgaccctgagtcccaggtaggtatagacactgctcacctggcccagctagctcagagtgaacccaggacaagaggcaggcatggccaacagacttcagtgaaattctcacactgatggtcagacagccagggtatactgaagtagacagctcctctaggacatgcctgcttctatcccttgccctggagcccctgcagtgtgcttgacccaactccaggctagcctgcattcttggctagggtgcctgggatgggatggggctgggctaggtcttggctcaagatctctccacacagag

SEQ ID NO: 2789 - protein, 138 aa, Mus musculus
MTHSVTLRGPSPWGFRLVGGRDFSAPLTISRVHAGSKAAALCPGDLIQAINGESTELMTHLEAQNRIKGCHDHLTLSVSRPENKNWPSAPDDKAQAHRIHIDPESQVGIDTAHLAQLAQSEPRTRGRHGQQTSVKFSH

SEQ ID NO: 2790 - DNA, 1175 bp, Mus musculus
ggcggccaggcggcggcaacagcggcggcgactcctccgtgtccggctccagctctggctgcagctccggcccgcgatgacccactcggtgaccctgcgcggcccttcaccctggggcttccgcctggtgggcggccgggacttcagtgctcccctcaccatctcgcgggttcatgctgggagcaaagcggccctggctgccctgtgcccaggtgacttgatccaagccatcaacggcgagagcactgagctcatgacacacctggaggcccagaaccgcattaaaggctgccacgatcatcttacgctctcggtcagcaggcctgagaataagaactggcccagtgctcctgatgacaaggctcaagcacataggatccacattgaccctgagtcccaggactgcagtccagccaccagcaggcgctcctcagtctctgggattagtctggaggacaacagatcgggcctgggatctccatatggtcagccacctcgccttccagtccctcacaatggcagcagcaacgaggccaccctgccagcccagatgagcgctctgcatgtgtctccacccaccagtgccgacacagccagggttctccctcggaaccgggactgcagggtagacctgggttcagaggtatacaggatgttaagggagccagcagagcccacagcctcggagccgaaacagtcaggatccttccgctacctgcagggcatgctagaggctggcgagggcggggatcggcctgggtctggtggtccccggaacctcaaaccagcagccagcaagctcggtgctccactgagtggcctgcaggggctaccagagtgcacgcgctgcggccacgggatcgtgggaaccattgtcaaggcgagagacaagctctaccatccggagtgcttcatgtgcagcgactgcggcctgaatctcaaacagcgtgggtacttcttcctagatgaacggctgtactgtgagaatcacgccaaggctcgagtcaagccgccggagggatatgatgtggtggctgtataccccaatgctaaggtggaacttgtctgagctggaaaatcttgtcttgcctctgcttcacttaatgttccctcatggcctgtgtaaatatatgtcctcctggcctttctaataaagtccttctgcttgctctgga

SEQ ID NO: 2791 - protein, 326 aa, Mus musculus
MTHSVTLRGPSPWGFRLVGGRDFSAPLTISRVHAGSKAAALCPGDLIQAINGESTELMTHLEAQNRIKGCHDHLTLSVSRPENKNWPSAPDDKAQAHRIHIDPESQDCSPATSRRSSVSGISLEDNRSGLGSPYGQPPRLPVPHNGSSNEATLPAQMSALHVSPPTSADTARVLPRNRDCRVDLGSEVYRMLREPAEPTASEPKQSGSFRYLQGMLEAGEGGDRPGSGGPRNLKPAASKLGAPLSGLQGLPECTRCGHGIVGTIVKARDKLYHPECFMCSDCQLKQRGYFFLDERLYCENHAKARVKPPEGYDVVAVYPNAKVELV

SEQ ID NO: 2792 - DNA, 35786 bp, Homo sapiens
ctactaaaaatacaaaaattagctgggcgtggtggcaggtgtctgtaatcccagctactagggaggctgaggcatgaaaatcacctgaactcgggagtcagaggttgtagtgagccaagatcgtgccactgcactccagcctgggggatagagcaaggctctgtctccaaaaaaaaaaaaaaaaaaaacaaaaaaaggttgggggacagggtggggaatgaaaaataaaaatacttcgggatcttaaaaaaatgctgacagaattcatcaccagtccgtctgtactaccggaaatgttaaaggaagttcttttttttctttcttttttttttttccagagacggagtctcactctgtttcctaggctggagtgcagtggtgcgatctcagctcactgcaacctctgcctcctgggttcaagcgattctcttgccccagccacctgagtagctggggctacaggcgcacgccaccatgcccggctaattttttgtattttagtagagacagggtttcactgttgttgcctaggctggtctggaactcctgagctcaggcaatccgtctgtctcggcttcccaaagtgctagaattacaggcatgagccaccgcacatggcctaaaggaagttcttaaggctgaagggaaataagccatttctctgctgaggtggctcattgatacctgttggaaattcagctctaaacaaaagaacaagtgctaccagtaaacctaacaagtaaatagaaaataggttttcttgttttttaaattacttaaaagacagttgactgtttaaagcaaaaataatgagtatttattatggagtttatagcaaatacagaggtaaacgcacaacaacattagcaaaaaagaagggagaagtaaatggaagtgtattattgtaaggttcttacataagaagcagtatttgtccttctgttgtctttattttcctttttattatcttcatttttctaattacaaacagtaaaatttatttatatgaaattaaaacactgtacaaatatataactcagaaaaagtaaatgtcccaaaataccatccccagaaacaaaaactaccaacagtttgcagcatatttctctgatttttgaaatctatatgtaacaggaaaacatatttcaagtatttatcttcacgaaagagatgtttctcacctcaagtcttagtctgcttcaagttactataacagaataccaatagctgagtaatttataaagaaaagaaatttatttctcaaaattctggaagctgagaagtccaatatcaaggtgccagcatctttcaagggccttcttgctgcattattccatggcagaaggctagagggtgagagagacaaagggggaccgagctcctccttcacaaggacacattcccacaataacaaacccacctctgttggcattaatccattgggggcagagccctcatgaccttatcacctcgtaagagcccacctctcaacactgttgcattgtagattaagtttccaacacatgaactctgggggacacattcaaaccgtagcaccatgattataaaaatattaatctatatatttttttaccagtcatttctggtaaagcatatgagtagtttataaaagcattcacattgggaaaattaaaatatatagatcatgaatccatttgggatttactttataatgtgggaaattatatagcatatagaattatagccttattttttatgcataatagtaaatggccccaacatgagttattgagtaaactaccttttattccctgaattaaaatgttttctttatctcatgctatggactctcttttgttccactaacatattcgtcttttcctatgctgctatcacattcttaattattttagctctattgcatactttgatacttatagggcaaatcttactttattagtctcttaatccaatatttgtgggtttttttcatacttacttttcagttgatccttagaatcatcttgtcaattcctcccacccaaacaaattttgtttggaattgcattgaatttactaataaattaaaaatattgatttttctagaaacatgacatatgcctgcataccttttgtcttcttttaaatctatcctagatcaaagttcataggccctttgttctcaccaccactaggataagaaaaaggaaataaaaaagaaaaaagtttataggcttttgatgtactcaaaattcatttctagatatttttaatgtttcaccattatcgtgaatggtaaattgttttcatcacattttccaatcagttgtgacttagcactcttaaaagctattaaaatctatatacatatattaatttattctactctgctccctcctactggattctcctactggtcataatcatttttcaattgattctcttggatattatgaaaggaaaatcataatatctgcaaataatgatcattttgactctattacttacttcctttacttctcccttatttcttcttttcaccctattgtcctggttaggacttccagagcaacactgaacaacagtagtgaagaggacattggattctcccattaatagaacttcctagactgttaaatctaatgctggcttttggttttttatatctgttctttaaaatgttaagaacatttcctctcttcatggttttctaacttttatcgtgtgaatggctgatgaattttgtcaatgccttttgagataattacaagattcctttcttcttttaatctaatgtattaatcattacgttttatattaaatcaagcttgtaatttgaaaaagaatccccaaggtggtaatagtgtttcaatatattatgggagccaatttgctatattgacaatttacagggggccaccattttcttaaaggggatatattggtgttaggataacagatcttcacaaggattgtggaagctctccatctctctctggctctggaacaccatggttctctgagggagaatgcttgtgcaccctctctgggccaacaatgcttcatgcttgaatgcccaatgtcacagctctccgcagtcagcttgtcttaatcctacacacagctacttctcagggactgctggtcctagagccttaggtggggccttttccaacactgtgtgcacttcaagcccagatccgccattttctcttcatcttccctgggatgagacagcttcttgtttaactctccacacatagaagttctcattatacattctcttagagctcctggtttctcctgcaggagaggcacagactccgttgttcctaagcaagcctatcttcccattaatatggtgatttcacagggggcaaacaatttgatcaggcatcctcttgctggaagctcaagtcctgtgaatgctcttaccattgcgggtgggtatgagagatgcagggtgtgaggatttcagtcccactcccaatgaaagctctgcctccaactccacactgctgatcctgaatctacacagctatggacctagtcttgggaggggaagtgagaaagaattttgattttcttagaagccaagaaaatagccacccaggacatgaggctgactcatgggccctgctccaatccattctctcaagagcctccagcaacctcagcccagcttcaccctcacaggcctggatctggctcttccgactttaatccctatggccccctgcacctggattcccagacctctcggccagctggcagctactggactcggcgacatggctctgcctgactctcccagcaacacaggcggccaggctcatacccagtggccacagctggcgtcctatggccaggcctggaggtgaggtcagcctgaacagtccccgccagcctgtgactcagtcaccactgggcagtgctgggcaccacggggcagggcacttcaccaagaccaatcagtgactaaaggagctggcactgcaggggagagggccaatcgtaagagatagaaaggatggggcagggaggataggctagcgacaggcctatgctagccagactcctgaggagagcttcaccacctctgccaatctgaatcacagcccccaggacccctcaggatcaagagacagaggtctaatctataccagtgagaaaatcatgggcatcaggagttatgggggtccctcctgagacgaagaaccaggaagactggaatttaaatctttgaagttatttccaaatgaggctatccattttaaatatgtattataaagacttaaggcctggcacagtggctcatgcctgtaatcccagcattttgggaggccaaggtggttggattgcttgagcccaggagtttgagaccagcctggacaacatagtgagaccccgtctctttttaaaagataataacaataaataaataagtaaataaataaataaaacttaatagtttaacactgaggcctaaaacagtgcctgacacataggaggctctcaaaaatatctgatgaataaataaacaaagcagaagtaacaaatgccataattcttgaaacactattttcacatttcttccttttttattttattgggaacgtagaaatatgaaagtgctccaagctcgttctagctgctattaaaaaaaaaaaaaaagaaggatgggaggaagaaatatggaagtagcatgggcctctcctgccttctgagtagccctggatgtcagttctagtggtcaagaagagaaggaggggcctcaggccagagaccagacagtcctggccaggtcactgctaaatttgagtgtctgtggatgtgtgcgctggggcagggctaaagctgggccatgagtccaggccccagctgacagatgagtgacagagtatgtctggagagccccagtaactgaatttctgggctgcatgtatgtccgtctccttcttgtcaaccctgcacttttgctcaagccttacctgcaccttatagcagcgtctctctctctcgggctgagaaggaaaggtttttacacccctgcttttgtccaggcacagtgatggtcaggccacggccaagacattctaggtccagggcgtagaatgagcacatggtacagttgctctgcaatccctctgctgctctgcctggaggagctgatttgtaaatggaggcaccttctcctcacagacaccaagaggcaagactaagggaaggctccagctgtcaggagaaactggaaacctgaagacacctgggttgggcctctatttatggactacaggtagacttgggacatctgatgctgggggagactaagggatggccggcaggctgcccgaatcctctggcctgaatgagaagtgggaggggtgaaaggatgggggtctccttgaggcagaggtgaggctgtgatgcttttgcaagctgccttcctgaggccccagttgcacaaggctccatcacatgggcctcgctgccaccacaaacagcctgttctgtcacttccctgctggggctgcgctgagccacctctggctctcccacctgtcagctgccttccccctcccaccccccccacccccaccgtgtgagatgccactcctcccaacacctttctacacccaggcctcagggccagggcctctctgggcccagctaggtaaacctgtccccgccctgctgcctggcaacccctttgttgggtcccagagcagactggttttctctgtgaaaacagagaaagagcaggtctgacaggggtgctgatggggactgcaggtccagctgagacacatctgtccctggggcaaggcacatggcacaaaggcaccaacacagggtctaaaaccccagacctaccacttgaaactgtgtgagcgtgtggtggtcacacacctcccccaggctcagtttcctgaagagagttggttctgctcttgtgtccgccctggaatctggctcagggccagtaactgggtcccagttggcagagccagctttgtccctgtttggatcctcagagactgaccccctctggagcctccagcatctcagcccctagagaggtgtggcagcttggagaatccccaccacactccaaggttagttgaccaggtctgggctggacatagagcaggcactcaataagtgtttgttgagggattgaatggcacaaaactagagctgggaaacgccctttgccacaggcacgccctcccctgtgtgttctgctgaaccaaccacggctccaggaccagttttgttgcctcctgactgagtcctgtccttccaggatatgctgggcatcagcccccagcccacctcacaggctgtactgtctcagaccttccttttggatgttgcctggtgcccatgcctgtggctgcctctaccccttgcagagcccttgacccctgcctacagtgggcctgccttaactccctgtcactctaaggcgcagttctagccctgcaggagacccacgctgccccctctatccagctgtgcccaccacagactgcttcctctccaccattcgagttcctggccttgaccagcaggcttctaagagagcagacatctgggtggagctggaccagacaggtcacactgaaatgaaggcatctaaagttctctctggctgtttgctgaggccctggagtggtcagtactgtggactgggcattccaggaagatggaactcccaagcaaggctttagatccccttggaatccaggctcttggctggggagagggggctgggccttgaaggagagatgtcttggcctccaggagctgagccagaatggagcagactctacctagagacctgaggccaccaggccagggaggagcgggtcagcagctgagctctctggctagcccccagggcctcacgggaaggtatcctcaaatatgggctgcctcatcagctccaccgcacctccccactcagggctacatcaattctgggcactctcctggattgtcctccaggttgacctcacccttagcctgaggttgttcttgtcccaatccttccctcttattctaggctcaggcccaacagcattcccaagggtgtctgctcctgctggagcctgccagccctgcctgcccattgaggaaagagcacagtgacttctcctgaccttggacagacctggctgcatacagaaggcctgggcatcgtgccctgagccactgggtgtggcctcgaaggcaacagaagcagaattcttcaccttcctaagcccccttatgccctccctgcgtccctctgggtcatgtccaaagggtaagctaagataataattcctgtaactgtggtgttgttaatagcaaatgttttttaatgccttgtgtgtgccaagttctctgcggggtgctggagagacacaaataaataagacagacacagcctctgcccttatggatgatacctggacccatccctgagtactcaatacgtacttatgcagagaagaagaatgcatgaaataagcagtctgattattcccagcagcacagacacctgatgggtgtgcagtaaatacgtgaaggccactagggcaggggtgatgtgtgacctggccaccacacatccccaccctgaagagggcttccagaccctgtgactgccttatgacttggtattccagcatgatagggtctcagcaatacagcaatctccaaggaccaaggccattacaggggaaaaggaaatctgagggcttccttaaagaactttcgggagagctggagaagccatagaatctgcagcttgtctgacctgctgcctagaactcagggtaccttatgagtgggtttacagcatggcccctaagaagggccacccccaaactccaggtacagaacctgacctggcatctcccctgtgggaaggcacagtcagaagtaagcctctgatgttctcttaagtcagggatgtcaacatgagctcatgtgagggaatgactggcctggacccggatcctgcatcattccaatctgtccagatgctgcccaatgaaatggggaagtttatggaccagattctaaaaaattcatccagagtccccaccccacctccacctccaaacttgtgatagaagcctttggagatggattacactgcccagagactcaggggccaggaaggtcatattcaggaggaccacttcacattcccccggacagaagtaaacgggtaatgaaggaatttcaggatggaggcaaggagtgtaggcagtctttgggatgtgaaatcgggggaaacaagcaatgtatgaagaggagtttcaggaattcactttgggatacattgggtggaagcttccacagacccttgaggatcccttccccccagaaaaggtctgcactgtttacattcactaggactcttggagcccagctgacaggcctctgaccacaagccatgctgtacaccaaaccctcaggacagccagtgataagtgatggctgccccttactctctaccccatttagtagggtctaagtcctggggagcttctggcctacagacctcagagagacaatgcagtgaccagctctcctgctggcccttccacctttcttcacttgggatccaagtctgcaaggggctgagcagaaacctcctccaccacaaagtgatggagaacagcccaatggctggtgctctaatggattcagacaccgcacccccccccacacacacaccccaaatacactcccatataaacaccgctaccacacaccacttgtttctctcccagctgaacagatagcagcatcttgcctcctacagaggcacccacattctactctgaagggcccctcccttccttggactgccctaggtttgtgcttctcaagcagttctcctctttgcgggttgtcagagacccagtggacacatttcatcccaccacctgtgaggagcccaagagcagggtccttatcacagcttgactaaaaggacacataaggttaaggatttgggctaaatgagagacctccacagagtctggaaaagtaaaaggtgtctccctgatgtagccagatagaagtgccgagagaaccagagggaggttggtggtgccatggcatctgcattggctgttcaagtacatccccggaggataatggttgggaatggagagaagaccttggagagaaaagggcccaaagtgaagcgctgcatatatttcttccctttacactgcacagccacgaccccagccgctccagctgctactttctcaggagacctggggaaacaaatctcctggcaaaggacgaggggagggggctgtgcagacagggaggtggcctgcgaggagcctgcaagcagcaagagaaggcctgaatgttctggggaagcagggacaccttgcttccagatacaagtcagggaccacctcttccaggaagccttactggcctccacaaactagtctgaggacctttctgtgtccactcccacgctcggcgctgcctgctgtcgttttgggtctgcgtccccggcccagtgctgcgcaagcccctggttcatagggttcttggttcagagggctcctcacacggcaggatgggccgcaggtgtgccagtcgggcccatgaggaggtatctgagctggggcagccccatcccccaagtgggccctccatccctcctcgggctggagcaccgcccctaaaagcgacttcaaagggccggtgtcgacagctgggtttgggtccgcggcctgcagatccaaggcccgagcaggatccaggccgtcggggccgtccgaacgcggggatctctgagagctgagtgggggtgccgggttgccggcagccggggctgagggcgggtcctcagagccccccgaagtgggagggtcgggctggccgcggggccaatccaggcgcacagggagcgggggcgggggctgggccgagtggggacaggggcgggcgggccgggggcggggcgcggcgtccaggcggcggcggcggctgcggcggcggcggctcctcctcagagtccggctcaggctccggctgcggctccagcccgcgatgccccattccgtgaccctgcgcgggccttcgccctggggcttccgcctggtgggcggccgggacttcagcgcgcccctcaccatctcacgggtgagtctggcggctgcgtggcggcagggcggtcccatgtctgagaccgggttctcgcggtccgcccgggacccagatcccctgtgtatccgaggcttgaaggcggagggttggcctgggcgccccgcatgctgtagaggcggcttccaggcagaggcaggcagccccagccgccctcctcccacgctgggcctgtctgcccgatcccgcgaagaatctcccaagagttcacgcacccgcctccccgctggcctcatctgggggagccactgtggacccgggaaggacccgcggagatgggccaggggtctagacagctctacagaggcccagaaactcttcagactcaccccctgcctgaagatctggggcaaaatgatttagagccccccttcccctatcaggggtccctgccggcagagcttggtgacccagggaggtctggggtcctcgctgaatctgagaagacagaggtccatccacttcccactttgggcgtgagtcagtctctcattcacgacctcagtcaccctaaggggaagtgaccaggaggaattttggcttccaggggaaagggagacttaactgtgaggttgtgagacccctccccacaagatgacacaaagccgggggccaggacagcctcaggcccgttcctcaagtttcccagggccctgccttgcccacagagaaggaaaaggagccggcacagccctggagcgtggctagtctgaggatagaggagtggaggaggtgactcaggccctgttcgagggggtgcctgtctaggggagacaggatcctggcccagcctcgacatcctcgtgtctggagggccaaaagagaggactcagaccctgcccttgggggtccccagcctaagggacagaagaggagagaacccaggccctgcccttggcggctctcagtctggaaggagcagaggagataacctgaaaccatctgacggccatcccttgctcccacacaggctgatcttgtctttgggggcctgtgtcagaggcacagagaagcaccttcccccaccctactgccacctcttgccatgggggctgggccaagccggctgggctttaagagacttctgtccagttcttgggagggggtgggcaccaggtggagcgtggaatcatggaatcccgtttctgggggccagggtgacaggcaggcccagctgtcctaggaggcttcccacatctgccctcactgccaggtccctggggccgagtgaggtgggccttcaacacatcccagagcctttcatctcctctttcctataggattcctgctgtgtgtgtgtgtgtgtgtgtgtgtgtgtgtacgcaagcctgtgtctgcttgtgtgtgtcatgctgtgtgtccgctgagggggctggtggggacactaagcgggctggccaggcaccctgggcgtgaggccgctgacaggctcagtggcggcggctgacggctgcaggcggcagggagctgagacatctgttgcccacgcggctgcctgccctccgaggaaaggcctccacacgtcacagctgcggctgcggcagcagcagcagcaacagccttgtttggagctgactggggatgcaggccccaggcaggcagtctgggagaaggtttgccaggaagagcctcctttgtcccccaaagtcacgcggcagcagctcaggcccaaggagccaggatggctgaggttgggtttgggtgggatctggggagatttacagcgctggggaggcacaggccacagcttgcctagcaggtacctctggggcaggtctacagggactgaagatatgtgggagtgtcttcaccagtggggctcaagatccagcccctcccttgcttccaggacctcccctacgcgggacctggtagggagggacagcctcacacagacagggaggaggctatcggcccggcagggctgggggcttgcaatctcagcccatgaagcctccaggagtcccaagaacatcatccggggctccttccccacaagctataatgatggctggccttggccaagcatccagggtgtgccaggccctaccctaatgggtgttggtaacagctccctccagtccctgtagtgagcaccaccttatgcccagcctcctgtgggggctttacatgccctgtttttctcaaatagtccttacaacagcctttagaagtaaggactccctctggccttacatagatggagacccaggcacagagaggctaatgtaatcaacccagagaagcagagtggagacaggaggaatccaggcagtctgcagtttgctgtgactgtgtaggacaatgtggcacctggttctgacttggactcccagcccaccacatctaggctgggtggagcaggggctgggaatgcagccactaccggtaaggggctgattcatgccctcaccgcccacctgacttcactgttcctgtctctgttccttctttctgtttatcctgtgcttaggagctagacggatcggcctgaattccactctgtcctgtgacttcccgcttagagccctccatggttcccagccacccaggagaaatgccagcttcccacccgggtgtacaagactctgcaatatctgatccctgcctcttctctgacttcatctctcccactctcccctcactcatgatgctccggccatacaaccttccttcttctttctctccagatatgccattatacatgctggtccttctgcctggaacactatctctccctcagatactctcttttcccttaccccctttggaagaaaaatgcaggtgttaagagcatagttttaaatttggaatcaggtggcctggattgaaatcttgattcagtcttttatcaattaactatccttctgtacttctctggacctccgtttcctgatctaggaaatgggcttgccttcaggattaatgagataatgcatgtaaaggtgactgggagagtcacaatttcttggcctcacgccctctctgaccagaactcccctagctcaatagagctggcagcatcccagccaccactgctttcaagaaacttcctccgcccacagaagcctgaatgtaccccttgtgctggctgagtcatcctgccgcagttagccgccccctgaagaaagactcctctccagtgtggggactggggcatggcatccctcccccaagcttctttctcttcatctgtaaaatagggatgagaacagcctctgcctcaccaggtggttgaggggttgctgtgagctagttatgggtaaagcatagagcccaggccctggcacaaggcaggtatccatgaaggggaggaggcagaggatggccttgaggggagggtgggatggtgccaagtgggtgtctcccccaggatgacaggcttgcacaggtgcccaggccctacaagtgaacattaatgatgggctagttggctgagggtgtcatgcttcagaagaacgtttccttgaggcagcctacttcagggcaggtcagcttgggcagtgccaacaccaggcctccagccaaggagctgccagcacctcagctttgtccactcactactgagacctggctgaactgagcctagctgggcttccaggagttcccaccagtaggagctcccacccaaaagaatggggtcactggcagcttttgaaccagctgggcactggctggagaggctgggtaagaaatatatttctaaaggctatgttggggtcaaggcagggtgaggggtgctccatggcctggattcccctgagttgcttacttagatatctctgtgagtctaactccaccccccattctagccttcttcagttgaccagcattgtaagagcttccaggtgtgaacactgcttgaccccgaggggtcaatagtggcactgaggtagcctgagttcctgtcctgcaggggaagtagaggtagaattctgacccccaaacgcaggctgtcagctggaactggatggccctggacttgctcagggaggtgatgttcagaccttcccattttaattataatgaagtattaacatgaacagtgtagggggaaaaggtggtcatgggagcacactgggtagtgagatcccagagaggctcccagaggaagtggcctctatgctgagatctgaaggatgaggatgtgggagtcaaaggaatgttccaggtggagggagcagcttttgcagaagtgtagaggtgagtgatatatggtgcctgtgagcaccccatagacattcacatggtctggacagagtgtgggtgtggaggtggggatgagagttgaaatcaagcaagtaggaaggcaaggtcactaagggtttgaatattaggtcaaggtgtgtagtctgtctggttggggccttgtctgtgtagggtatctgtgatatgtccatgctgtgtatgtatctgtgagcacctatgtctccatgtgtctctgtgtcccctgcatgtccttgggcacatacgcaggctgcaagaacaacatccatttgtcccagccctgaggaagcccttctcgtatatcctcatgccctgccaggcctccaggtgctggagttggaggtgtttccagcaaggctgcagccaggctacatggggacctcaaccagccactcggcttgcccatccacaggccatgctggtagcaggccacactggctaggttctgaggttggaggaggcctagggcacagcttgcagcaagaccatatcatgactgtgcccagccatctggcttgtctgctcgcaggtccatgctggcagcaaggctgcattggctgccctgtgcccaggagacctgatccaggccatcaatggtgagagcacagagctcatgacacacctggaggcacagaaccgcatcaagggctgccacgatcacctcacactgtctgtgagcaggtatgcacaggtgggctgggctgggaggatggaaggacgaggtgggcagttatgggcagctggcattttgggtgagcccagcttcacacagcctctctgcctcagctcctgggtgccccatccaggaacagtcccaaggagtagcactttcatgggggcctggcagatactgtttagagttatagcttaagaagggaagaaatccccttttaacttagactagaagtgtgttggggcacttatggcaagtgttgcaggcaactgaaataagaccttgaatagcctctggggcatttgtttcattcctttcccctcccctgagtgaccagcttgatgaccatttcaaagtagtttcttgtgcaacacctcatttaaccctcatttaccaacttaaaaaagggctactatagtccccacttcacagatgagacaagtgaggctcagaaaggttagatggtgcttaaagtcacacagagagggagtggggtagcaaaatttgattttggggctctctcctaagactacagacccttaacttggctgctgactactcctaccagcccctcagctgccctgccacagctgtcgccaccgtggcccacacctctgccctggttaaatctggatttgggaaaagttcccactaaggactgtgtaatgctttgcagccaatcaagaaggggaggacagggggttaccaagcccatctgtgctccataaatgatcctgggatagaaggtccactgggggtgggggtggggggacccagccttgctcaggtcctgggtctttactcagctctgagaagcagttggcctaagcctggctgagtgggatctccccactcccctgcccaccttgatccacagaagtcgggcataacttatcagctctgccgtgttcactgctgaggggatttccatgaccccctgtggaagtacgtgggcaaagcctccccaaaccacaacacagctaaccatgcctctgagctggcagggtgggaggtaagccactggcttggagcctttaaacatggtggagaggcctgtgaggtcagccctgtttgtgcttggccctggcacacggtgaggatgctccatctttggagttcagcaaagctggtcctcatccagcctctggagccttaggtgcccagatgacctctatgagcccggggtttcctttcccattaacggatcacattcatcaccctcctccagactgagatacaggctggatgggggaaatgtcagcattgctctgcccatgagtgacctctgaagcttccccacttggctgggatcctggcccctgactcacctccagccttgactctgtgtggctgaacaagggcagccctagtggtagtggagtagtggggaggagtgcctcagagggggcctgagtcaggagcttctcagagtgtatgatgtcagcggagggtggtggggtggaggtccccctccttctttccttccttccttccttccttccccagtcctttgttccaaaccaggcatggatggagccagaggtccactgacctgttccactctgagcatttcagccccaaaatgtcactggccatggagcagatgagagcacattctctactattacagagctgggttgagaattatgctcataattttacccataaaagagagagagggagagataactatgctgtgctccagaaagtgatttaatctcttgagcccataacttcctcaaccaaaaatatggaccatcttgcgctctggacattgagtgatgatgtaccaggcctgctcagtcagagtgaaaacctgagtcctgccctgcagccccctcacacatgcagactctgggggatcaagacatgagggccaccttgactttctgagccaacatttcttctcctggacacttgcccacctgcaagctttctgactctgctccctatcttgcctgctatgccaggacctatgcctggcccccaacgacactcctccccgcccccaccacacacacccacacagcaagggctctgcagtaaatcagcctgttgagctggctggagtgagctaccctgtgctctcactcccagggttctaccccagaccagcttccctatctgccctcttgtgtacagagagctctaatccccccaccaactcccccacagaatgaaaagtgtatcaaaggcccagcttccccactgggcttcttttgctttgagcccaaagccaggcatccaacaatccaagcaaaatcacacttcctgggcatgttctataggtccaggacctttctgacatcaactccaacactgaggccactgatagagtccctgttgtccatcacatgtggcccaaggtacctttgcacagcctaccctttgcctgtcattttgtttaaagagcccagcctgggatgggggttgacacatgattaagcccttcattctgatctgatgcattgggccacattaatggctctgggtactttgtgcccttcgaccttagacgtcaggcttgtactgctcttctgggcagaacttcagggaagttgaaggccaaatagccacacaagatgtcccagctttatcccagaggagttctgagtagatagaggccacagttagagctgtgagttagggtacccacttgggagcctggttgagggggctagagacagggactatggggctggtgttgccctggggcagcagagctctaataccaaaggcctggagtagagaggtagcctccaagggactaaggaatgggcagaggcgaggaagtgcagagtgagtatggaccataggcatagatagattattaaaaccctcaactgaagggggcagaagaggcaggggcaagctgctaggtcagtaatgagaccttgagaagcctcaggaggcttcgtggggtgagttggagggcattattcccctttggtctaaccagcctcacctcatacccacctgccagtccagggtccatgccccttcctggcctgccttctcacagggctactgagtgacagggctgggccttaggcacgtagcctctcggcctgcctgccctgcttatggcaggtttatgatgtttttctccctcctgagtggtgtttggcttttggtttctatggcgaagcaggaatttcctaatggcctgtttcccatctgggctgggcagactcagtgatgactctgccggcagcagcagcaggaggaaagacacacccctcagagcctccattccacctaccccagagccgacggacgcctgaccccacaccccaccagaggctgtagatgcccagaggatgcgtggataggcttctagctggtcaatgtgtgaggcctggcttgcagtgctataagctgggcctctttgagctgagcttctgtaggccacgaagagggtggaagattagggaagacacagggcttctcctgcagcctctccaggaaccagactagagagggattgggcagccgatggggacagaagcatatagccctaccccaggaggatggcagctagagttgtggctcattgccacaacagtcaccattgtggtacaggggaaagcactggagtggtgttcttctacctgcagggcacagcccagagcccagcccctcttgatcctggctcccaggcatggtgggcgtggtaggagacatatctgaccatcacaatttctgccacaggcctgagggtaggagctggcccagtgcccctgatgacagcaaggctcaggcacacaggatccacatcgatcctgagatccaggtatgtacagacactgcctggcctggcctggctcagagtgagcccagggcagaggggccagcatgcaggttcacctgcactgaatgtcctcactggggctctcagatacccaagacagagactgaagcagaagttttctctggaccacatccataccccatcccatgttcctcagatgatgagcacctggtgtgggctctgtctctactccgggcaatcctggattctggaccaaggtgcctatgatgtccaggatctgggctaggccttggtttgcggctatcacacagccagctggagttcactctggtgctcagtgatgccagaccagaaagaagtcactgtgcttgcagcgggggagattggtggcagtctcaggctgtggagtgacctcaggctatgggacactcctctgagtgccctatccaagcctgaagttctctcctggccatcctgtggtgcttctagcagaacttaggctgcaggcctgtctgcccagtcacctttctgtgtgtgatagaagtcatatctctggtcctgtcctcaagaagagtgagggggtcaggctattctagggccttgttttgccatggcataaggagtagccaagtggggatgactgaggtatccagagccatctctgggccacagagtttgggcaaggagactgggatggtctgtgatggagccagaaccatgggacccagcatgtgggaccattgcctcctgggcctgcctttgtccaccctctcaacatgaaagaaaaggggccaaggcagggagaggcttcactgaaccagagggaaggatgtgccccagcttctccctcactatctaccccaatcccatcttgctctattccctaccctgcctggctggcatccctggagccagatgcttaccaccttccaggcagtgcccattctggcaggggaaaggcacttagaagttctgggctaggggaagccaggggccaaaggagcccagagtagtcacatgactcagacaaggagtcaaggagtgcttcctggaggaaggggtattgaagccaagacctgaagggctaggaatggtaaggcaggcaaaggggtatagggagaggaagtgtggcccagaggtgaggtcttgcaccacaagttcagagaaaagaaaggtccaggggaagggaggacaagatggaaggagtgagaggacagaggtgagagatgaggtggtggagcagggccacagaaaggctcttgggcttctctatcctggacctcagctgttcttacagggattcatggccacatctgtgtctcagaaacttgctctgatggccccatggaccccagaccttaggggtaggggtacatgttgccatagacaaatgagccaggtttgccacaggccaggcagaggggagcagcagggtgtgggcctcaagctcatgcatgaggcccagcctccctcagaggtagcagtgccaggatgacgtggtggggagggggttcagtcttccaggagaggctcagggccggtgggcctgggaggctggcgactgtagagcagctccccctgcccccacacttgttctcattgactcccttgaagaccaggctgccagtggctcagactggagaaggagggagtttccacaagcaccagggcagcccctcagctgctgccccacttttgtacttaaaaggtcatgggctccatgggtggtgacaaaaacacccccaccccacccctgcagggctgagtccttgctaacacagacacagggcccattgtccccatgctgctcccaccctctgcctgagtgggggtgttggggagggggtggagctagctggagccatcgaggaggaggaaaccacagttggccctaggaccagcacaaggtgccctggcacacatccccgagtgggatgggacagggccagctggaacttcaggcccaccttccctgtggggcgataggagaacctccttctctcaggcctcttgtgggaacacaggaggcacttggcctagcccagggtggaggaaggatagtaacttattactatccttctgggttagtagggttttctggaaggagtggcaattatgctcagaaccaggtgatggggagaagcaagtcaggtggagcaggcagtccttgcacactcagcctgtcctccccagaccagcagagagctagaactgagcctctaggagatggcacctgctcatctggactcagcgcctgcctccatccaagttgagtgtcccaaagcaggtagttacccccatcctgctgaaaaatccactgaggcttcaacaaccaagtgggcagcaggctggttctcagagcagaggagcatatggtacgaggtgtaccacccacagagggggaaaatacaggactgggggcccaggaattcccctgacagccattcatccaacaagtatgtgctttatgccaggcactatgcaattgtcttatttcatctccacaaggaacctgatgtggaaagcatcacattccccagctcatagataaagaaacaggttcagagaggtgaagagacttgcccagttaggggataaccctgggactcaaactaaaactgaggtagccatgtgtgtcctagccacagagttcaggcctagagaggcagctgcatgggtgaccgtgggaggggcagtggctctgatggccctgcagtggacccctgcaccctgctgggtaggggtgagtgagggcctccttcctcccagtcccagtccctccaactcctccctcccaccaaagcctctgcccggaggctgagccccacccccactggccacagcccatctggtccccattagaggtcagccctgcctgcatgcttgcccgacagacacacgtgtgagagcgctcacgtttctcaggggcttttgttgggcctgatgtggataggggttttcctgttgctgctgcattgatgggggccacctgggcagcaagaccctcctgtttgtctgttggggtgggggaaatggaggggggcccacccaactgctggtctgcctgttccccaggttcccaccctacaaaaagcagggggtactcagggcagaaccccacaggctcaactatgcctcagagcttcctaagtccaaaccagggttcttcccactacgataggcatcctttcctgtccacactgggctctctgaccacactgtagagcagaggaggtttacacgtcactcccaggctgaggctaagacctaccccatggcctggcctcagacatcatcctaaaatcaggctgctctggctactagcccagtctcagctatggaggccactatggccattcccagggtgaccagtgctggctccaagtctctgtaaccatgcgcatgtagttagttgtatgtagggagattggtaggtgcatatgtgttgtccttatgtgtgtgtgtgtgtctttaaagcataattgtgagagtgtgcatgcccctgtttacattgctgtggggtgcttgtgtgcacttgcaagctgggaactgcacagctctggactctgcagggacaaagatccccagtccccactcagacccccacacacagagatactgccctctcctcatggctgagggggcaggttcaggacactcccacccaaaatgtttcagccatgggcaccaggctggctgtggggtagtggggcagagagccttgagccctagcctggtctctgcccctcatctgctgtgcctgcagaaggctactcattgtggcctggaaagcaggaaatgggggacaggtgtaggcccagaaggggctgacctcacaatggcactcttgagcctcagcctgcccaaagggccttggacacatgacagtcaaggaccctttctgactgtaggacaggagttacgttttttgagttcccagccatgggcctacccagtacccaccacagttcaggaaggtgagaaggcttggcaccagggccacctctgccaggaggccacatactctgctgtagccacacagaccttaggcttcttgggataggcctgccccagtactgtcccttcctgagtggtggtgggcagaaccactgcagggctcacaagcccaggctgagtctcagctgcccaggtttttgtgtctgactttccaaggacgtttctcatttctgcaggggcataaccagtccccaggcccagcccttccccagaaatcccttccctggctgagcaccacaggccagagatgccgaagcagaggaagccaactgacatccaccacctggcacagcacagcagggtgggggtggggtgaacaaggaatggctggaggccagagggtctcccagtgccttaggcctctctctaataggacggcagcccaacaaccagcaggcggccctcaggcaccgggactgggccagaagatggcagaccaagcctgggatctccatatggacaaccccctcgctttccagtccctcacaatggcagcagcgaggccaccctgccagcccagatgagcaccctgcatgtgtctccaccccccaggtagcacagagatgccttcggtgccatgcccagaacccatcttaacccttgatccctcaaatctcacccagtcccactctgacccctgacacttgatccttgggtcttagctggttgcattctgactcataagccttaccagaccccaagtccacagggtgaaggctggaactgcatcccttcctcctctatttctttctccctcccagcgctgacccagccagaggcctcccgcggagccgggactgcagagtcgacctgggctccgaggtgtacaggatgctgcgggagccagccgagcccgtggccgcggagcccaagcagtcaggctccttccgctacttgcagggcatgctagaggccggcgagggcggtaagacgcctgccacctgtccccatctgccttcccactccctgcagtgcccaggttgccccctagcgaccccacgtcccgcctcgcagtcacctgccctcttcggtctctgcggcccggtcccacgcccttgctacaaccttgctacgccctggcttcccgattccctctccaccccctgtcgctgcccctcaccccacgcccgccaaacccgttccccagtctcgggtgccgatggcccgtctggcgcccaaccaaacaccccgcagaaatggagttctgacctcctcaccccgttcatgccacctacgctccgggtttcaggggattggcccgggcctggcggcccccggaacctcaagcccacggccagcaagctgggcgctccgctgagcggcctgcaggggctgcccgagtgcacgcgctgcggccacggcatcgtgtgagtaaccgcccccgctgcccctcccggaccctagccttccagggccctggatgcgggcgcagtcgtgaacccatcagtcactcgacgctgtcctgtctcgttccccccatcaggggcaccatcgtcaaggcacgggacaagctctaccatcccgagtgcttcatgtgcagtgactgcggcctgaacctcaagcagcgtggttacttctttctggacgagcggctctactgtgagagccacgccaaggcgcgcgtgaagccgcccgagggctacgacgtggtggcggtgtaccccaatgccaaggtggaactcgtctgagctgggaccctgctcccacgcctgcttcttaaggtccctgctcggccggtgtaaatatgtttcaccctgtccctctaataaagctcctctgctccaccttgaacctgtcacctggcctgccaccctcctgcgcaggccatgcatggctcccgagtacagtagtatctgcttaggtgccaggcatgtcctaggctctgggtgcagtagtgagcaggacgggtaccatgctgccctgaagggggccacagcctgggtggaaggcagacctgaatcacaacgggccagctctagtaatacgaaggtgaggtctgggatgctgcgtgcggcgcgacgacaggaggtatgacctgggtggggtcagggaaagtcttagctgagaactaagagatgagggaggcacaaactctgcacgggggaactgtgtgtgcaaaggtgagctgggggcgagaaaggcctctgtggccgtcatcggcactagcgggttgggggtggtggtggggtgctggcagcctcaggagcgatcgctcccctggagagggtgattgagtgtggagatcaccggggccgccgcgggccgtctgcacttctgttccaggtttttctggcattttctgttccaggtttcttccacccacgagcactttattctcctccgagacccccttttcttccccttcctctctcccccaccagggggcgcgcttaaatttccagacagagaccagaaggaaggtttagaaagaaaagaacacttgcccagggcagctttgccctccaagaggctccctcctgtctctaagtcaattccacccctcctcgaagtcccggcttccacccctctcctcagagtcccggcgtttacctcgtggtgtgtttgccttgggcctttcatgccccggctgcacacatcgtctgtgaattgtggctgttcactcccgaggatgtgtcctagactccgggtcgcgtggatctaccctctagtttacttgctcgggagaagaaactgactcgttttatttagtgcctatttagcgagcccagagtaacgtacatttgtgctgttttcaattttgtgctatcgcaaatcacaaaaaaactgttatcaattcacattcatcatcagcacgagacccatttccttgtgctcctgccagctcaggatattatgtttcttttttcatttttgccagtctgttaagtaaaatgtcatatgcgtttgttttaatttgcatttctctgattaccagtgatgaacattcagtttttgagcatttatggtgtgtttgctgggtgcctagcactaagggaacagagtggtcctcactctcaaaagagcagttcttgtgtaagttaccccaaacccttcatgatttttttccaaggcttatttaacttcttcttaatgattggtaggaacttttcctaattttgtacgaatctttgttactggattctggtcatctgatctatttccctgttaatgtataattactactgtgttggagtttaatagccaatctctcctccttgttggtcatttacaaacctgtcaaagctattcctctacatttccagttgtcagaagttgagactgcatgcctcaggctctggaaaagcaaacctctgaactgtgaccaggttgccctgaatctagggactcacttgggaagaactggcattagtcttttcctccagagaggactgtgatctgcacttcctgtgcatttattcagatgttgtgtctgtcttcgcttaagtttttattttcctttcttctcatagatcttctgttcatggttaaatttgtgctagagattccctcttaaggctccttttgcctcctcccttccctgaaggagcacagttcagggcaatgggcaggtgctgatagagcagtgaggcaaggtggcgtcctggtcctgctggtgaccccagatcatgtctggcccttgtctccttttgcttcccaaggggtcagactgtgtgcgttgaggccctgagggcgccccaccgtagcgctgcgcaggtgtgcacgcacacacgctccctgcagccacacccaaatagggtggggtggtggaggagtctgcccttgcctgcccaccctgcctccgctgacttggtcccagccccacccagtcataggtgggagaggagaggatgactggcacccaggaaagcagggaagcattattaagcacaggagtgggtggaaaaataccgggagccatgggccctggcccccacctctcactcccactcacccgcagaaactcgactctcccactggccaccacagatccactagccgctggtactcaccttaatcccatgacatgcaataaccccttcccccaacagaaactaccacccaagaggctccctgccaccataggctaccccgagatcaacagctccaccccttcagggttgcagcaactacagcagcccctgcctgggcatcctggttgggggtggcttggagggcagctaaggggagtggcattcagagctgacagcctgatttgtcctttccccagcttcaaggcccagcctctacccagtcccccagcccacctcgtctgcccaggggccctgagtgtagtagaccatgaaaagcttgggacagggtcctcataggacaaggtttgtatggcccagggtgccagtactgagacaggggacatcagagtctctctccaggagggggaaccagatccaggatccccaattcacagtgctccaggctccagcctacctggctagaaccaactttcactgttgtccccaaacctgctacatccctcgaaccccagggcccagttccttacctcaggggctttcagaccaaagacatggatatcatcctctacaccctcatgccagccataacatcctacccagcactgtgtctaggattttgcctcccaagcatttttagacccatttcagggcagctgaaggaatctctcattcctttgcttcaactcttccagggccctcaggatggagtccctggtcctcctcctaacatttaaagtctccctgacctcagggccctcaggatggagttcctggtcctctgcctagcgttttaaagcctctctgacctcggggccctcaggatggagtccctggtcctcccactagcatttaaagcctctctgacctcgggctgctgactactttgtctcacctcctctgctacagcagacagtccagtccagcatcctctgagctagtccaccttttcatagccctcagacctctgaagctcaaaatgcctttcttcttttgtcatggctcagcaaactcctactcactcttcaaggcccaactctactgccccctcccctagagcaaagcctcggccctgccatccccagggagagttaatagtttccatccacatgccctccatcccatcccttccagttttgcctggtgcctctggcacaacctgttatctccttggtcagaccctggctcagatttacctctgtcctgcccagcctccacccaggccaggaactgggaggtacaggggtcctggagaagcacccaccctcactcaggcacacaagcacacacacccactcacacatacactgggcttcccttcctcccactacctttcacctcacctccaagcatcctgcctgagttctcagtgggaggtaagtcttggagcaggggtcttcaatccccaggccatagaccatggcctgctagaaattgggttgcacagcaggaggtgagtggcttgcaagcgagtgaagcttcatctgtatttacagccgctcactattgcttgcattaccacctgagctccatctcctgtcagatcaacagtggcattagattctctaattctaggattctaggagtagggattctaggattctaggattccaggagtatgaaccctattgtgagctgtgcaagcaagggatctaggctgtacattccttatgagaatctaacgtctgatgatctgtcactgtctcccatcacccccagatgggaccatctagttgcaggaaaacaagctcagggcttccttcaccatacattatggtgagtcatgtaattatttcattatatattacaatgtaataataataggaataaagtgcacaataagtgtaatgtgtttgaatcatcctgaaaccatccctgccctccatccatggaaaagttgtctttcacaaaaccagtccctggtgccgaaaaggttggggactgctgtcctggagggcacctgctccctcctgcatcctcaacctcaactcactcagtcaactaaatatttattaaaaggtcatgcacagtggctcacgcctgtaatcccagcactttgggaggccaaggtgggggggatcacttgaggccaggagttcaagaccagtctggccaacatggcaaaaccccgtctctgctaaaaatacaaaaattatcccggtgtggtggcaatcacctgtagtcccagctgctcaggaggctgaggcaggagacttgcttgaacccaggacgtggaggttgcagtgagccaagatcacgccactgcactccagcgtgggtgacagagcaagactctgtctcaaaaaacaaaaatacctattaagaaccttctatatgccaggcattgtgttgcaccctaggaaaacattttgaacgaacatgtaaaataactacaggctataagcagtgctatcaaggaaataaagaaggcattacagtagagcataagggattctcttcatatatggaatctggaaaggcctcacagataaggtaacatttgggcagagaactgaggtggtaagatatcatctgtgcaggtatctggggggattacattccaggcagagggcacaggaaatcctaaggccctaggcaagcagtgactgaagtagtataagtgaggtggctggaagtagtagatgaggtcgtcagagagatgtgagggagacaaggctgtgttggcccttgtgagccattgttccatggatagcaggactatgcaaacccaaaggccgagagagctgagaagccaaagaaagaggttgacaaatccattttctcagagagaaatatataagagggacttacgaacagaagtgatgtctcgagtggctgcaagactgaatcctcacaccaaccagccttccagaaagtatcctttatatagcaagctcttagggtaaaacatgtgcagctggtcccgtcttcagactttcttgccaagactcgtgaccactggagaggttaaataagcatctttatgaagagttttctattctacaggcattgtttaaagatcttgctgatgaatatcttggcatctaggggtcaaacattggtcattacggtggttttggatcaagtggcctggaacagtggcccacacctgtaatcccagcactttgggaggccaaggcgggaggatctttcaaggccaggagtttgagactaacctgggcaacatagcgagaccccctctctagaaaaaataaaaatgaaaaaaaaaatagccagctgtggcggcatgcacctatagtccaaactactcagaaggctgaggtgggaggaccccttgagcccaggagttcgaggctgcagtgagctatgatcttgccactgcactcgagcctaggcaacagagtgagaccctgttaaaaaaaaaaaaaagcatcattcttgccacgcaacaggctgttctcctacagccatggtaaggactttgacttttactctgagatgaaaagccagaggagcggcatgacctggaattatgttttaactaggatcacattgtctgctgtatggagaataggccctaaggggcaaaggtagacgcagtaaaaccagttagcaagcatgactgcgttcatccctaactaattccaaactagcccactctccccagtccagacgccactgtctcatgctgaacagtgtaagggcctctgccttgtctccctgtctcctgcctggcccctccctcaatcctttctctacataacagctaaaggaggtttttcaagtgcaattccctgtcaatcttgcctattatagtttccatggctcctcactgctcttaggacagagtctaaattccaaatcccagctcacagggccacatgaggtacacagcccctgctggcctctgtggacaacttgtgcctctgtaactctcattgtgcttatctgtaagttcagccccatcaaactctcctcaagactcttgcaggcttccttgaccctccaaggaggttgaaacacaaatggagtcctttctggttctctgagtgacaagctttgttatttgatactttcctcctagagaaccaaagaaaggggtgaaggtaggcggagcccagatgcagcttcaagccagccctcccttcatggccaaggactcagcccctctagggggtgtgctagcttggccctgggctcacagcccttgaactgctgagttggatgggtgggagcagtgttgtgacttgcaccacaccatgatgcccagaagcctgggctgtgggccctgagtccctctgccccacctggggagtgccccacctcccctccacctctgggtgcccctgtccagctacgtgcactccagtgctatcctggacaactcattcttacccaacttcttgtcttgcaccccaggccgacccctgacttgcttttcatgtaacttcctggtttatcattttctcacagaataatctgtctttctaacaacattcccacagcacctctgaatggaggtggaacctctaaaaaggtttaagggtagtgaagaggtttctctaataagcaagcactgtcctcctgtgtcccctctaccacaagtgggaaactatttgggtccctacagaaaccaaacctcaactttgctagtgtctgacatagatccatttgtggctggaatgcagagactagaaatcccaggagagactgctagagacctcactgggtcctgcagggtctggagtcggtctcagccatgtgggctcagaaaccgcattaaccagcccttaagtgggtctgtcaggcccggtgagccaagctcagaggctgatgcaccacccccgacacccacgcgcgcgcgcgcgcacacacacacacacacacacacacacaccagcttcactgacaatggctgcagtgcaagaacactcagctgccatccagggtgttcttggtctgtaattgaattttcatgggaagctggagcacacccacagtctcagaagaagggaagggagttggataataactattatgggagctaatgtgtcccaggccttcatctccaagcccttagtgaacgatatgattgtttttaatcctcataccaaccagaaaggaagtatggttattatccccattttatggatgagctcagaaaggttaaaaaacttgccaaggtcacacacaccctagcaaatctccatggcaggggcaaccaaagtaacggcgcataccagtcttccatggagagtgttgcctgcctaccaatggtttagtgactctgaccaagccatttctgaagggtgctgatctgtttccacttggcaaggtccccagaacagcccagagtgcaggctcaaccttaccaactttttgcatggggcatggaatggtggaagctggacaaagtaaaggtgacccctgaagctttggatctgagtgtggacaaggctggtgccacagcacctgatcaccaactctgatatgcatgaacctaccaccatgcctgcttgactcactcgtctggtcatgatcccggctaaatgggtcatccccaccactcactgaccctccgtggttccaggagcctgctgagagacagcctggactggccccttcccagcccccagggctctctctccaattgctggagactgtctcaccacccagaaagagatttctgggtggaagaagtctctttctcctcagtcctgtcaccctgtgccttcccagccagtgttcctgtccactctcttgcctgcccctgaggcaccactcctcaaggccctgtcctagctcctccattcctccccagatgctcattgtctagggttgtttgtgctgtttgcgctgtctaataaccacatcccttctaaactgtccctaccctccttttgtgctcttactccagccacactggacttgttctgggaggacagtgatcagaggccacctggcccagtcaaggagccactcctccccttcaggctcagtctgaagcaggctgccctgttagggctccactctggtctgtctacttcccaggcgggtgccatctccaacagctgatttctgcttatctcagcagtacctcagctttcccatcaattctgtgagcatgcttgcaaccaggaaccctggctggctctgctgtcacaacaagggcctcaggaactctgcagttatgaccactcccaaataggtatctccagcccagacctaaatattccctacttctgaaccttaaagatggacatttctgagacccatacccaaatttcttacatctgtaaacaacctactgctgcattcttcttcttcttcttcttcttcttcttctcttcttcttcttcttcttcttcttcttcttcttcttcttcttcttcttcttcttcttcttcttcttcctcttcctcttcttcttctttcctcttcctcttcttcttctttggcttctaaatagattttaattacttagaaacaacacaatttcgtaccaaatgtttaacaagcatctttgctaaaatgtgaaatcagcattatttgcatccaatcagctacacaaaactcaccaatttttcatctgacaaaaggtagtcaaaatcccaaagaataagggaaagactactcattaaaggtcatgttcactaatctagcaccgtaattccagtcttagaacctcccaaacggctgaaaggaagatgtggaaagagataaggatgtcggaaatataagggtaatgtaacaagaaaaacccaaaattgtattaaaaaaaataccttctcccaaattgagagggagccaagagaccaaagagtgcctcagacaagtccagcttggtaagcaaatgagtttatgaggacttacacacaaggcattcctggatggcagtgggacagctttagagatctgtgccacctcccatccctaagctgcttttaagctaattttctggctctttgcttcttctgtgtgtgtgatgggactctttcccttggtaggttctcagctattctctgggatgtttgggtcctcagggtcatttgctccttggctgggtaccatggccttgggtcatcacctgatcttcagagttcaggcagcggacatacacccttgagtcacctggccggggaacctgtcatacttcaattcatcccattccccagctcttatattctttccaccaaccttgctcgagagtccctgagcaggaaacgaggggaagagctatagaggtctataatgtatagccacagtttgtggatacaggccacttccatggtatacataagagcataaaaagcagaagctatctataattatgatgcctattagcaaaacataattccagcaagtaggtaagctgtgtacctaatttaagaatgagtcaaagtaacctaattgaactatatcatggatctgagttgacaaatgatttaaagcatctgtgacatgattctctttatcagagaaataacaggtagtgcctatgaggacgtatgttgtttggtctctgtcatgttggcaatttggcctccaggtggaggcagtccccagtgagccggattgccttattgatgctgttgaagcaatcattccagttctgttgggagaaaggcagaatattccaaggcatgccattatcatttgacagggggaggtatccctatacccagtaacagggctggttgttgactgttgctgcagctgcagcccagtccaggaagacattactagctaccatgggtagcagaagccatggcctttgggcataaacacaggcgtttagtagaaaccctcataggtatatctattccttgtaacttaattattgctaacataatcatttttcccattggccctattagggcagatgccctgggcctcgagcctggcttacagtactatatagggtttccctccacaggggtgggcataaagccaattggtaaatttctggccttgcctgtgctatccacatttaacgcatctagcaggtgttggtgttgctgcatgttgataacgtcagtatctcggatctccatcagggagcacggctgggaccatttcccctcagtcagtcttcatggtgtcctccagcgctataaaatcgatctagtatgggggcattttccagctcaactttgggtccatgtagccatcgccacttggtagatccactgatgtgctcaggggcaaagtctggccatttgtttcaggatcatggatctgagtctcagaggtaaccccaagagtttgtggggcctggtttacaaaccttgccaaccattcacaggaagtgatgccatgcatggtagtgggtgacatttaaaatttgtattacagggagattcttagtccagtcctaagacaatgcatgtaaggcctgcccctgttgggttacatggtaagtggaactttcagtctatgttttgttctgatgcccagtgtttaatattatggcctgtgaattggggccttgatcattatctatcctttttggtatgccatacatgacgttaagagcagtgaggtccaggcatggtagctcacgcttgtaatcccagcactttgggaggctgaggtgggtggatcacttgaggtcaggagttcgagaccaacctggccaacatggtgaaaacccatctctcctaaaaatataaaaattagccaggcgtttttgtattacaggtgggcacctgtgatcccagctacttgagaggcggaggttgcagtgagccaagatcgcaccactgcaccccagcctgggggacagagcaagattctgtctcacacacacacacacaaaagagcagtgagacatttgatgatctccagttgagtggcacattttattgggaaggcctgtagcagccccgttgtgtccatacaagttaaggcataccttttctttctattctggggcaggggaccaatacaattgacttgccaggctcac

SEQ ID NO: 2793 - DNA, 2288 bp, Homo sapiens
ggctgcggcggcggcggctcctcctcagagtccggctcaggctccggctgcggctccagcccgcgatgccccattccgtgaccctgcgcgggccttcgccctggggcttccgcctggtgggcggccgggacttcagcgcgcccctcaccatctcacgggtccatgctggcagcaaggctgcattggctgccctgtgcccaggagacctgatccaggccatcaatggtgagagcacagagctcatgacacacctggaggcacagaaccgcatcaagggctgccacgatcacctcacactgtctgtgagcaggcctgagggtaggagctggcccagtgcccctgatgacagcaaggctcaggcacacaggatccacatcgatcctgagatccaggacggcagcccaacaaccagcaggcggccctcaggcaccgggactgggccagaagatggcagaccaagcctgggatctccatatggacaaccccctcgctttccagtccctcacaatggcagcagcgaggccaccctgccagcccagatgagcaccctgcatgtgtctccaccccccagcgctgacccagccagaggcctcccgcggagccgggactgcagagtcgacctgggctccgaggtgtacaggatgctgcgggagccagccgagcccgtggccgcggagcccaagcagtcaggctccttccgctacttgcagggcatgctagaggccggcgagggcggggattggcccgggcctggcggcccccggaacctcaagcccacggccagcaagctgggcgctccgctgagcggcctgcaggggctgcccgagtgcacgcgctgcggccacggcatcgtgggcaccatcgtcaaggcacgggacaagctctaccatcccgagtgcttcatgtgcagtgactgcggcctgaacctcaagcagcgtggttacttctttctggacgagcggctctactgtgagagccacgccaaggcgcgcgtgaagccgcccgagggctacgacgtggtggcggtgtaccccaatgccaaggtggaactcgtctgagctgggaccctgctcccacgcctgcttcttaaggtccctgctcggccggtgtaaatatgtttcaccctgtccctctaataaagctcctctgctccaccttgaacctgtcacctggcctgccaccctcctgcgcaggccatgcatggctcccgagtacagtagtatctgcttaggtgccaggcatgtcctaggctctgggtgcagtagtgagcaggacgggtaccatgctgccctgaagggggccacagcctgggtggaaggcagacctgaatcacaacgggccagctctagtaatacgaaggtgaggtctgggatgctgcgtgcggcgcgacgacaggaggtatgacctgggtggggtcagggaaagtcttagctgagaactaagagatgagggaggcacaaactctgcacgggggaactgtgtgtgcaaaggtgagctgggggcgagaaaggcctctgtggccgtcatcggcactagcgggttgggggtggtggtggggtgctggcagcctcaggagcgatcgctcccctggagagggtgattgagtgtggagatcaccggggccgccgcgggccgtctgcacttctgttccaggtttttctggcattttctgttccaggtttcttccacccacgagcactttattctcctccgagacccccttttcttccccttcctctctcccccaccagggggcgcgcttaaatttccagacagagaccagaaggaaggtttagaaagaaaagaacacttgcccagggcagctttgccctccaagaggctccctcctgtctctaagtcaattccacccctcctcgaagtcccggcttccacccctctcctcagagtcccggcgtttacctcgtggtgtgtttgccttgggcctttcatgccccggctgcacacatcgtctgtgaattgtggctgttcactcccgaggatgtgtcctagactccgggtcgcgtggatctaccctctagtttacttgctcgggagaagaaactgactcgttttatttagtgcctatttagcgagcccagagtaacgtacatttgtgctgttttcaattttgtgctatcgcaaatcacaaaaaaactgttatcaattcacattcatcatcagcacgagacccatttccttgtgctcctgccagctcaggatattatgtttcttttttcatttttgccagtctgttaagtaaaatgtcatatgcgtttgttttaatttgc

SEQ ID NO: 2794 - protein, 324 aa, Homo sapiens
MPHSVTLRGPSPWGFRLVGGRDFSAPLTISRVHAGSKAAALCPGDLIQAINGESTELMTHLEAQNRIKGCHDHLTLSVSRPEGRSWPSAPDDSKAQAHRIHIDPEIQDGSPTTSRRPSGTGTGPEDGRPSLGSPYGQPPRFPVPHNGSSEATLPAQMSTLHVSPPPSADPRLPRSRDCRVDLGSEVYRMLREPAEPVAAEPKQSGSFRYLQGMLEAGEGGDWPGPGGPRNLKPTASKLGAPLSGLQGLPECTRCGHGIVGTIVKARDKLYHPECFMCSDCQLKQRGYFFLDERLYCESHAKARVKPPEGYDVVAVYPNAKVELV

SEQ ID NO: 2795 - DNA, 2170 bp, Homo sapiens
ggctgcggcggcggcggctcctcctcagagtccggctcaggctccggctgcggctccagcccgcgatgccccattccgtgaccctgcgcgggccttcgccctggggcttccgcctggtgggcggccgggacttcagcgcgcccctcaccatctcacgggtccatgctggcagcaaggctgcattggctgccctgtgcccaggagacctgatccaggccatcaatggtgagagcacagagctcatgacacacctggaggcacagaaccgcatcaagggctgccacgatcacctcacactgtctgtgagcaggcctgagggtaggagctggcccagtgcccctgatgacagcaaggctcaggcacacaggatccacatcgatcctgagatccaggacggcagcccaacaaccagcaggcggccctcaggcaccgggactgggccagaagatggcagaccaagcctgggatctccatatggacaaccccctcgctttccagtccctcacaatggcagcagcgaggccaccctgccagcccagatgagcaccctgcatgtgtctccaccccccagcgctgacccagccagaggcctcccgcggagccgggactgcagagtcgacctgggctccgaggtgtacaggatgctgcgggagccagccgagcccgtggccgcggagcccaagcagtcaggctccttccgctacttgcagggcatgctagaggccggcgagggcggggcaccatcgtcaaggcacgggacaagctctaccatcccgagtgcttcatgtgcagtgactgcggcctgaacctcaagcagcgtggttacttctttctggacgagcggctctactgtgagagccacgccaaggcgcgcgtgaagccgcccgagggctacgacgtggtggcggtgtaccccaatgccaaggtggaactcgtctgagctgggaccctgctcccacgcctgcttcttaaggtccctgctcggccggtgtaaatatgtttcaccctgtccctctaataaagctcctctgctccaccttgaacctgtcacctggcctgccaccctcctgcgcaggccatgcatggctcccgagtacagtagtatctgcttaggtgccaggcatgtcctaggctctgggtgcagtagtgagcaggacgggtaccatgctgccctgaagggggccacagcctgggtggaaggcagacctgaatcacaacgggccagctctagtaatacgaaggtgaggtctgggatgctgcgtgcggcgcgacgacaggaggtatgacctgggtggggtcagggaaagtcttagctgagaactaagagatgagggaggcacaaactctgcacgggggaactgtgtgtgcaaaggtgagctgggggcgagaaaggcctctgtggccgtcatcggcactagcgggttgggggtggtggtggggtgctggcagcctcaggagcgatcgctcccctggagagggtgattgagtgtggagatcaccggggccgccgcgggccgtctgcacttctgttccaggtttttctggcattttctgttccaggtttcttccacccacgagcactttattctcctccgagacccccttttcttccccttcctctctcccccaccagggggcgcgcttaaatttccagacagagaccagaaggaaggtttagaaagaaaagaacacttgcccagggcagctttgccctccaagaggctccctcctgtctctaagtcaattccacccctcctcgaagtcccggcttccacccctctcctcagagtcccggcgtttacctcgtggtgtgtttgccttgggcctttcatgccccggctgcacacatcgtctgtgaattgtggctgttcactcccgaggatgtgtcctagactccgggtcgcgtggatctaccctctagtttacttgctcgggagaagaaactgactcgttttatttagtgcctatttagcgagcccagagtaacgtacatttgtgctgttttcaattttgtgctatcgcaaatcacaaaaaaactgttatcaattcacattcatcatcagcacgagacccatttccttgtgctcctgccagctcaggatattatgtttcttttttcatttttgccagtctgttaagtaaaatgtcatatgcgtttgttttaatttgc

SEQ ID NO: 2796 - protein, 242 aa, Homo sapiens
MPHSVTLRGPSPWGFRLVGGRDFSAPLTISRVHAGSKAAALCPGDLIQAINGESTELMTHLEAQNRIKGCHDHLTLSVSRPEGRSWPSAPDDSKAQAHRIHIDPEIQDGSPTTSRRPSGTGTGPEDGRPSLGSPYGQPPRFPVPHNGSSEATLPAQMSTLHVSPPPSADPRLPRSRDCRVDLGSEVYRMLREPAEPVAAEPKQSGSFRYLQGMLEAGEGGAPSSRHGTSSTIPSASCAVTAA

SEQ ID NO: 2797 - DNA, 54305 bp, Mus musculus
  misc_feature (1)...(54305): n = A, C, G or T/U
atttaacctgagaggatatttcaaatcaaaattttgtaatttattaaagaccacttaaactaccacagtattcaatgccagggtctccttgaaaaaaaaaatgtgataaagttgggttgtgagctgatctctagttttgacacagggtctcactgtgtagacaaacctggcccaaactcccagagatccacttgcctgtctcctgagtactggacttaaagctctgggcctatcttagtggtagatcctttgcctggctttctgtggccctgagtctgctgagaacctctatgcattccctaccctcagcattccaccacacagattccagagtaacaaatccactcatagacgtgcaacaatgtcttttattaggcacagaattttaaatgatctcttcaatttctccatatacaggcaaaactacgtgtgccatttatcttactggagcttgccaactatctagagaaggacactttatccccaacctgctttaaccaggaggccagttcatctgccgacccccaaggacatggaggtgaatgtgatagacagactgtcccccgtctgcaccttcattcaccaccatccggtacccgcgcttcaggcccagatctgcagcacatttcttgccaacaatcattaaatgtcctagaagctgcaaaagaaaaaaaaatcataaacacagaaaatgtacactgctgaccactaaataacaagcaatcaagctgggggcggtggagcatgcctttaatcccaacactcaggagatggagacaggccagtctccattgagttccaggccagcctggtccacataggaaattccaggacagccagggatacatagagaaaacaaacaaacaaaaagtataatgttagaaatttacttacactttcatcatcatcatctgctacagaaatctgggatatatgcttcttgggtatcaccagaaagtgtgttggtgcttgaggggaaatgtcatgaaaagcaagacactagggaaaaaaaacaaaacaatagaagctttagtatatcacctgctaggctaaaacactctctgtcaagcagtttgaatgggaggcaccaaacagtcgctaaggaaacagatgtgtacataatgtacatggcctcacaatcctttgcacgtaacttagtcttaggatggagcctaagcagagatgtgattcttagtggtcacacacattatgaaagggtgagaggggcaatcatcacagaggagtatggtttggactgggtgattaaggacagccattctgagacagtgacactgcatctgtgccttaatagttctcacaggcctgtacacttgaatgcttagtcatcaagcatgctcacgatagctctttctctccccccacacccccatgcttctcaccataggaatggactacacctctaaaactgtaagcaagttctcaaaggttttcttttagctgggtggtagcagtggtggtacacaccttttagccccagcacttcggaagcagaggcagtgaatctcttgtgagctggatgccagcctaatatagtgtgtgttctaggacaagccaggactacacagatcctttcttgaaaaaaatcaaaagaattgggcagtggtggcgcatgcctttagtcccagcacttagaaggcagaggcaggcagaggccagcctggtctgcaaagtaagttttaagacataagacagccagggctacatggagaaaccctgtcttgaaaaaaaaaaaaaaaaaaaaagaaagttttcttttgtaagagttcccttaatgtctcttcacagcaacaaagcagttactgaaacaatggatgaggaaaatttagtcccatcagccttaacaggctgatctcattcaagtcctctggctcaaaccacactgtccatagatagtccccgtgcaataattctcttgtattctctctccccctctctcatttttttaaaaagttaattatttttcttcttttttcaaggcagggtttctctgtgtagccctgtctgtcctgaaactcactctgaagaccaggctggcctccaactcagagactgtcctatctctgcctgagtgctagatgtgccaccaccacccagctctttattctgtaagattatttctttttctgcctgcatgtatggatgtgcaccatattcacactgagtgtctgcccatggaggccagaagaggaagctggattccctgaactgcagacgacagtcagtccagagcaaccagatgtgggtactaggaatcaaacacgggtcttaaccactgagtcatctctccagcccctctgttaaccccaactgttgtttaatttaaacactatatattcctcaacttgaaaaaatctaattcttcctgtgttaataatttctctcactttttgtgtacgtgcatgtgtgtgatccacacacatgaatgtatggatgagcaacctatgcatggaaacatcttgtattgctgtggaccttattgccttaagttctcattgaactaaatgtttgcctaggctgactagccagctgccagcaggctccactactttgtcaccaaactgctagagtcacaggcacatgcagctaagcccagcttaaacatgggtgctgggatttgaactcaggtcctcaagctttcagaataagtactcttagccactgaaccatctcctctgcctccatctttataattttggaaacaaacctgattcccttcccctcccaccttttccagatcgaagtcctgattgcaacttcctgttttgttctgttttcctgtgcaggtaccgccttgtatgggtgttttatatctcatgctctcttcctaacaggacccagccatacttacctgtctagggagtaattttacttggtatactctataaaatgctgtgtcatttagaatgtctcagccagtaatactcaagttcaatcattatttcaaagaccatttatcaaaacaactgcaaacaatggttctcttttgtttgttttgttttttaatgtggggtctccatataggccaggttggacttaaactgattctcttccctccaccttccaagtgcaagaaccacaggatgctggttttgtgtttaaagctttttctttctttctttgcaagtgttctgttttgctttgtttttgagttagggtcttattccataatacaggctggccagtcttatggatggtgggactgggattacagaacacactaaaagacttgcaaactttgtaaatgaaatgggcctttttctaagactagtgacaaatacaggcaatttaaataaaactcacctcaagaacccaatgaaatttggagtactatttcaagtctatgtgaacattaccagtagcattaatgctttctcatattgcatgtttcttaaagtgaactgaacaaacccgtataaaaccttttggtcaatgggccaagctcccaccctgctttatgtgagactgaaagccataaacagaactgtctagggaataatttacaaaattggtcttcactatcgactgagatttcatctatcaaggaggggaaaaaatacaactttggatcttgcaccataaatgttttctccgatcagcagggtgtgggctgcctgcaatccttagcatatgggtggtggaggcgggggatcaagggttcaaggtccgccccagttagttagtcagcaagttcatggcctgcctagagtagtgaagccgatctattaaaataaaacaaacaaaacaccctaaagcagtatttttttaaaaagcttgaagggctaattccagtccccagaggcaacgtctgcagccggagcaggggacagggagcataaggatctcgaatccccggtcacctcgcagtgcggggaccgctgcgcgcgggagatcgcggagattgcgccgggggcaggatccggtttcccgaaggccagattgacacccgcgtggtgggtggcggccgcgggccccggtgggcgtcaccccacgggtctgcactttacagggggcccgggcgggcgtcacctcccggggcctccgcccgcatcacctcaccagggccgcgacacgcggcgggccgagcggccgataacgcgtaacccgagcgcaggcacgcgccgcagggccacgcgggcgcagggccaggccagccgggccgcgcgtcgcctcaggcccgcggctcctcagggaacgccggcgtgtcgccgggcaagcggcaagcctacccggtcgtcctcgaagatgatcttggcggggatttctttgcggatgatcttgccgaagatcgtgtcgccgccgggctgggccacttgagccttggcaatctcgtcagccatcgcggccgctcactgtccttcccgcgccgcggccacagtggggagaggaaccgcgggagcgcgcggagactgccggctcgcgcccggtgggcctgcgcgtgcgcactggcgccggcgtgcggcgagcgagggaacgaaatgggcggaggaaacgccctttctttgcctctgcacctatataggaaattttgatttgccagttctgggaggaggctcggcttggtacagtgctttccaagcgcgtacggagttctaggtttgatcccttcctctcacgagcccggcttggtgctgcacgcctgnnnnnnnnnnnnnnnnnnnnagccgggcttggtgctgcacgcctgtaatcccagagtttgagaaatggagacaggaggatggaagagtttagttcatcctttctcccacattgtttgaggccagcctgggctacccgagaccctgctccagaacagtctggtttctatttcaagttgttctgatcacatttactgggtgtgataccttagccttcccttttttaaattttttttaaaaagatttttattttatatgtagatgagtattttgcaagcatgtgtaagagtgaatcacatctaatgctttggatcccctggaactggagttacagttgtgaaccatgtgggtggagggaactgaagcctggtcctctctgcaagaggaacaagtgctcttgaccgtgatcgtttaaaccctcagctgtttgaggccttagctaagagccagatgaagtcttacatcaggtggggtttttttgtttgtttgtttgtttctttgtttcttgctgtgtgtggcagcaattctcagtcataactacacactaaaaaccacttgggagctctttaaacatctctggccacactctgcatcaattaagtccaagactgtagagatgagaccttaggtggcagtcgtttgtaagcctctagggccattttccccggcaggaatcagcttcaggtaagatgctccacctggaagaaacaaaaagtcttccttggccccacctccacccttcctcctctctatccctttgctcctcctaaaaagtgttttctacatatggtgtgcactttgtcatcattggtcctttgggtcatttcctccttgtcgggattaggcaggacctccaatcagcgttctctagacaatcgcagttgtcatatagatctgttggcctggttgctacagttgttacccttgtcttctttcaacatctcacacccttgccctctggatgttggtttttttttttttttttcctgcacgctaagcctccatttccatacctcattagattttgttcctggccctcttatctgacaatctccaagtggccataggaagaaaccttggggacttagagagatggttcagcgatcaagaacacaaactgttctcacagaggccagcacaaacatcacaactgcctgtaactccagctccagggaagtcagatgcctttggcctagcaggatgtcttcagtcacccatggacatgtgagcacacaggtctcacacacacacacacatgtatacacataattaaaaaaaaataaaatgggaaaacttaagccagatgatagtagtgcatgactttaatgtcagcactctagggcagaggcggacagatctctgagttcaaggccagcctagtctaaagagcaagttccaggaaatcctgtctcataaataaataaataaataaataaataaataaataaatggaaaagctatttcctttgaattgccctatatgatgatatttgactactttgtctcaacaaaattattattaccattattgagacagtgtctcatatagcccaggctggcctccaacttgctatgtagccaaggatgaccttaagctcctgtcttgacaaaattattgatagtggttgttggcagtcttggtgtcctattctttgctatcagagccattactggtactttgcaatcactggtaaataatgtctaaacataagacattagattaggagtcatgttcgtttatttccgtaactaccgaaaaggtcatgaatatcagttggcctggcttatggttagttatggttagttagttatggttagttaggtttctagtacattctagatgatgcttatggtcctcttagttaggtttctagtacattctagatgatgcttttggccctggtgctgtggctttgaggaacagtgatataatgtagggaaaaccgcttatgtacttagaggcaaaagaataagaatattacatctgcaacttactcttttgacaacgttatttatttatttagtttttttcaaggtgtgtctgtctgtctgtgtgtgtgtgtgtgtgtgtgtgtgtgtgtgtgtagccatggctgtcctggaactcaccccacagaccagtctggccccaaactcagagatctgactgcctctgcctcctggattaaaggcacacaccaccaccgccacatgccccattcttttatctttagatcgttatgaactcttttccctcatagacattcattagacaggaaataggttattgtaaattaccaaactttgctatgggacgctataaatttttatatttcactgacagagatgactaactggatatccagttagtacaacctacgttccaacagtaggggcagggtggtgtataggtaagtgggtttgcttttgtggtgctgaggatcaatcctcatgtttatgtagcatgtactttgcacttaaagctgagcctcaggtatgtttatcttttggagacaggatctcatcttgtagcgggcagaacctgaatttgctatttagctgaggatgaccttgaactcttgtctctgcacacagccaaaaggatgtttgtaaagtgtaaaccatggtgtcagtctcctgttggtactatttcagagcatgctatcccaaaatgatacccaaagtcctttccttgaccgataggaacctgcgtgactgtgtcctgtctgtttctcctccttcatttacttccatttcaagcttactgactggcttcacgcaaaccggatgtaatgagtagactgtgcccatgtccccatccctgggtcctgtgaacatgttattaggtaaagagcattttagaggtgtgattaaatcaaggatcctgaagtaggtaggcgcctggggtatctgggtgaacccagtgtaacaacagggccctagagaggagaggagggaggtgatgaggcagcaaagggacaagattctggtttggatgacggttgggtggcattctggaagtcctaagtgtgatttgtttccaccaagggaaaactggtcacagcagagctgcattctccctggaggctctagagggcagtccactcccttgtcttttccagcttccaagatcatgtgcttcccttcggtttttggggggtcttttttattcatctccaaaaccagcagaggagtatctttttacatctccctcttttccttcttccactttcaatgtgactcattaggctcaccagaccgtacatgaaacgtctcccatctcagaatatttaattcacttgccaaattcctgcaaggcaaggcaatgagaagttctgggcacctgagtgcacacatcttttggagggcatactcctgcctgccacatagctccaggaacttacatgatgaacagttggaatttccactgagttctggcgtttcttcagttcagttcccaccaccggatcagtaaagagtgtgagctgtctcgtttcccttcatctctggaacagctgaagaaactatcatgttggcttaagactcacttctgatctcatttgggcactgtagaactatgttttaaaattttatctattatatgtatacaattgcatgacattatgggcaccacaggcatgtaggagccaacggaggccagaagagagtactggatctcccaaaactggagttacagcctgttgtgagctgctgtgaaggtgctaggaatccaactccagtcccctgctgatcagtaagtgctgttaagcactgaaccatctcttcagccacaggatccatatttttaaataacatagaagggttttcattaactttctaatcagaagttattattacaaattacttttttttttttaagaaattgatctatagtactacagaagccaccacagtataagatcatctaattgattattgttttggatgaaagacaatagccactacacttgatttcattggttctattaaaagcacttctgcagccgagcagtggtggcgcacgcctttaatcccagcactggggaggcagaggcaggcagatttttgagttggaggccagcctggtctacagagtgagctccaggacagccagggctacacagagaaaccttgtcctgaaataaataaataaataaataaataaataaataaataaataaataaataaataaaacctcaataagaaatttttagtgagattttatttttatgagtgtatgagtgtttacctggatgtgtatgtataccgtgtccttggaggccagaaggtgtcagatcccctgggactggagttcaggcagttgttagctgccatatgggtgttgggaaataatctcaggtcctctggaaagaacagcagtgttcttaggctttgggccagctctccagccatcaataacaatttttaaaagttgacaattatctttgtgttcttatataagactccctaggcatggtatttcacatttgtaatcccagccttggggaggtagagatgggaagatctctgagaccaggacagccagtctagcctaaccagtgagttctgggccaattctaggttttgaacaaggtagaaagcattcctgaggacgagtacaggtttggtggtgacaacttttattccagcactccagaggcagcagatctcaaagtttgaggccagcctgatctatataacaagttccacaccagacagggttactgtgacaccctgtctcaaaagcagaatttttttttcctttttgttttttgattgacacagagtctcatatagtctagaccagggctgtccttgaattcttgatgctcctgactttaccttccaaatactgggttttcaagtatatcccaccacactcagcttaatcaaagattaagaatctttgattcttaataaacagtcagttttacctaaaagtagcctaaaatgttacaggaatgttgaacgcaaatgattgcggaacaggagcaaggtggaaatttttatccatgcctgcaagtactaagttaaaatgtatataaatgttttatggttattactatgaagcttctaataaattatttcctacctcagcaaaaccaaagaacggggcaagataagtagggcaataatgcagaaggtgaggaggctctgggatcaagggtgtgaacttgagcaggcaactcaaccgcacctttggggggaataattaagagaatgtacaaacagaacgttctggagtcagcgttctgatatgtatgggctgtggttgttaggacttagcttttgtttgcttacgttcccaaggagacagtcacagcccggaaaccttataatatagacacttaagagacgcccacgcccttaaacaagagataaaaaacgagcaggttccgaggccacccagtaacaaacagtgtgcgcgagcgtcacgctaggcgcggcggagtgaagtctgcccctaacaaacatggcttctcagctacttccgtcctcctgtccgtaatttggcaccgcggcttctcgcgtttttatacttagctctgcttagcaaacgcctgaacttcctcctgcggggaaggcgggctaggaaggacatgttgcattctgattggttgctatgcggagcgtcgccagctgtgccccggccctgattggttgccaagagggggcgccctcagaggcggagtcagcggcgtggggagccatgggtcagcccgccaaggtgacagggccgggaggagggtgcagggatgctgaggctcaagaccccggcaagggagggaggcgaccccgaggggggctgagagtgtaagagggtgacaaccttcaggggcaatgagtggtagagggtgaaaattttgagggcagtgaggagagacgaccctatggaccgtgaatggaggaggttgatagccatgtggaagagtgaatgatgagggagacaacctggaggggctgcagtggagaagggggggacagtgagtgaggagggagtggatctcgaggggcgcggagcggaggagggtgacagccacacgagacaatgaatgaggaggatggctgatccatgaaaggtagtgaatagaggagactgatgaccataaaccgaccacctatgccttaataaagaagttccatagtaggaagactataaacaactaataaaatcgtaagaagtgcttcaaattaataaacagcatgttttgtgaacctataaataggatttaacttacctagaggaatacagaaatctctagtgggcgagaggcagcattgctgagcctacctgttgatggcaagcccaggcaacatagatcttgtctcgaaatttaagaatcacggggacttataggcagacacctgaagtttgattaagaattaggaggggctggcctcagacttgtagctcacaccggcggccaattctcagcaatcttcatgctaagtgctgggaatctgactcccgagccactacgcccagctactttttgcgtttgaaaagaagtttcttagtagggctgaggttgtatttaacttttaagttggagcccttagcattttcaaggcattggcttccatgcccaacagtgcataaataataagtaaaaagatatgattagctacaatgtaatgccggttctagtagatttgtggtaatgaagatcacattttcttttaaaataactttttcaactattttatttgcaaggcatgtatgtctgtgcaccatgtgcatgtctggtactcacagaggccagaagagggtgtcagattccttggaaccgaagttacaggaggttgtcagctgcagtatggctgatgggaagagcctggttcctttgtgagagcagccagtgctttaacctcagagccatctctccagcccccattttctttttattaggataatggtcttaagctagtggtgctgtttttatattaatggacacccccactccccaggaagtactatataaaattactccgattactatcctttagtgttccacactgcagacttcctatggtcttaaactttgggatcaagtgatcctcccttctccactttctaagatgcagggacatctagacacctagtctcgtgtgtgtgtgtgtgtgtgtgtgtgtgtgcgcgcgcgtgtgcgtgtgcgcgcgcgtgtgctagtgtgcttctgcctgcctgcctatctgtctcttttttgtttgtcttttttttttttttttttttttttcgagacagggtttctctgtatagccctggctgtcctggaactcactttgtagaccaggctggcctcaaactcagaaatctgcctgcctctgcctcccgagtgctgggcctatatgtctctttacctcttgcttaatttatattttattgtgtagtgctgagaaatgaactcaggacccactacatttcaagcacagtctatgtggtgccttttaaaattcatattcctgggctggagagatggctcagcggttaaaagcactggctactcttccagaggtcctgagttcaagtcccagcaaccacatggtggctcacaaccattgtaatgggatctgatgccctcttctggtgtgtctgaagacagctacagtgtacttatataaataaataaataaataaatctttttttaatccatatttctatcaacagtctctgccaggcaatgggctcttattgctgagcactttagaaaaaaactcctttctctacacatcactcaattccaaagccacccccacatgtttaggttgttattgttccccattcccccataccaagtctgttagtttcccgtgattggctaagcatccaaaaaaggaaaaaaaatggaaatctgaaatcttattttttccatttccatgtgtgtactaatgtgtgcccatatgcatgtgtatgacggcttctgctgttctcttacctcatgtgtcgaggcagggtgactcaattagacccagagctctccactgtgagcacagctagtcatctgccctgtattttcgtgggttctgaggatccaaactggtctttacccttacagaacaagcattgtaaccactgagccatcaccctagccctaaatctaaagttgattttctatctatctatctatctattgtttttaattttatgtgcattgttgttgtgcttgcattcatgcctgtgtgaggatgtcagatcccctggaactgcagttacagatagttgtgagctgctatgttggtgctgggcattgaacccaggtcctctggaagaggaacctgtgctcttaaccgctgagccatctctccagctttcagatatgcatatgtgtcttaggttccatcctgtttccctccccgccagtttcttagctattctcaccactattccttttcagtttcatgtattatcacaatgtcaggcttgtgggcactcctgtccctgtccccaccccgactcccacaaattcaggatgctgagaagtcttggcattccttccacttttcatttcagaaattgcagttaggtttctctgagctatctgaaacatcttcccgggctcttaggatagaatacattcctgattgtgagtggaggagtcaagagaagatgaaagggggtaggttgagagagagctagaaacctatgcagactggccgagtccaccaccttcccacactaagttcttgtcaggatgatcattgaggcttttgttttgttttgagagttgttgaaacaggctctcaagaagcccaggttggccttgaactcaccacatagcagaggctgacactgagctgatccccctgcctccacctcatgagtactggattgacagatatgaaccaccacaccacttagaagattcgtattttattttattttatttttttgactgtttcatagaacagttttttaatgagttgctagatggagcccagggccttacctgagctaggttgtacctccaactgctgcccccccccttttaattatatgtctgtgtgcatgtgtacgtgggcatgtgtgtgcaagtgcagatgcctgcagaggccagaaccacttgatgtgggtgctgggatccaaggaacagagctgacgcccaccggagaacagtgcatgctgctaacgactgatccagctacagtgcatgctcctaaccactgatccagctccccagctcctcattgcttttgttggtttgaatttggcgtgggggagaggttttggcgtgggggagaggttgggggatggggatgggtgttggtgtttgtcttttgagacagagtttctctctagcagccagaccctgttttgttctctaactcaaagagaaataacactagaacattactttgcaagccccttgctgtggggagcgggtgtggcggcagtcccaaaggcgccagggactgcagctaagtcatatgacttgcacctgacttcctcatataagacacaaacatcttgagtgctgcgcaggtgtaccaggatacaggtgaatccaatttgatggagatatgcccctgctgccctgattagctgaagctgcatgcctggtgaggtggcgtggcctgctgtgcgtggatgggaactgagagtataaaagagtgagaggcccagggttcggcggagatatataaacaagggagatatataaacaggggagatataaacaggggagatataaaaacaagggagatataaaaacaagggagatataaaaacaagggagatataaacaagggagatataaacaagggagatatatggagaaagaagaaacaggactgaataaatgtgtgcagaaggatcctgtagcagcgtcgttcttgctggcgagttgggggcgcgctcgagagttggtgccgaaacccgggacaagaaacatcttcaggcacaagcgaagaccccctgctacagggaggattcagaactgcaacacggggaagaagtggttaataaaggttcccgtaaaacagactgttgagaaggatccggcgtggattcagaactcttcagctgggaacggtactgatgaagagaaagaagaaagatgaagactgaataaactgctgttagaaggactggtggtcgcgtcgttcttgctggtcgagagcaggcgcgacaattggtggcccgtacggggaaccgactcccccaccgagttcagaactttcagcagtcagtggttgccggcagggtaagttcacagtgagtgaaacttgcgaccccaggagtttgggaaggacctcggataaaatagaggcgagcataaagttgccaggaagcaggcacataacgaaaggttcccggctttgggacaagttaaggttcctggtttggggacaagttaaggaactatgataacctcagtgtagtgatcaatagatcctcgctgtgtagttatgcttttttctcccattgaccctttgtgggtaggtctgatagttttggtcttgtttgttctgatatatggactctgttactgtttgaatcgagaggcagtcaagacaggtcagaaaatccttatagagcaacaagaaaatatgtcggaagaggagaagggcttaaaaagaaaaaggaaaaagaaagacacagtgttatcaggtggacagaaaggacaaaacaaaagagccgaggcggaggaggaaggcgaattagcttctgtgcctcctccctatgcctcctcagcagtgaaaacttgactctcatattgactccccagatggacacacaggtgattgaggttatggtctcattaccacgaggtattgtgtccatcccccctggggatcgaccagatcaggtgttgatgtgggcgagagggtctgtttgtgtgtttccacaggaccagacggaacctctttgggtgctggagagattggtgagacgctgcaagaatgaggctcctgatccagttgcccctgtggatgtggtggatgatcccacaagcacaaaggatggagccaagatgagagatcctttcggtattccagaagccgataccagctcgacatgacattcaaatttttccatgctttttgatccctgaattccccttaaagagatagccccgctgactatctatcccttgcttcagggaagatgagtggggatgagagccctgggatgtatgcttgtaatagtgtgtgtgtttggcacatgtgttaggtgcagcgtgtgcaggcccgcactttagccatgatagcgtaggcttttgctgcagtggaggcgggacaatctcctcagattcggtttgccgctctaaaagaaattatgctgtgttatgccgtggggtgcgaggctaagcactgcacagaggatagcttgctgttggcatcctgtggaaggcacgtctgattgcatgaaggttcagtgtcctagttcccttcccccaggaaaaacgacacaggagctggccaagacctctctgggtgatgagcctaagagatggttttgtgtagggcccctatgcttgcacactggggatcagacctctaccttcacccatgaggcttgcttgcagcaattaagatctggccataagttaattaacatcctggccttttgatgcacctgccacaagcaaaacacaatctccccaggtgtggcttggcatgatagagaggtagtcagtgataagactccctgggcatgtcaccaacctaagacagggatcaaaccaatgctgtttgtcacccaaggacgggtaaggggcatggctgcggggggctttctacagacattctctctgccaaaaaagaaaaaagggggaattgtggggagcgggtgtggcggcagtcccaaaggcgccagggactgcagctaagtcatatgacttgcacctgacttcctcatataagacacaaacatcttgagtgctgcgcaggtgtaccaggatacaggtgaatccaatttgatggagatatgcccctgctgccctgattagctgaagctgcatgcctggtgaggtggcgtggcctgctgtgcgtggatgggaactgagagtataaaagagtgagaggcccagggttcggcggagatatataaacaagggagatatataaacaggggagatataaacaggggagatataaaaacaagggagatataaaaacaagggagatataaaaacaagggagatataaacaagggagatataaacaagggagatatatggagaaagaagaaacaggactgaataaatgtgtgcagaaggatcctgtagcagcgtcgttcttgctggcgagttgggggcgcgctcgagaccttgcttttaccaccttttcggaaaaagagttttcggaaacaaatagaagctgggtgttggtgctcaggctttcatctcagcacttgggaggcagaggcaggcagatccttgagttccaagcaggacatccagggctacatagtaaaaccatgtctcaagatataaaccatcactaccaccaccaccaaaacccacatgcaacagaaacaaatagcaaatgaatactggttaagtcttctataaatatagtgattctagatgctgtgaaaagtgtggtttttttttttcattaagtgtaaaatcttttatttttatctttttgtgtgtaatatttgtatatctatgtgtgcatgtctctgtgtgtttctctctctctctctctctctccctctctctgtgtgtgtgtgtgtgtgtgtgtgtgtgtgtgtatgtgtgttggtccttgcctcccaccctgtttgaggcaggcagggacccttgttagcctctgccaggctggctggcccttgagttcctgggactcctctgtctctctccgcttgctctcatctcaccacaggcacacgagggtcacaggtttgtgctactggctttgctttttaagtggatttcagggatttgaacgcaactccactgctcatgatcatggagctgcgtgcttgatctactgagccatctcctcagtctggaattctcctttctctcaataggttttacagctctttaaaacactgcacaggaccagacagcaagtttttaaaaatgataagagagcattggaaggtaaatatgtctttcataaagcagaccatgctgcttttggggttttttggtttgtttgttttttgttttgattttgcagagctaggaactgaactcagattgtacacatgcaaggcaagcactttaccattgagctaggcagccaacctgagccaggaaatatcccaggctggctttgaacttgcttttatggaggatgaccttgaactcctgatcctcccatctgaggtgtgagtccccacacctggggcacatccattcttagctgactgctcttctcttctgactttgtggaataacctttaccatctctccctaatggtctataaagtttcagtacacttgtggaagaacacttactatgtataaagataagttttcatatagaatcagtgaaaaagaaaggggagggtcagatttaaggctccccctaatcccacttccctgcagtagagctgggtgctgctgtgttgtttgtgcctgggtaaagtgtagcattacacttaatggataaagtactgggtaaagtgtaccattgcagctgtgagacaatccagggtggcgacatgaatcctgactcagcatctctgtgtttgaagtggtttcaggatcctctggaagtcacagccctagacctcgggctctgcattaaccttgttgatttcctcccactatgcatttccaaaccatcctaagagggccctgggcaaagcattcccagggcatcagatttcgtcatttcttttacagtggctgatttttattattttttgattgtgcatgtgctgtgcacgtgcatgcaggtgcccacagaagccagatgcacaggctcccagggagctgggatcacaggcagttgtcagtcacccgggacaggtgctgggaaccacactctggtcctctgcaggagcagtacatgtccctaactgctgagctagcccctccagctcctagttatagaaatacataattattattccaacctttacagaggagaaaactgacaaaatatgaaaaagacctcccgcatgtcattagtagccaacagtagaactgagggagaaccgcactaagcggtgtgatctcagacggcagactctctctttttttttttttttttttttgggtttttcgagacagggtttctctgtgtagctctggctgtcctggaactcactctgtagactaggctggccttgaactcagaaatccacctgcctctgcctcccgagtgctgggattaaaggcgtgcgccaccaccgcccggcagactctcttttaaaaggtttgctattactttatgtgcatgggtgtgctgcctacatgcatatttgcgcaccacttgagtgcttggtgtcctgggaagccagaagagggcgatggatctcgagctacctctgcgctgtcgctccagcctccacctcgaccagactcttacccatcttacataccaaggaagaccagcactgaaagaggcttccatagcaactgtttttttctgtcgatatggtatattttgttgctttagccaacatttgttgagtatttagtaaggacttcatatagattgttcaaacatggagaggctaattaggttagagtagattaagctacttttgtgtgaatggtatatgtgatcatgaaatttttgtttgtttgtttgttttgggtttttttaagatttatttacttattatattaagtnnnnnnnnnnnnnnnnnnnnnnnnnnnnnnnnnnnnnnnnnnnnnnnnnnnnnnnnnnnnnnnnnnnnnnnnnnnnnnnnnnnnnnnnnnnnnnnnnnnnnnnnnnnnnnnnnnnnnnnnnnnnnnnnnnnnntcaacatgtagaccaggctagcctcactctgccccgctagtatttagttcaaaggcatgcgatactactcctagcaactttgattttatcgtttacttttgtgtcagccgatgtacttgggatcaaatctacactaatccatctactatgtgtgtgcaggcataggctacatacttgtttgtgctggttcttaccgtcatcataaagcattttagtggatgcagtggcacatgcatgcaaccccagcactctcgaagctgagggttcataagttcaagaacagcccgggctttacagtgagaccctacctcaaaaccagtaaagtaaggcattactttaaatgtttagatttagagaaaacatttacctggatttggatttattagaatcaggtagttttagttctgtaagtacacaaatgaagttgaaaagaagctgggtatggtggcctttaatcctagcaggagatgactggaggatctccatgggttcaaggacagcctggtccacacaatgagtttcagaacagccagggttatgttgagagaccctgtctcaagagacagagggagagggaaagagagagtgagggagagacagagagggagagagaaggaagttgaaaacaaaaggcagagtaccagggtacaaagttacttccatagattcaccgagaaacgtggttactagtacatttcttcctgctttcttctacagaactcaccatataggcctagctggcctcaaacttgaagtcccccacctcaccctcctaagcactgtggttgcagcacgtgacaccgtgcttgtcactcatttctcatgctttgtcttgtgtgggaagtggagattcatcatgagtaaccctgaacaacatgtaagaatcctaagtgtttgttacatgtatttctctctctttctctctagcagccagagtaaagataaatgaagaattcaaaaaacataaaaacgagacatctccagagaaaataaaagaggtatagtaatggctttcaattgagatacaactgggataaacgcttgtggtagagaggggaccgttgaaatggaggcctttgtgaaagaaaactatcactttgtggtgccagcctccacagctgtgaaccacctgcacttgtgtgctgcggctcccctcctcagggttatctcctgcccccaaagataacaagggaagagaatgcagaagtggccctggtcaagtccagaggagttgaaccatggtcgagccaggacatactttctccacttgaggagagtgactaaagataaggagcaagcattcccatgatgcagcacttcagagggaaatttcggccctttcattagaagtagactttaaaaagtttttacaagtcctggctgctcccagctctcacatggcaactcatagctgtctctaactccaggtctgaggggtcagacaccctcatacagacatacatgcaagacaaaacaccaatgcatgtgaaataaaaatacatcaatgttaaattttttctatcatggcgttggtgcaaatagccatagtatgcattttggttacttgctcaaggtgaagaagctcctatgctctcaatactaaaaagtacacatgagttcttctgtgtcatgcacaacctggtgaacgcgcattgcctttatcctgcatttatttccttccttccttccttccttccttcctttctttctttctttctttctttctttctttctttctttctttctttctttctctttttaagattttatttatttattatatgtaagtacactgtagctgtcttcagatctcattatgggtggttgtgagccaccatgtggttgccggaatttgaactcaggacctccggaagaacagtcagtgctcttaaccgctgagccatctcaccagccctatcctgtgttttctgtgtctcgctttgtataaaggtagggaagcgcccttaggagaagccacacagagcagagctgggcatggtggagtgactgtgcctgtccttctagtactcgggaagtgaagctggagaatcatgagtccagtgtcagcctgggatacacactgagatactactgccttaaaaaaagaagtaagaaaatacaattaagtatccttgtgaggatacttatggtatgaaggtttgatttggtaaaggagaaaatacaaatgagagaatatctctcatatttaatagcatttatacaagtgaataaaatatcaggtaaaaatactttttgtttgtattgttttttttgaggcagggtctcactctgtagctctagctgttctagaacactatgtggacaaggctgacctcaaactcacagggattgccagcctctgcctccagagtgctgggaccaaaggtgtatgccaccacacatttaaaaacatataacagaaaagtcctaaacctgtttttgaacaaaacatgggatgactaataaaaatgaagagcgtctgaactgctgggctttctacaatgcttgatacagctgcacagcgaaaagctgccttacgagaaagggacctgtagaactgtggttttcaagaccagtgcagccttacggaagcactcttaaccttaagggttactctgtctgattgtttttgttgttgttgttgttttttgttttgttttgtttttctgtttgattttcttaacagatgatgaaactaggttctgatgtggaattattgctcagaacagctgttattcaaggaattcacacagaccatgacacactgcgtaagtaaagtgggagaaaaatgattgctgatgggatgttccaaaatagtgaacaattactgtgaaagaacctagtggggaaacccccactcaattctcgattcggtgcacacccaagaatcacgaacagacgaccatcttgatgtaaaagcatgaggtagtttaatgacggagctccgggctgacacgtatctcacacaggagacagtggtttctaccccgaggcttggaagctagggacttttatagaaaaggggtggggctggggaggaattggcgcggttttacatgattggtccatttaaacatcaacagactgtcagaagggcgggagatagggaggcactaggccagtcaggacatgtaaagacgggcctgcccgggcatgtcctggcctgttctgctatgttctcagccccaggttttaaagctcacaaacaactctttgggctatttgacataaattacatgaatcacatgtctcaagttttatttcctttcaactgtacctttgtttgtcttggttttatttgttgttattaatgtttaagggtttgttttgttttgttttttgagaaaaggtttcactatgtggcccaggctatcttagaacttacagtgtaaatcaggctggctctcctgagtgctgggattaaaggtgtgatcacacccaccatattactccttaacattgacaccagggatcgaagtcagattctcaagctttcaccgcaaatattttcctaactgagccattttgttggccccctgttttttatttttatttttaagtttatttttaggtgtttgtttgtttgtttgtttgtttgtttgttttcaagacaggttttgtgtgtgtgtgtaaccctggctgtgtgaaactttctctgtagatcaggatggccttgaactcacagagatctgcctgctttgcttaccaagtgctggaattaaaggggtacaccaccaccttccagccaaccatttttatatacccatattcattaatttttctggcaaagtttattatctacctagactcagtctattcctttactttttattctataatttgttattttagttagaagaattgcaactataggaattgaaaatgtacttaagaatctcaagactcctactggagtgttagcaaaatctcattgcagattacaacttgacgtgtgtgtgtgtgtgtgtgtgtgtgtgtgtgtgtgtatgtgtcacatgcatctacatacatacatacatacaagaggaggtcagaagatagcttttaacacgtgggtttgagaaattgaatttggggtgccaggcttggtgacatgcacctctacccatctaacaggccccttagttagcaattgtctgctgactaaggaagcgtgaacaccttcagttagtgcaggtcagagtgttctctttataaagtacctattgaagcctctgttcacttgtctctctttattgacgtaaaggaattctgtgtgttctaaatacaaaccttttgttggatgtgtgcagcctaagagccttctcccgtgtcttttccctttgaggagttccttatttgaatggaggctacttggcctatttttcttttctggtgggtacttttggatcctgttgtagaatacttaaatatcaagcaaggtcatggatggattcttccgtgctttgttccaaaaggtagcttttggttatctaccaaagttggatttgtgtgttttaagagcactcggtacaccctcctcccactgtgagatgagcttccacagcaaactagatgactgaaccgtgtaaaggctcttaactctttctctaaacaaacaagaactaaaacctgactccttcacctgtgcagctgccgtgcagaccctccgcacacaggattttgggtttctcctggtgtacaattagcatctcctccctctctccctctatgggaaggcagcatctcacattccttttgttttgttttgttttgttttgtttttatttatctttgagatagggtctctctgtgtagccctggctgtcctagaacttgctacatagatcagactggcctcgaattccaagaatctgcctgcctccctctcccagtgttggaattaaaggtgtgttatgctaacaggctgggcctaatatctcctgtgtcttgaaatcacttccagaaaacccatcagtttcctgggcaacttgtagcagatctgcaagcctcacctgattgtttaagataagtttcaagattggtctctttgttttggagctggctgcttggagtaaaatcttacagacattcttctcattctagcctagtcagggtgcgatcactgtgacttggcagctatgattagtatctcgtccagtcccagagactcctaaactaagctctcctcatggctgtagcttcgtggtcagaacttgaacagctttatagaaaggagtctttataacataatggaaggctgtagctttgtggtaaagtagaaaaacaatagcagccaatttcggagattcttcacaccacttaccagtgttggaagactgaaagttaatgtgaccaacagacagctgctttagctgtagccatggtgataaatgttttcccacagcctggaggcgtggaaacaggaatacattttggaagctgcagaagtctggacttctcaaacgagtgcttttctgatagggaacatgtctgtcagctctggcatcttctcagtctgctgtgacttccaggtcatgtggacattaagagggtctctgggtgagcaactgttgaaaagcatccttcagggaagaccacttggacacaggttcaagacacaccttagttagggactttcccagaactgtggaccttgatgaatgaagtccttttgtttcctgtggcagatgtcgcttcccctgacctgggtccaggcctgaatggaatgcccatcatggcgtccattgtgctgaaatctgctccacaacaatggcagttcattctctgagagttccacatcccacacaccactttcctttgttagttcctctgcttctgagctgctctctggtagggacagttgcaccttccagcctttgatagtaaagtatctgaattcgacaaatgttaaaatgttaaatggaacctcaagtgagtacggcaaatcgcagtggccattactaaaagatgactgactgtctttagtgcttacagttgggtcaggatgcctgcttgtggcttcgtgtttctggaagcagacttgaagtttccaatttctgagcaagattgcattgctaaggaacccaggcttgtctggtttaagtctactcttgacgccttccctggtctcctgaactcagagtaacaggaagtggactgggacagcttctgaagaccccccaaagaggctatcttccccaagatctccatctccccaggacaggaagtggctcagagtgcggtcagagggggatttgagtctcttgaaactagatttggtagtgccaaattggcaggctgaggaattattctgttattaagtcattatcttttcctgtcccggggatgaggattttctgtggcctgaccactaccacgattcccaatcccatgtttttattcttcatcccgtcctttatttctaactaaagcagcatcagtgtttaccgtgtgagccacaagtagacccattgggtagagcaggccagcccattaaccagagcctcaatatgaatcctggtgaggctctggggacaggtagtaaatgagagtgttctgtgacttgcttattgcccatgttcatgtccagagagggacatcaaggaagatataatgtgatttcccagacgctctggcatcttctataagcacctacctactgcgcgttatttccacggaagccgttgttttgcagaggaggaacggtctgggtggggcgcccctcctgctctttgttcttccttcctgctgtgcaaatgtggtggcagcagaagggagggaaggcagactgctgatcaccgggggctgcagtcagggagagaagagcctgggttctcagcagcaccaggacgtctactagctcagacctgccatgtttcaaaagggaagaaaaataagtctcccacccccctttaaaaaaaattttttttgtttgtttgttttctgaggcagggtttctctgtgtagccctggctgtcttggaactcactctgtagaccaggctggccttgaactgtagcttcttattcttttttttttttttaagatttatttatttattatatgtaagtacactgtagctgtcttcagatctcattacgggtggttgtgagccaccatgtggttgctgggatttgaactcaggacctccggaaagagcagtcagtgctcttaaccgctgagccatctcaccagcccccaactgtaacttcttttttttttttttttttaagatttatttatttatttattatatgtaaatacactgtagctgtcttcagacactctagaagagggcatcagatctcacaacgggtggttgtgagccaccatgtggttgctgggatttgaactttggaccttcggaagagcagtcgggtgctcttacccactgagccatctcaccagccccccaactgtaacttcttttgttaaaccactgtttggtggacttctggttattcaaaactaggcatagtctaaagtaatattgataggtttagtaatttattcttcagtgtaatagctcagattcttgtattttcactataaaaaccatttgtgaatccttatgctatagagtggctgtggtttgtctttcccaatagataatgaaccccttgaagccaaagaaacttttttttaaaatttttgtttatttttgagacagggctctctattatgtagctctggctgatctggatttgccttatagaccagactggccctgaactcacagagatccatctgcctcccaagcgctgagactaaaggcatacagcaccactgcccggctttgttttttgtttttttgggttttgttttgttttgttttgtttttctctgagacagagtttcattctatagctctggctgtcctggaacttgatatgtagaccaggctagcctcaaactctgaaagatctacctccctctgtctgtcttctgagcattggaaataaaggtgtgagccatcatgccctgtcccctgaatgcacattccttgaatatgaaggacagtccttaactatagtttaattatcaaaactaggggattcatggaataccattgtttaaattttttctttcctcctaataaggccctttgtttttttgtttgtttctttggtgttttgttttggttttgtttatttgttttttgagacaggatttctctgtataactctggctgttctgaaactcaccctgtagaccaggctggcctctcagagatttgcctgcctctgcctcccgagtgctaggactaaaggcacacccaccactacccagttaacaatgccctttctagtaggaggaacccctttcccctgtggtccagggtgctgctgagtttcctgagtctggagcagttacttatctttcatcactacctctaaagattgtaggcaggctctgggaagagtggttaggggggcatttgctctcttgtttgacacagaatttcatatagcccaggctggcttaaactccctgggtagctgacttctgattctcttttctctaccctgagtgccaggattagaagtatgtcccaccacagcagctgggctgagtgagcacagggccttgtgcatggaggcaggcactttactaatccaggcacatctccaaccctgcttttgttgagacaggtttaactaggcttgtctggaactcattgtatagctcaaactctgttcacagtgacggcgatcctcttgtcttatcctgcaaactgttaagattacaaatgtgagccatcacattgaggctgtgaggatggcctagctgggtcctgctcttcccaagaaaggggggtgggtgatgtatctcactgccttttttctttttaattgtttttcagtattgagtattagacccagggcctttaagacagggtctcaccacagtgcagaccagccatggccacgctatgtactgcaggctggacttgagtgcaggtctcactgcctttgcccatgattcctgggattataggcacacgtcagcagatgtgggcagttttctctttctctctttttttttccttttccatttttctgtgtgtatgggtgcatgtgcacccctgaacctaatagtgggaattgcccgccttcttttttgtttcattgaagcagggtttcttggttcggcactcagttccctgacaaggctcatcttcctaggggatctgaactcttcctgtagtaagcactttaaccgatgagtaatctctgaggccccaacgctgtcttgcctagcagtcagcagttggctgttcagcagtgtgtctcagtggggacaccactgtcactgtgtgtctcagtggagacactgctgtcactctgccatgaagtataaccctctctgccccagactgtctttcacaccacagttagcatccttggctcctgcccagtaaatttttggtagcatcccctaagtggtatatctgaagactccttcggtgaggagccattgttctaggggacagggtgtagctcagtggtagagtatacactctgcagcctgtgaggccctgggttcccaaggcccaggaacaagaaggaagggagggaaggagaagggcagttgtgggaggggaggggaatcattctataaatttggaatgtctgaattatgagagtgatgtcttgctttctataaaatttttcaagtatccaggcatggtgtggtatacctgtaaccccattgttgggaagtggaggctagagaatcaagagttcaaggttagcctcagctacatggggagttcaaggctagccagagctacatgagatcctgtctcaaaaatcattcataggtgacatttttaaagagccattgacagattagtgtgtttttagcttaattccattcagtcatttattagttgtgtttaatgaaatgataaaggatttggttgtatatgttttttgtaacacgaatgaagatcgtattaaatgtttccatttagactcacatagtcacctcagacatcagctgaaataaaatgtctgtagaatagtgcatgcttcccaaattacacaactcacggttagaactgctggggagacggatgtgccggccccaggtctactttaagataagtagtgactggagctctaaccgtcttaaccgctcatttctctgttccttttagaactggtccccaggaaagatcttctcacagaaaatgtgccgtactgtgatgcgccaacccagaagcagtaaagcttccaggataaacccatctctgctccttcccactttaaatacatacctggcaacggtcctggacatgcacatgtttctctctgaagcgcacgttgcaaatgagcgacaggctgagggctacagaggagatagacatgcctttcactgacatgggcaactgaaggcctggggaggcaggacgctcctctctttccctttggtaggtcttttggtcttccaaagctgtttgccaatgaagcaccttaccaaattggtgacttttcatctcatgggacatacatagctaaatataaaatgctacattaaattgatgtttaatccccaaaatattaagttggtaaaaaattaacatttttcttccagctctcgtctaaaagcagccattgtttcccaaagtcccgtggttatttttgcggctaacaaataattatgtagtgtatttctctgcattcttacaaagacaacgttcccctttttgttttgtatgtatgggtgttttgcctgcttaaatgtctatgcaccaggtgtgtatgcagtgccgtgcctgcagaggtcaggagagggaattggatcccctgggactggagttatagatggtcatgagtttcctagaagaacagccagtgctccaaagcactgagccatctctctagccccatgtaaagacattagatagatgaaatatcaaagtcactctgggtcactgtagtggccctctgtcagatggcttgtggtctttgtagactgctgtgaaatgctatagatctctctctctctctctccctttctccctccctcccccctccccacctctcttttgagatagggtctccctgtgcagtcctagccttgaactctaagatccacttgcctctgcctccccagtgctttacataatttgatctctagtgttccaaataaataatagtaataataacaattggattttatcaaagttaaaaacatttacataacgattagtgaacaattatagatgaaatatctgtcatatatatgatgattctataaaacatatgttaccaggtatgaaaaaagagttatcagactatataaaggacttcaaatattcgaaagcaagcaggggctgagatggctcagaggttaagaactcctgctgctaggacctgagttcagttcccagcaccctttcaggtaactcgaagctgtcactccatttccaggggatcctgtgcactctactggcctctaagggcactgcatttacatgtatagactcaaaccaacagtgacacacagatgcataataaaggaatcgtaaaacaagcaactcaactacagagaagtgatttcctgtttattggtgccttgctgctttgtgtgtcagcttactacttgcatgcctggtgcccacagagaccccataaaggttgtcggataccttagaactcctctcttacaaagggttgtgagccgccgtatgggtgctggaaattgaacctcggtcatctggaacagtgtttcttaaccactcagccatctctccagtccctcaacccaactttaaaagtaatatttgaacagatgcttcatcaaaaaagatacatggaagctgtcagggttgccagttttggaacccacaggatggaacgagagaaccaaattctgcaagttcgtgcttcatgcacacacaatcacagttttgaattttttattttttggtcttttgaaacagggtttctttgtgtagctttttctgtcctgaacctcactctgcagaccagggtgacctcaaacttacagagatctctgcctgcctctgcctcccaagtgctgggattaaaggcatgcgccaccacgacctagcttaagttttctcttttagatcttatatttatttgtatgagtgttttgccttcatgcgtttttgtgtgccacttgcatctctgttgtattacagatggttgtcagccaacatgtgggtgccagaaatgtcactaagggtcttggcaaaagcactaagtgctctcaactgctgagccatctctccagccacatttttttttttttttttttttttgagacagggtttgtctgtgcagccctggctgtcctggaactcactttgtacaccaggctggtctcgaactcagaaatccgcctgcctctgtctcctgagtgctgggattaaaggcgtgcaccaccatacctggctacaaatttttaaagatatgcaaatgacagatatagtgtgagaagttgctagtacattaacaggcactaggaattaaaatcatagtgacatagttatgtgtctattagaatggccgaaatctggatggttgacaatatcaagtattggcaaggatatgacttttctgagacagggtctcactgtgtagccttggctagtctggaacacattatatatttttttccttattttatcaaatccctaaattatccatcatcctattggctcaggacagattcaagttttattgtgatggttgtttttgcactgctgtgataaaacaggtgaagaataacttacgggtttgtgttacagcatgatttcattccaataccttaaggcgacaccttaacaaaacatggtggcagacaggaaacacttggctaactaagcctggcagggagtgggtgggcaggcataatgttaaaatgactgtttctagtgacctacttgtgccaatcaggttccacctcctaaaggttccacatgcttcaaaatagccctatgagctgggggaaataaaaacaaaaaacaaaactgtgggagacatttgagagtcaaattgtaacctgtgtgtgtgtgtgtgtgtgttcgtgcacttgggtgtgcacctgtgattgcatacatttacatgctatgacatacatggaagtcagagaataatttggggagttgattctctgggacttgaacttgggttgtggcagcaagcacctttttttctactaaacggtctcattgacctgcattatatgtgtaccttgagttggaattgtgaaggcctgaggctatagctcagtggtatgaaatttgtccagtatgtacaaggcctgaggttcaatctccaagaaaaccagatgaaacagaatgagtgaggattgataattctgtgcggagtctgtggagtatgggcggcaatgtccacacagactgtgcctgtctttgtcaggtatcccaaggatacctggagattcccatgctgctctgttaatgtaaaaaagaacgctagggatgtgggtgtggttctgttagctgaatgcttgcttagtgtgtatgaagccctgagttctatccccagcactgcctaacccaagtaattccccgaacttgggggtgggggtagcagcttgaagatcagaagttcaaggtcaatctgagcttcatagcaggattgaggctagactgatgtgtgagaccctgttcaacaaatgatgagtttattagagtattgtctagggggctggagagatggctcagcgattaagagcactggctgttctcccagaggacccaggttcaattcctgcacctacatggcagctggcaactgtaactctagttcccagtgacccgacaccctcacacagacatacatggaggcaaaacaccaatgcacataaaataaaaaataaaaatatttttaaattgtttataagatgtaatacacaatgtgatgtggttctatcttttatagtctttttaaaattcattgtgtgtgcgcacgcacgtgtgcgtgcgtgcgtgcatgtggatttgtgcatgtgagtgcagaagcctgtggaggctagaggtgtcagatctcctggaactaagagttatgtatgatcataaccagactgaattgggtgcttggagctgaagtcaggtcctctggaagagggaacagtgttctcaactctccagcccccagtcttactatcttaaagaaatataagtgcggcttaaagaaatattaactggggctggccatgatcatgtacatgttttaatatcagcacccaggaggcagaggtaacctggtctacatagtgagttctaggacagccagagctatgtagagagacctccatctcaaacaaaacaaaatataaaatgggcctgagaggttaaaatatgtacttctctggcaagcagcagaactcaagttctgcaggtccccaaacccagatcatagtgactggctccaaggggtgtgacaccctcccctccactctccaggaacctgtattcacatgtgtgtgactacacatatacacacaggtaaagacaaaagctaagtataaaataactctagacctaactctgttttaaagaatatgaatcgaggtttaataataattttgagatggggtctcatatagcttcgattaatctcaaactatattccaaggctgacctaaaacttctgatccttctgccttcaccttcccacccggggctgggattacaggtgtgcaccttgtgcctgcttcgggggaaaatcagctcttgctggtgatggaggggtactccgtgggagcgtgagcttccagccacacacagcttacatagattcaaaaacaaaaaacaaaaaccaggaaagtgaaaagactaatgttttagctggggttcccagggacaaagatgctcgtgggaggtttaaattagagaactcttggaaagtgaagaggacaagatgtagcagagcctggggctgaaatgaccttcagaatctggtcacactaaagcaggaggttgggactccgtgtcctggcaccaaggcctggcctgctaggagagaagcagaatctctgagcaaagagccatgccagtgagcctcgagccatgccagtgagcctcgagccatgccagtgagcctcgagccaacactccctgcagctgaggagagaaggctcctgcaggcctctgcgccgcacctctgaggccatcactgcctcagatgccagaggcgcctgagtgtttctctgaggagcatggagtctgtgaggcaagaagctgggtacaagccgagagccgtgtgaattaaagctccttccagtcattcgttcagctaatgtttttctagtttgacttacatggaaaaaaaaaaaagaagtccactaaagggtgaacaggagacaggactctaggcatggttatgccactgaaaacggtgtgtttgaggaaagcatgagtgtggtccccctggggacttctggttatcttgcctaatgtgcatagaagcatgagtccttacccccaagcacttagaacagaacagaacaaaactgatgctatgctagttagaattattttaaatttttaaaaaattagtttttggggaggagatggtcacattacatgacacatgtgaaggtcaaaggacaacttccaggagttggtgctctcctttcatcacgcgggtcccaaacattaaactcaggctgtcagacttggcagcaagcatctttaccctctgagccctatcagcagccctagttggaattattttaatacaaccccactgcacctagctctctacaaaagcgaagagaatgagccagagatgcctctcacgtgacagacacttgcctagcgtgcatgaagcccgagttccatctctagcgctgcagaaacaagctcagaggttcaaaagttcaaagctagtcttgaagatgaattagagaaggagaaaaacatctattaggaacacacatgcagcctcacttcctacttaactcaagagactattttcctggcgataacctaccaggcagagttttctcaacatccccagaggggaaatggtgaggtttgttgttgttgttgttgttttgttgttgatgatgatgatgattggttgggtttttgtttttttttttttttggtttgttttgttttgttttgtttttttggcttggtttttggtttttcaagacaaaatttctctatgtaaccctggctgtctgggaactcactctgtagacaggctggccttgaactcacagagatctatctgcctcagcctccccagtgtcggaattaaaggcctgtatcatcaccacaggacaaaatgctgacagttaaaccaacgaggaagatgtgtttccctggcttctaattggtttatggcttagaccagttgttgataagcgcttataaagagcacagagtcatagactaagaacaggcaacattgtagtttgtgatgtttccagtccttgatgcagattttcttaatctcaaatctcatgtgcctgtttccccactctactcccagaaaccaagaagcctataaaacccaagaaagagactagtctgaccagcgccccctactggaggatgggaacatgatgcctactagaggtgtctgaactatgtccctcaacagaagaccacaatgaagaaaaccaactgtttcactggaagactagaggctggtctttgcagagtgtagagatgtgtactgaagttataaagaatgaagccaagcattcagcacttaccacacagtcttttaaggtcacccctggagtaagagggatttcactccctaaagtgaggtaagcaggggctggagctatagctgagttggtagaattcttgcctagcatgcacagggccctaggcttgattcccagcacttcatatagcaggcgtggtgttacacacctttacccccagcactaagaaacaggagcaggaaggatcaggagtttatacagtcatcctcattagagagcatgagcctgggctaagagatcttgcctgaggtgtggaagagggacagataagcaggaggctccaacagttcccacccatccctgaggtaacattcgttgctcagtctgcaatggttagaaactccaagttcctggtttccaggcgtctgcattgtctggagagcacaacctactttgctttctagcacgtaggctcctattgcttgctgctactttggaacctccaagcgttgttgtaaaggaacaacccagccctgcaaaacagccggctggcctcatctacccacccacagcctaggaaacagcctggcagcttgggcaaccaaagtcctaggtagcagatgtttggcctcctcacccacccacagacccaggaagcagcccaatggccttccataactggcttgacttaccaaggccccctgaaaaaacaggcaggcagcattatgactctgccttcagtcccaagaagcagttgaacagcctgttctcagctcagcctaattacaaagtctgagaaacaccaaccacgcactcaccctcagctccaggaagcagctgaacagctttcctctagcagatcagggattcgcttctctgaaaagtcacccgtgtaggctccagacacaaacaacatcagtgggtcactaaggagaaagctgtgccacactctctctggtccaccaggacagcgcaaccctcacatgcccataggaactgacgggcatggaatacctgcatccaggcacaccacacccagagatgttggtgggccatctctcagctgcatcccagctggttgatacccccagcagagaccttcagcacatgcagcattacccctgggaattggagcagaactacacccacgatacattaaagcttctgcctacagccagagtcagcacagcctgtccagccaatacgtacacagccctgggagaaagccttttactctctatgcaagtcacccagtaaaggtggcagaggcatcggattcaccagacacgcatcagtgaagggacacagagggcacccacctgaaatcctagcacataggatatagaagcaggacaatcaggggttcaaggtcatcctcagctacatccaagccagcctgggccatgtgagatcctgtctcaaaccaaacaatgacacaaatgaatgtacattggttgtatctttccacttacatttttgggtgttcgaaacatgctacttaaaacattttaaaatctagaagtcatagacttatagaagtcaggttggtgggtaactttttttttttttttttttttttttttggtttttcgaaacagggtttctctgtatagctctggctgtcctggagcttactttgtagaccaggctggccccgaactcagaaattcgcctgcctctgcctcctttagattaaaggcgtgtgccaccactgcctggcaagtgggtagcttttgagaacaggcaaataatggtttaaaaggtaactggtgggagctggaaagacagctccctgattaaaaacactctcccagaacccacacggcaactcacaactgtctgtaactttaattctcggggattcaaaatgctctctattgtcctctacagacatcagacacaagcagtacatggacacatgcagacaaaccatccaggcacacaaagtttgtaaaaaattgaaaaaaaaaagtaacaggaactaccagaatcttgacagtaacctgcataatcccaactcacttcatggcaggagtgaaatctgagaaacccacctcgaggcagcttcccgggatgagaacagtgaagtgagtacttccacgactataggtgatgtcgcacagccccacatggccctactgtgagcaagagacacagaaagcaggagatgcatggtaccagagctggtatgttgtacagcaagcatttccatttggttaattattttgcagttgcatgggtaaaagagggctctctatctgtgagataaacacttggccactgagccacaactctagcccaggaatagatgtactccaacatagcataacatcatcataagagagcatagcataatgaaattatgagccaacaacacagtcagatcaccaacatggtacagcagagtaaaatagcatcacatgctaaaaatatgagccagtaacacagtcatgtcgtgatcagcgaccgctgtgtgccggacattactacttgtgtgtgtgtgtgtgtgtgtgtgtgtgtgtgtgtgtgtccctttagagcactgactgtagagggaagaagcagttcaaccgaactctactttggtgagttgagggctcattggggttattgcaggagtgtgggggaggggctccttaacaagagcaaaggttactcaaaggcagtgcatcaccaaaaagcccaccccagcatgggtgacagctcctaggagctgagtttttatagctccctgatcgtgcaggcaggtccactgaacagtgtcccctatcgactgtttatgtagctgggtagagggtatcttgtgagccttgcagctagtacctacaccacacttcaaccctcctccctgctcgtacatgctatctgcccctcttctgcgatgttccctggggctttaagggagtgataagagtgtctgattttcttccatttatgactgagctttgggccactaggcctcttattctcagtaggttgactgagtctcagaagaagccgtcacccacggtagataaaaagcttctctccagactcaggctgacttagcagtaatctctggatgtagacctaaatgttcaggagacagctccagtatccacagcagcatccttcttgatggggcctatggcctcctcaatctcaggtctctgccctagtttaccattccaaacatgagttatatcctgtggagtggattgtgggtatgtatgtgtggtacgtgtcttagtcagggtttgcattcctgcacaaaacatcatgaccaaaactcaaattggggaggaaagggtttattcggcttacacttccaccttgctgtttatcactaaagaaagccaggacagaaactcactcagggcaggagtttggaggcaggaagtgatgcagaggccatggagagtgctgcttactggcttgcttcccctggcttgcttggcttgctttcctatagaacccaggactaccagcccagggatggcaccacccacaatgggccctgccacccttgatcactaattgagaaaatgtcttaaagctgcatctcatggaggaagttcctcaagggaggctcctttctctttgataactctagcttgtgtcaacttgatacacaaaaccagccagtacagtacatatatgtgtttatgtgttcacatgtnnnnnnnnnnnnnnnnnnnnnnnnnnnnnnnnnnnnnnnnnnnnnnnnnnnnnnnnnnnnnnnnnnnnnnnnnnnnnnnnnnnnnnnnnnnnnnnnnnnnnnnnnnnnnnnnnnnnnnnnnnnnnnnnnnnnnnnnnnnnnnnnnnnnnnnnnnnnnnnnnnnnnnnnnnnnnnnnnnnnnnnnnnnnnnnnnnnnnnnnnnnnnnnnnnnnnnnnnnnnnnnnnnnnnnnnnnnnnnnnnnnnnnnnnnnnnnnnnnnnnnnnnnnnnnnnnnnnnnnnnnnnnnnnnnnnnnnnnnnnnnnnnnnnnnnnnnnnnnnnnnnnnnnnnnnnnnnnnnnnnnnnnnnnnnnnnnnnnnnnnnnnnnnnnnnnnnnnnnnnnnnnnnnnnnnnnnnnnnnnnnnnnnnnnnnnnnnnnnnnnnnnnntttagagtcatgcacagtcttactagaatagcccagtctgtcctggaactcgctatgtagacctgcctctgcctctgcctctgcctctgcctctgcctctgcctctgcccctctgcctctgcccctctgcctgtgcctctgcctctgcctctgcctctgcctctgcctctgcctctgcctctgcctctgcctctctgcctctgcctctctgcctctgcctctctgcctctgcctctctgcctctgcctctctgcctctgcctctgcctctctgcctctgcctctctgcctctgcctctctgcctctgcctctgcctctgcctctgcctctgcctctgcctctctgcctctgcctctctgcctctgcctctctgcctctgcctctctgcctctgcctctgcctctgcctctgcctctgcctctgcctctgcctctgcctctgcctctgcctctgcctctgcctctgcctctgcctctgcctctgcctctgcctctgcctctgcctctgcctctgcctctgcctctgcctctgcctctgcctctgctgagtgtgaggattaaaggtgtgagccactatgcctggcttctacaattacatatatctgagacaatctgtcactaaatctgaagctcatcactttggctaggctggatggccaatgagttcacggatccatttgtcccactcccatcccaccacccctactcccactccccagcacggggttacacacagctacaccatttttgtatgggtactagggatttgaacttagatcttcatgcttgtgtggcaaacattttaccaactgagccctgtggcgcacatgttaaactatagtttgcggaccctaggaggctccctggccaagaggcacggagtggtagctcactatggcacggggatttttcacccaagaaaactatgccttctgggagttcttgcttccatgtatgcaggatgccttccgcaaacttttttttttttttttttttttttttaaataggagagtgtgaatgcagcccttactaccaaggcggtgcagctgaaacccttgaatgtggagaaatcgcagggatgggcacataagaacaacagataggcaaggttttccagccttgccctggaaaaccaccttcctggtcatggtaacttccctgccaggcaagcactccttcaaacacttaacgggctgcatttactgtccttccagatgctttaccaagtctgtaaagtactcaaggattagcactgtataatgggaacaaaaattaatagagggtgggcagagtctctagaggcttagtgacagttggttttgggattcagcaaggtccaacacagcacgaaaaggcctcactacttgaattattttatcagagaaatgcaggctgcagaggaatatgccaccttattgggtctctgtaacccacagtccttctggaggagccatcccacctccatcgtcctggggtgttgctgctgcagggctaaagtgcacctcctcaaccccaactggtttcatagactggcttgcactgcttgtcctggctcagggtcaaggtcatgctcttgtctgccatgcctgccactggagctgggtccccaaacctgacagcccctgggatggtgagaaggccacttcatcagccacacctggctactgaagggccgcaggctgagcaaacaatcttcagtcccagtatactttttcttctttctttcttttccttttcctttttttgttttttgttttgtttttgttttgtttttgttgtttttgttgtttttcaagacagggtttctctgtgtagccctggctgtcctggagctcactctgtagaccaggctggcctcaaactcagaaattcgcctgcctctgcctcccaagtgctgggattaaaggtgtgtgccaccaccacccagctcgactttcttgcagggacaaaagaacagagtctcctctttgggtgacataattacccaaccctatgaaaaactttatccttttgacccatttcactctgtccttccctcattctttatctctttggtgagctgttatgcagactccaaagccttctcgaggctcacaggtgctggatttagctgtcagattttactctaaaaattgtgactccacgtagctcttgccacattttctttcaagtgacccatcaaggcccaccatcttcttttttcccctttcgtcctgctctgaattcttaattctctctctctctctctctttttttcgagacaacgtttctctgtatagccctggctgtcctggaactcagtttgtagaccaggctggcctcgaactcagaagtctgcctgcctctgcctcccaagtgctgggattaaaggcgtatgccaccaagcctggctctgaattcttaattctttagaaccttctaaacccactttacatgccaatccaacaatacagataagaaagaaatgttaaaaacaaaaaaataaaagcaattctaaggaactgtcttatgtgacaacagaattgtacaaaatgcattgttcagtgaagtgacattataaaaagcatgctgttgcttggtgtgttggcacacccctttaatctcagcacttgggaagcagagacaagtggatctctgtgaattccaggccagtctggtctgcatagctaattccagaacagccatggctacgcagagaaaccctgtcagctcacagctgtggtcctcgtaaggcatcattagacagtacctgactgttctgaaggttacggctaaacagttgtttgttttatgaaaattcattgagtgtgtgcagctgtgatttgtgtgaattttggtgtatattttcaagacaggttctcatgtgtcccaggctggcctcaagttattatgtagctgaggatggctttgaatttctgatcttcttgccatcctttcccaagtactgagattttagtcatgagtcaccatggggtatcaaaactaagtgcttgtgtatgctagaaaaccattgtaccccgtgagccatatccccagctctccaaaaagcttattgaaaaagaaaacccagggccagggagcaggctgagcaggtaagggcacctcataacctgagttggccccatgggacccacactgtcaaatcagagaactgactcctacaagttaccctttgatatccatgtacaaatttgtgcatattgtcacttgtcacccacaggcatgcagtaattaattaatctattaagaaaggcttgccgggcagtggtggtgcatgcctttaatcccagcacttgggaggcagaggccagcctgagttcgagaccagcctggtctacagagtgagttccaggacaggcagggctacacagagaaaccctgtctggaaacaaaacaaaacaagaaagcctaaattatgctatattatctgaccttatggttttggcatgatacatgttatacatatatatttcccataatatagtagcagaaaatgtttgtgttacctgcaatggtatacaatcctattgtatttcacgatttaaaacttatcactatgggattcagaggaagaatacttccctgctatatacaaggccctgagtttcattctagccctgcaggaatcaccttcaccaccaccaccgtcatcacccttactattgttaccaccaccaccaccaccatttaacacagtcgcataggttgctccctggtggcaggttagataaaaaggctgcctttattgcttattctgagcatacctcaatgtccttttcagaagaactaaaaataaaacctgacttttttttttccaggaactgcgctgtattgcttcccttcacgatggtgagcaagcgaatggaaacaaagctgggtgagatgggccattaagcaccgcactcagaacctgagctgctgcaatgtcacaaaggcgaggtgctgcgcctttgatgcacacactgccaagggaggcactagtgttgccacagtaatggtaataaagtgcttgactgtatctgtgtaggatcatttaattcttctatgtcggtttggctaaataccagttgctgcaggagtttcttacaagtattgaatttctataaatgggggtcaccggttcataatgccctggtcatttgcttacctaaccatgccactcaagaattaccctgctttagaaggtccttgcacctttttctccgataatatttctgagcaagcagtaaatgacacgtctttgcaactgtgaggacgttcagcgggtgtgacttgggcaccgtgatagatgaggtgagagatagaaggatggtaggatgcattatttaggctctcggggagaattggggcatgactattactgggattttgctcagaatgaggcagttctcacggtgtttggagaactgtgagaaatgaggtcatttcagcctccttccaccattacttcccgtgtcgatttgactgcaatccatacatgcacactggcttgcagtctgcaaggcagaaaggtctccagagaccctcactggagactccacatggtcttctcatccactctgtctccttgccaaatccacactgagcgtctgcctgtacccagtgcagctggggatgccatgtcaaataggagattcaagtccatctcagagttcactgcataagcgtgtataattgtaggtgagggtcgagcccaaagtacccctactcacctgctccaagggatgacacatccattcacaatgtcgaattccagagcagtgggtgatgcttccttcttagcataaaaacatctacccctctcctcacaaagttcctatcttttatttttagtgtatctgtacaagtgttttgcctgtgtgtatgtatgtgtcctgcaagtatgcaatacccacagaggccagagagggcgctggattcccctggagttggagtgacagttttgaggcagttgtgagccacctgatgtgtgtattaggaaccacactcgggtcctctggaagtacacatgctcttaaccactgagccacctttccagtctctgtccaacgtatctttaaatatatacatgtgttctgactgtaggatatatactgtaaagctatctcctagagcaaaatgatgaaaccagcccaaatgaaggctgcacaatagcagttgtggcagaagaaaacatttacacgcatcctacaatgtcagacagtagctttttttgtttgtttgttttgttttttgttttgttttggttttggtttttggcttttgatttttggtttttggtttttggtttttggagacagggtttctctgtatagccctggctgtcctcgaattcagaaatccgcctgcctctgcctcccaagtgctgggattaaaggtgtgcgccaccactgctctgataaacagtagcttttctttgctagagtagacatacccagctgagaggcagggattagggcctggggagatggcacactgggtagagctctttctgcatagacctgaggacttgagtggagagccaggtgtcaggggcagagacggattcttcagacccactggccagtctccatagcccaaatggtggacctgaggttccttaagagatcctgtcctagcagggtagtggtagtgcatgcttttaatcagagcactcaggaggcagaggcaggaagatctctgaggcagacaggcctacgtagtgagacctctctcaaataaaatgaaacaaaaggagtaaggcagacagtgatagaagacacttggggtcttcccctgcccccccccccatgtgacacacacacatacacacacacattcacactcccatacactcccatacattcacatactcattcaatgcacatacttacactcacagacatgctacaaaatgcaataataaacacagagatgaaattgtgcttatttatctactcatttgtttttgtagaaactgtctttctatgtagttgaggctagctcgggacttataatcctcctgcctccatctctcaggcatgtgtcactgttcccagccacatggctctcccttctctccatttcccacccacccccttccttaggtaaaccatgtgactataaactgtccgttgctaatgttggcactgaacagaacctgacacgttatctttctgttgactcacattcatatacacagatttataaaccatgaaagagacagggtaaagagtatttgctgtgcttgtgcgtgatgatcacctcagccacctgagacagttgacatgaagacactctcgcttcccagaccaccgcagctctaactcagctcacacagagaaaaagtgtaaggtgggcatgctgtgttacgcatagtaggactctttctccaaacaatagcaacgaaggtagatgtttctactgtaaggttctgtgatgagacaaaaatctcagttaattggaggtggactctcactgtgtaaagatacaccggcttcaccacatttcaaaagagggagttcttggccatccagacatccaggtgacaaagtcaggtggctcggccacctcatagcttccgcaaggcacctaccccttcccctgccctgcatccatcaaaggagaacggtgctcctcctgaactgctggggctggagtgaagggtcagtggttaaaggcatgcacagctcttgaagaggatccgagttcggttcccagcaccacactcggtagcttgcaactgcctctaacaccagctcctagggatacaacaccctcttctggcccctgaaggcatttccactcttgtgtacatagcactccagacttagttaattaagaacattttaaagagagatttattaatctttaatgtgtgtgtgtgtgtgtgtgtttgagtgagtgagagagagagagagagagagattgattgtgtatgtgtgtgtatgtgtgtatatgtgtgtgctttgtgtctgtgggagtcagaagtctaccagctgaactgcagccccactaaaggatgtgtcattttttacctctgttttgccacacacccatctttgctcctgacagctccttgctgcccgtgtctccagctgctgcaggttagagtccctggccctctgccctgaaagccataatgaacactgcctggtttctgagctaatgtgatgaaatcatcaccaccccatccaccttcttaaaataggttactttctctcctccttcccagcgctgtttcttagctaatttaactggctcatcctcgccccatccatttacttaaaatagaagactttcctacccccccccccctcgctcatcttcctttccagtcataatggaactcaattgactgtcaggcataatttcttctttctctcctctattcttgcctgatagcccaatgtaatctggaccacagtgaccttgagaaagtcagtcccccttctctggctacccttaagtgtacctgggacatgtggttaatcctttgcttcaacttcctctcctcagagatgtgctcctccaagaagatggtcctgggggcccagctgctgtctctgaagctgattttctggggctggcaatgcacttggtttctgatgatcaatattataaatcagattgaacatgtgatgtcagggctgggaaatggctcgctcagctggtaaaacgtttgctgcacaagaaaatgttagggcatgggggggatggctacatacatcttttgccccagtgctggggaaaaggggacagatgtgagtagatcccaggggctggatagccaggtggtccagccaaaatgacgaacttgcctgaaatgcatgaagcccttgtttcagtccccagcactgcataataaactggacatggtgattcatgctgtaatcccggccatggaggatatgggagtgggggtggggcatctggggttccaggttgtctttagctgcatagtgaatttgaggccaacttgggatacagaagaccctaaaaactccagtttatctctcttctccctctctctctctctcttcccctctctctctccccccctctctctatctctctctctctcttcccctctctctctggtgtgtgtatttgtgtctatctttgtctctttgttattttgagacatagtctcactctgtagttcaagttggcctggaacacattatgtagttcagtttggcctagaatatgtgacagtcctcttgtttcagcctcccaagtgttggaattacaaccatgaatcaccctgcttaacctaaatatacaactttataaatacaacaaagttctccccaaatggtttgcccctaatgacaaactgttctgctgatgtcctggatcccaccctcccaccccacactccataaaggatgctacggcatttgtttctcttacttgcccatgctatcaatttttcattttctgctgagctagctccatcagccaacaatgatgttttactattactgttaattgtttgtgaaataaaggtctcatgtagcccaggctagccttgaactgttcctcgtgcctcctcttcctgtgaaggattagaggtgtgctttacctcagttaggttcatgtggtgctggggatgaagcccagaatgccatgcgtagcaggcaagcactctgccaactgacctacatcccctccccccgcccccagcccccagcccgaggatatcattttgatcattttaaatctgattttattgttttgttgcattgtgtttgaggtagggtttcatgtagcgtagatttttcctggagctcacaatgtggctcagacctactttggcttcctagtcctcctgaagcgctgtaattctcttaagtgttaggattgcacagtgtgcccttgggctctgctcatccttagcaactacacagaacacaggtttttacctgctttgctcctctacctgctttgcagcttctttatagctaaacttcctagttaccttctatagaccgactttctgcttcctctttctgctctcccctagccctataccgactgagttttgcccataccaaccattccagcaaactgttcctgtcagggctatagtggcttccctgtcaatcatgtctggtcagttcccagtccgcatctttcctgaccaatggcatttccctccttccgtgtccattctgccctttgcttatagaatggagtacacacttgggttggtttctggtggcagctagctggtggcagcatgtatgtgtgcatgcatgcaggcttacgtgtatacatgtggatgtacacacatacaaacaccacggccatttccctctgagaatatcaaaaggaaaatataaggaccctgcagtggaggatgctttcggagtggagtgaggtacataccagcagctgggcctttgctcggggatagccatagttaagacatcttcttctcagacaagtatccatgctctgttccaatagaagtgtagcccagtgatgccttcctaaaggacaagtggacttcgaagctcctgggagaaacccaacatgatctcaatggcagaaaattgccaggcaaaccaacttagtgatgagatttctggaagcgtttgctgtgcagtgtaataccttggaaccaatcttcccagcctccttcagcctctgaggccatctctggccatcatggacctgtataaggagaacaagtgacactgtagtgacaccctggccccaagccgctccttcccccataggagcatggggaagaagaaactgtatcctgcctgttttaggaaaaaaaaaaaaaaaaaagaggtcaccaccagaagatggtgatagtgaaggagactgactggacccagaggatagcatgacctcagcagaagcccctgccaaggctgacagctgcccccccccccgtccccccggcaaaaaaaaaaagcagatccagcagaagcagtcagggatgggggaaggaacaccactgtgccacagcagccttcgtggaagggccacccaaggcagcaggagcatgaggaacatcctgagggccagactggggatccagcaggggcagtcatgttcactggtggcaccttgtgccaacagtgtccctcctcaagggcaactcagaagtgctacagtgccaattggattcccagaagtggcccagagccaaggggaccccagaacaaagaagaagaatgtcacacacacagtggctttgtctgatgccaaatgacactctctgacaaccttcacaaacctgagtgtgaccctccagaaagcctcagggctttaaactggtgctaggagttccccaactgaaaggaagccgggccaataaggccagcactcgaggctgaggcagaattgaaagttcagggccagtctggctgtagagaaagaccctgtctcagaatgcgggcagggatacagctcggaggcacactgcttgcctagcatacacaaggctttggctgtcagtccctccctgaaacgttaaggtgtttttacccacgccagggtaatttggggacatccataattacaccttgtttctgaccatcctttaagaaagtcccacttcctgcagtggccaagctcaggtttctgaaaaccaaacacaggagctaattctgtggctggttgaattataaaacaatgggaatctacaaatgcagagagtccctcttattcaaataaagcatcaactgggaagaagtgggtctttgaaaactggtaggaggtgtccagtggcagagaacgccatccgtccgccattcctgtctgagaagcgttagaaataaaagatgacagatttatagtaatgaaactgaaataattacttttaaggggagccttattggaagagcagcggaggtatcatcaaggccatagacagccatgaggaggccctgaagggagagacagatcctgcagttcccttcggttccaaagaagagccgcattagaggtcccgaagtaaaagaaccttcagttcctgagaacaaagggagtttcttgttcctacggtttcaggggctgggggcgggggcggggggtgtttacaagaagtcacaaggcaggaaggtaccggataaaaagtaaagttataattcaaggttgtctaggcctgggtatgggaggtggcagccttgacttgcacatgcaagagggagggagggagggaggttgcaaggactcaaggggatcgcttatcaagcactctctgtccagggacctgcaaatgggcgagccttgatctctaagggagaggctgctgagtagtaattcctgctgaactgaatgaaacactgcatcctggagggaagctcatgaagactcagaaaactctaaagcagtggaactcaacctgtggggtgcgacccctttcacagggtcacatgtcagatatactgcacatcacatgtttacactacagttcctaacagtagcaagcttgcagttatgaagtggcaatgaaaataagtttgtggttgggggtgggggtcaccacaccacgaggaaccgtagtaaagggtcacacacagaattaggaaggttaaagaaccacggttctaacaggtggctcttaagaccaggaagtagccaggtgtggtggcctatgcctttaatcccagcactcaaggaatgggggtgggggtgtttggggagaggcaggtggatctgtgaggacaaggccagcctggttttcagagtaagttccagagcagtcagaggtacacagagaaaattagtgtggcgttgggcgagatcaggaagtaaacaacagagaagtctcaggaagtccctgaaactagctttacacagatttttcccttccttaggttatataagcaataaggactgctaactaaggagactctacacaacttgtccagctgcctgctagtttggaagcaaactccaaggatgtagctttcaagagtcatcactcatgctggggtgggcttttcaggggtgtggctgcctttgagttgcccatgctttctatgagtaactttccattcgtagtcctctgaatagctccaacaaattcattggttcactaagctagactctggcttatgtcggtgtcctgtctgtggaaaacaggcatttgttcacgtttccctaaaaaaaaaaaaaaaaaaaaaaaaaaaaaagtcgtacaatgatgtgctatctaaagaagtggagtagctttaacagtttgcttgactttcactgaaccctagaattgaaggatgtgggctgaaagaaacatacctgtagtgactgggtcaaagacaaggctgtcatagtggagggcaaagctgaaggtgtggctagaaagggacctgtgggtccctacaagcattgtagctggcagagaaatgatctaggcgagataagaatgaaattctgtttcagctcaatttagctagccagcactgggccaaaacttccggagtctgatactaaatggtttattttttattatatatatatctcacatattcaaacacagtaaaacttgagaaaaagtttcttagtgacaattatcataagccttaggcacagctgcatcaaactcccttgcaaagtgcctctctttagcaaagtacgggtgacctcttccacaggcgtgggttctattgactgagaaacagtgcccgagtctgggcttagggaggaaggattgtaataagcatcacagccaactcttttgcaaagtacacaagacctcatacatgaggatgggttctatttactgagaaacagtgctcaggattctgggagatttggtgaggcctggctttacacagtagcaaagatttagtaggtattaacacatccattcccagccttctggacagaaaacaggtgtcaatttcttatagtgaaataaaaaaaaaagtatgtgtgtttaacagttctggtttccctggtacttatctgtgagctcatgccctctgcagttgtccccagaatcactggtactggattatggtgtccacacatctgagttagctgggcagttgactgaaatctcactcccaggcagccatttagtgccatttgtatttagcatgacacgaggaagctcaaagctccaggcttgatcagcagagtctgtcttcaattatgcaacagaatctcatccctttaaccaagtctaaggcttaattaagcctttgcacatcaagagccagctgactaaaggagagagaggggtccccagcagaagatccctggcacacagccaaagttttatattgtaaatctccctcctaacctttcccaaagggacttgcagatatttgccagggtgatggatttgggaagacggattggccatgtggtagaattggcactcttccctagaaacccgaaggaatgccacgccccatcaccacacaagaactttcaaggtcaggtgcttgactggccttggctttggtcctcttcacagcaagctccttcagttcttgaacgtgcagcatggtcgttcttgttctgacgtgcataattgcgttagagattatcaggggccagtagtagccaggcactggcttcttcagtctcggggaaaaagctaatggaagtcaccatagtcaaatctacttaccaaataaatgttcggatcagcttgcctccctgaccaaatttactcccagataaagtcaccgagttagactaatgtttctaatttatggtgtgtgtgtgtgtgtgtgtatagacatgcatgtttgtctgtgtgtgggtgcacatatgtggatgccagaggttgatgctaggagtctgccttgatcactttctacctttttggttgagtcaaggtctctcactgaacacagaattagttatggttagtctggctactcagatctccccagagataccatctctgcccccagagcaccaggactgtaagtggatacggtgcccagctcttgtactcaagtcatggagaccaacagcccagtcctcctacttgcactttaccatggagccatttccttggacttttctttaaggaataaaacctttctagatgtg

SEQ ID NO: 2798 - DNA, 1500 bp, Mus musculus
cgcccttaaacaagagataaaaaacgagcaggttccgaggccacccagtaacaaacagtgtgcgcgagcgtcacgctaggcgcggcggagtgaagtctgcccctaacaaacatggcttctcagctacttccgtcctcctgtccgtaatttggcaccgcggcttctcgcgtttttatacttagctctgcttagcaaacgcctgaacttcctcctgcggggaaggcgggctaggaaggacatgttgcattctgattggttgctatgcggagcgtcgccagctgtgccccggccctgattggttgccaagagggggcgccctcagaggcggagtcagcggcgtggggagccatgggtcagcccgccaaggttttacagctctttaaaacactgcacaggaccagacagcaagtttttaaaaatgataagagagcattggaagcagccagagtaaagataaatgaagaattcaaaaaacataaaaacgagacatctccagagaaaataaaagagatgatgaaactaggttctgatgtggaattattgctcagaacagctgttattcaaggaattcacacagaccatgacacactgcaactggtccccaggaaagatcttctcacagaaaatgtgccgtactgtgatgcgccaacccagaagcagtaaagcttccaggataaacccatctctgctccttcccactttaaatacatacctggcaacggtcctggacatgcacatgtttctctctgaagcgcacgttgcaaatgagcgacaggctgagggctacagaggagatagacatgcctttcactgacatgggcaactgaaggcctggggaggcaggacgctcctctctttccctttgaaaccaagaagcctataaaacccaagaaagagactagtctgaccagcgccccctactggaggatgggaacatgatgcctactagaggtgtctgaactatgtccctcaacagaagaccacaatgaagaaaaccaactgtttcactggaagactagaggctggtctttgcagagtgtagagatgtgtactgaagttataaagaatgaagccaagcattcagcacttaccacacagtcttttaaggtcacccctggagtaagagggatttcactccctaaagtgaggagtgaaatctgagaaacccacctcgaggcagcttcccgggatgagaacagtgaagtgagtacttccacgactataggtgatgtcgcacagccccacatggccctactgtgagcaagagacacagaaagcaggagatgcatggtaccagagctggaactgcgctgtattgcttcccttcacgatggtgagcaagcgaatggaaacaaagctgggtgagatgggccattaagcaccgcactcagaacctgagctgctgcaatgtcacaaaggcgaggtgctgcgcctttgatgcacacactgccaagggaggcactagtgttgccacagtaatggtaataaagtgcttgactg

SEQ ID NO: 2799 - protein, 136 aa, Mus musculus
LVAMRSVASCAPALIGCQEGAPSEAESAAWGAMGQPAKVLQLFKTLHRTRQQVFKNDKRALEAARVKINEEFKKHKNETSPEKIKEMMKLGSDVELLLRTAVIQGIHTDHDTLQLVPRKDLLTENVPYCDAPTQKQ

SEQ ID NO: 2800 - DNA, 50543 bp, Homo sapiens
atacttcgaattctgatccttttccagactggtgatatgcagtaaaatactcttacatgagatattcaacactctgttacagaataggctctgtattagatgattttgcccaactgtaggttaacgttaagtgttccgagcaagcttaagttagactaggctaggctataatgttcagtaagttaggtgtcttacacgcattttcaacagacatacaatattttcaacttatgatgggtttatcagcatgtaagcccatcttaagttgatgagcatctatataaaattttgtacagcagatacctatattggtcacaacatttaattatgaattagcacggttttaaagctggttcagtaaacgtttcctggccaacaactgtcttctaagtaaaagagatgaccttaaaacactaatttagaatgttaactgagtaaaaattaacattttattgtccttacagaaaagagctgcatttgagtaagaagctctgaccttaaaatgccatgactgtctaattatactaaatgttaaaaatttgtattctggggctgggcgtggtggctgacacctgtaatcccagcactttggaaggctgaggcgggtggatcacgtgaggttgggagttcgagactaacctgaccaacatggagaaaccccatctctactaaaaatacaaataagccaggcgtgatggcatgcctgtaatcccagctactcaggagggcaggggaatcgcttgtacccaggaggcagaggttgcggtgagccgagatcgtgccattgcactccagcctgggcaacaagaacgaaactccgtctcaaaaaaaaaaaaaaaagaaaaaaatgtattctgagggtttaatgttattgcatataagacggtattttaccattaagtactcgctctaatctttgaactctgtgatttgtacaaatatattgaattaaaaattaatgccttgaagtttctaagtttcagaaataatgtctcactttaaaaaggtatccccaagtaaatacaactgacccttgcacaacatgggtttgacccgtgcaggtctactcatatgcaaattttcttctgcctctgccacccctgagacagctacagctagaccaacccctcgtcttcctcagcctactcaacatgaagatgacagggatgaagacctttatgattcactcgacttaataaatagtaaatatattttctcttccttatgattttcttaataaccttttctctagcttactttaagaatataataggccaggaacggtggctcacgcgtgtaatcccagcactttgggaggccgaggcgggcggatcacgaggtcaggaaatcgaaactatcctgactaacatggtgaaagccgtctctactaaaaatacaaaaaattagccagccttggtggcgggcgcctgttgtcccactactcgggaggctgaggcaggagaatggtgtgaaccagggaggtggagcttgcagtgagccgagtgccactgcactgcagcctgggcgacagagcaagactctgtctcaaaaaaaaaaaaaaaaggtaatagcaagtgttgataaggatacggagaagctggaacgctcattcattgctggtgggatacaaaatgatgcagtaactttggaaaacagctgggcagttgaagtcctaatggtttttctggtttttccttagtaatgaccttaggaagatgaaaatgtgacagcactttaaggacaaaattaatctcacaatttaaaaagcaagaaaataaatcatgttagaaatgtacttacactttcatcatcatcttctgccacagaaatctgggatatatgtttcttgggtatcaccagaaaatgtgttggtgcttgaggggaaatgtcatggaaagcaaggcactagggaaaagagaaataaataaataaatcaaacttttagtatattggtaggataaaacttatttcaacaagtatttactgagcagtaactacatggagggcactagatgctaagaaaacagaagtgtacacattacgaatggtgccgtggtcctttccatggaagtctttttttttttgagatggaatctcactctgtcacccaggctgtagtgcaatggcatgatctcagctcactgcaacctccgcctcctgggttcaagtgattctcttgcctcggcctcccaagtagctgggattacaggcacgtgccatcatgcccagctaatttttgtgtttttgtagagacggggtttcaccatgttgtccaggctggtctcgaactcctgacctcaggtgatccacctgcctcggcctcccagagtgctgggattacaggcgtgagctactgcacccggactccatggaagtcttatgggaagaccaactttaaaagtataatcaccaaaggtcatacatgttacaaaggaaaaatatgaatgatcattacaggaaaagcctgatttagattaagtgtttaagaacaactctgaggcagtgacatttaaactgggagccaatgaatgcataaaaattggccatgctaatccttgcctgcctctccagatctcctgcaggtcttcacatggaactggccttctgagctctctgccctcagagctttttcaatgatcctctccccctccaaaccccaacttccgtctaatttaaactgctagtcattccgccattccattcccagcacatacatgatttctgggagaaaaaagaaaaaacagaaaaaaacctctgattgccctccccgtcccattactcccaggtcagagtcctagttgtgcaatttcctggttttttttttttctttatgatagcaatcagttttgtaactacatatttgtctgatacttgattaatatctattctcactttactcaactatttaagaaatatacctatccttttgtgtaaagctgaagagtatatatatgatattctttagcatttagactaattatttaaaacagtgtctgtaaatacacatatgacatgaatattttcgaatctcttgctcactgctgaagtgaaagctgttttaataaaacccatccacacttatttgtctcaggagtaattctactgggtactccctacaaaatgctgattcatttagaatgcttcctgccgttctacagttggacttcggtggttcaaatgtaaatttttcaagaaccatttctcaaaggcaactgcgaactttaaaaagaaatattttttctaaaaccaaagaatttcccctgagtagagacaaagtatttttttttttaatttacctagaggaacctaattaaatttttgataacgttttgaatctaaccgacattagtagaataaatgtttttcttagattttatatttcctaaatttaacaaaactgtttacaaaatttgttctatctaaatcagccaatctgcccagctttatctgagatccaatcccaaaaatacaactggccactaaataatttacacaagatatctcaaagtcacatcaactgggatttcacctacaagaagtcaacaaaaactacagtcttagtctcttggcataaaattacttcctgttgaatacaaaaagaatcattcagctgtttgtaagtccaaaatgttcagcgggagaggtcaacggaaagcaaatcccagacgcgggcccacttcttatctcaggagatcgcctcgctagcccagggtaggccttggggtggagatagggataggggtaggggtgagggtggcaagccgcaccccgcggaggaagccggcaggcccagacggcccgcgcacctcccagcgcccctggggccctcgagcacaatgccttgctgagcagcgcccaggaacgccgggccctggcaggccggctgtgcgcgggagatcgcggagattgggcctgagtcagggcgcgatcgggtttctctctgtcaggcagagcgctggcgagatttcgagattcctgatacaggcaaggtccgaggcagccggggaaccggcgggcttccacgcgggggccccagtgcgccccgacacgcgcccaggccccgcggtgcggcactcagggcgcccggcggcctggcccgcgcccggggcagataacgagtaaccggagcgccggcacgcgccggcaggccgcctcggagtgcccgggccctgtccgctggctgggggcccgctggaccagggcagccaggtcccctcccgtcgccgctacactcgcgacccctcctctccctccgcgagaaacccgaggatccgcggacgatacccacctcagcaggcgagagaggtggtgcccagtacctacccggtcatcctcaaaaatgattttggctggtatttccttgcggatgatcttcccaaagatcgtgtcgccaccaggccgagcgacctgagccttggcaatctcatctgccatctcggcctctctcccgcgcggcggccagaggagaggctcggaagaagggaggaacccgcagagcgtgcggcgcgagagggcgcagccaagcctgcgcaggtgccccggctctggcgccccacctaatcttgcgcgtgcgcactggcgacctgggctgcgagtgcggccagcgcgctagagcgcctcagggacctccggcttggggaagttcctggtcttgagctccaaggagattcctaagtcgtttttctatcctcctttcttgtctcctggggaatgcagttactggtataaacccttcgtctgcctatggatgcttgtagggaaagttggatactgtaactgacaagatttgataatttaagtggtgctggctgcaacttagcacttagattatttaaggtcttgctgctgcagcagattttaagtcctctcttcaacagagtttttttctctctctaccagtggttctcaatcttgactacacattaagatcacttggggagcttttaaaaatccccgtgaacctggctgcagcccagatccattaaataagaatctttggagatgagccccaggcatcagtagtttgtaaacctccctagactgctctgcaaagaatttttcccagcagcaatcaacataatgtattaataaaatgacccactttaaaaaaaaaaaccttccttaatcccacatccccctccgtatctttgctcgttttataaagaagttttctacataccatgtctgctttcttatctttcatttttgagtccatttccctcttgtcaaggtcactaaggacatccatttataaaatcctatagacaattacagttatcataccagacctctaagtgtacgtattaagaaaaagtatacctcctcaatgccttttttttttttagatagattcttgctctgtcgcccaggctcgactgcagtggcacaatctcggctcattgcaacctctgcctcccgagttcgagtgattctcatgcctcagcctcccaagtagctaggactacaggcgcgcaccaccacacctggctaatttttgtatttttagtagagacagggtttccccatgctggccaggctgttctcaaacttctgacctcaggtgttccacccgcctcagcctcccaaagtgctgggattacagatgtgagctcagctgccttttatgattacattactacccttgtcttggcaaaattattgaatgtggttgcctttaatctcaaaagtgtccatttggtacttttgctatcaaagacattactgggacaattcgtaaaatctaaataatgcctataaattagataatagttttgaagtcatgttaatttcctttcataaccacagaaaaattgtcaaaatcagttgatctggggtggggccctacaagttaggtttctaactttccaggtgatacagttgctgctggcccgggaaccatactttaagaactactgatacaagggaatgtctttgtaggaaaaacccactgaagtatttaaggctatgggtatcatgtccgcaacttactttcaaatagttcagagaaaaagtgtctgtctataggtaattagagaaatagaaaaggataaagcaattacaataaaatgttaacatttggagaatctgactgaaaggcatatgcaaattctatgtattattcttgcaacttttatgtgtctgaaattgtcaaaataaaaaaatgtgtgctggtttggataataaataacatggtcagctttcattccatctgaaggctttaccatctatagagtagtgactctcaagtatttgtctcttgacctacctcttcccttaattccagactggtctgtgacatacattacagcctattgaccacctccacttagatggctaccaggcactgcaattttattttgactccctccacaacaaacaaaccaaaacctccttttgcaggattctgtatctgctgtaccaccattcacccagtcactccagccaaaaagccttgaaatcatccttaaaccttctctctgtactttcaacacacatcaccaaggatctaatcacttatctcctctatctccactactctaatccaagctactaacatctctttcctggagtactttgaaaggctcctagttggataacctatctgcttccattgtagttaatttgccacacagcacccaaaatgatctttataaaatataaatcataatgtcactctcctgctggtaatatgctagtgtataacatcacagaataaaatccaacatccttaccttggcttatagggccctgtgtgatcaggcccattgctgctgcttctacctcatttctttccatttcaaccttattgactggcatcacgcgaactcagtgtgctaggcagaagatgcccatgtcctaatccctggagcctgtgaatatgttactttacatggtaagtgggattttgtagatgtgattaagttaaggatcttggaatagggaggttcctgcattatctaggtgggcccaaagtaatcacaacagcccttgtaagtgaaagagagacacagaagagtgagagtaagagaaggagatgtgaccacagaggcagaggtgagagtctgagatttgaaaatgctcggccgggtgtggtgactcacgactgtaatcccagcactttgggaggccgaggtgggctatcatgaggtcaggcgtttgagaccagcctggccaacatggtgaaaccctgtctctactaaaaataccaaaaatagttgggcatggtggcaggagcctgtaatcccagctactcgggaggctgaggcaggagaatcgtttgaacctgtgaggcggaggttgcagtgagccgagatcatgccattgcagccttggcaacagggtaagactctgtctcgaaaaaaaaaaaaaagctccattattggctttgaaaatggaaggagttgggccaggtgcggtggctcacgcctgtaatcccagcactttgggaggccaaggcaggcggatcacgaggtcaggagattgagaccatcctggctaacatggtcaaaccccgtctttactaaaaatataaaaaattcgctgggcgtggtggcaggcgcctgtagtcccagataatcaggaggccgaggcaggagaacggcgtgaacacgggaggcggagcttgcagtgagctgagatcagggaggcggagcttgcagtgagctgagatcatgccactgcactccagcctgggcgacagtaggagactccttctcaaaaaaaaaaaaaaaaaaaaaaaaaaaaaaggaaaagaaaatggaaggagccaaaaacaggtagcattttgtaagtcagaagtccaaattgagtttcactgagctaaaatcaagtgttggcaagggtgcattccttctggatgctctagggaagaaatcatttcctcaccgtttccaatttctagaggaggcttgcttggtttgtggccccttcctccatcttcctccatcttcaaagccagcagcagaacatcttcaaacttctccctgactctgcttccttctttcacttataaggatccttgtgattacactgagtccagcacacaatccaggataatcttcccatctcaaaatacttaatttaatgacatcttcaaagcctcttgtcatatataacatagtcagaggttccggaatctcaacagttatcttctggaggccattattctgcctactacatagctctgtgaacttacatgatgaacatgctggaatttcctgttcagttctgcgacttatactttgagatgcaaactttaaaaagacaatgaaatttcagaaccttccaaatttattaagccaagggggcaaagttaagccttgaaaactgagtcatgtaatacagctgtttttcttctctggtgcatgactattgttgcttcccgacctttgtgttgagatgttatacattaatcagactccctattcttcgtttcaaacctggactacataatattagagctgtagacccttgtgattgttacttttttacgatagaatattaagcaaccaccttagagtgtaatcaatactagccaatcagatcttaaatctggatgttatccattgtttggaaaatgttgtaattctgtttggcatctccattttgtcttatataaaccatcttcaattttccttacgctggaagcactgatcagcattctttggtgtctacatgttcccatatgactgcccttacactttacagttgaataaacctttttaactggatccttagccttttgattattttggggtgacaagacaaaccaggccatgttcccagaacaactagaatagtgaagagcccacctcatatgtggaacagttaaaggagacatgcagatttatttaagaaaagaggagccacagaactgaactgattctgtcattatagaactgttttaaagtatcagcagatgagggactttggttaactgaattcaggacagtagctagcaagaaatcatcacaataagttatgaattttcaggaagctgcactatgagtctacactgaaaatgggggagcggggacggggtatcttttaaatcaccgtcagcattcagaaaacacaatgcaaggtccaagatcatctagtttattgtttctcagataaaagacaatatccagtatacttggtttaatcgcttcattacgttaaatgttctgcaaatcgaatgcatcttaattttaaaaaatcgattatcttgttattctcagaatgacttgcaataattccttagaataacatagatcacagagaaagaaaagggccttggaaatccattggtccagatctttcatttttaataagaagtcaattttacctaaaagttaacctgaaaggctacacgggtagggaaggagaacaattatgcaataggaacaataggaaaaggttgtggcgcgttagtaacgtgactacagagttttttcttgatgcttgcaaggtcataagttgaaacgcacttaaatacttatgattgtttctaattatgatgctgctgattaattacccatttctgacctctttatcagcaaaaccaaggagtagagagagctgaataggcaaaatgtaaagggtaaaactaggctttacggtcaggcatagcggatttgcatcccagatctccatttactaaatgtgcgaacttcagcgagtaatttaacctcaccttctatggaaataaatgagagaatatacgcataaaatttttaggagtcagtgttccaatcaatgcccgctgcagctgttaggacttggcttttatttatgcacatttccaaagagatagtcgcaactgggaaacgttaaaataaaggttcttttacagacgatcctataccctaaacaggaggtaacaaaacgcgggtgccgacgccatccactatatacaaacctagtccgcctagcagacgatccctgcgccggaagtgactgtgcccctaactaacatggcgtccaggtgatttccgttctcttctggccagtaattgggctctgcggctcctcgcgattttaccagttcccatccgtttagcaaacgcctttagcaaacgcccgtttagcaaacgcctcctccgtcctttggaggagggcggggctaaaagggagatgctgcctagtgattcgttgtggcgcattagtaacgcgactacagggggctggaaacagttcagtctttgattggttgctgagaggcggggctactcgactgctctggaggtagcggccgcggtgaggagagccatgggacgggcagtcaaggtgacagggcccgggaaggggtgggtacgatgccgtcggggagggtatgttcgcgtccttgagaaaactgtctggagtctctggaggctggggctcctgaccctttatggaggatgtggctgttaccccagagaagccagatgaccaactcctaggggcagttgagggtttgtgcacgtgcggaggagagcgggaggcaccagtgtggttcctacttcttggtactaacttggtactcagtgtttatccatgatacaaatctgcgacttgagttctgccctcgtttcatcttcagaccgagtatttgtctgagggacccatttcatatccctgggaagtataggagacgccaaaggctgacctgagcaacagcagttcaatgaggtgaaagtttattcagataaacagaaggtgcacagaagtctagcagccaaggaaaccgaaccccagcaaagttacttgtcaaaagtaacagcaagacagagcagggactggtgagacctgagctcactgaatgagcttgggatgtgatggctgtgctcggattatacctctctgagtacctacctggtctcagattcatttctcacgcccaagcatgatgcacgttcctgcccggcgcacaattctcattggcagccatcctttaacgtttaacatcagcatggccaattgggatctgtagttgtcactggctgaaacataaacatgaggaaatagcctgctataatatggtgaagaaaagcagtgtttatgtctagtcaataatatgggaaccaccaagcagccttcatgtacttttgtacataatgtcacagcaccaatagaaacagaattgctcagggttattcattcaaaaatttatttgaatgtccataatagctattattatagccaacaaccaacatttagcctatattgtctaagcatagtggatgcaacaataagctgaacatccttgccttcataaagaaatctagcaggtggggagaccttaaacagttatttaattacagttgtaataaatgctttgatttgaaactgcagtgttttgtgagcatataactaggatttcacatacgatctctcaaggggctgggtgcagaggctcacacctgtaatcccagcactttgggagaccgaggcgagaggatcacatgaggtcgagagttcgagaccagcctaggcaacatggtgaaaccctatctctactaaagatacaaaaattagctgggcataggggcgggtgcctgtaatcccgctactcgggaggctgaggcacaagagtttctcgaacctgggaggtggaggttgcagtgagccgagactgcgccactacactctagcctgggtgacagagcaagacttcatctcaaaaaataagtaaataaataaataatctctcaaggaagttcagacctgacgtttgattagaaattagctagagaagagaaaaaagcattctagaaaaggcaactagcacatggaaagtccttgaagtggggatttggttggaaaacttggatacaaatggaattaagtaggattcattccaaaaacacttttggtagagcctacaatatatagaaggcacttatgctacatgtgggaagatacaaaggtgaccagtccaacaagggtgacaacaagatcctacgtccaaaaaaaaataggaaagtgaaacctagcacagaaattataacccttaaaattaatccattattcaagaaaattgaggcaaaaaggctgttacttgtccaagcttacattaagtgacaatctcagattcaaactcatctgactataaagaatccacttttcatctacactgcctgaattgtccaatcagtataagtaaatgaggaagagaatacagtctgtgacctggctttctgcattttaataaaagtttatctgctccaaggtaatgttaactccaatagtgctatggcaataatgataacattttcttacactagtcctcttaaattagggatgctaatttgttgtactaatgttgtactttaaatagcatgtaaaaccattatgtttacttacttctcatttttttaatcccatgcaacatgtcttctctgctcttgcaatattaaaatccctgggattctacgatgcttgcaaagcccgtatttttaccaaggcaatccaggcttttactatcaagcacctcagagttattccagcctctacacattactcaattccaaagccacttccacatttttagatacaggcatacctaggtgatgctgcaggtttggttcaagcccacggcgacgaagtgtatattgcagtaaagcgagtaatacaagttttttggtcccagtgcatataaaagttatgtttacactataatgtagtctattaagtgtgcagtagcattatgtctttagaaagtacatatgttggctgggaaaggtggctcacgcctgtaatcccagcactttgggaggcccaggtgggcggatcacaaggtcaagagttcgagacccatctggccaacgcagtgaaaccccgtctctactaaaaatacaaaaattagctaggcttggtggcacttgtctgtaatcccagctacgctactcaggaggctgaggcagcagaatcccttgaacccaggaggcagaggctgcagtgagccgagatcgcaccattgcactccagcctgggcaacaagagcaaaactccatctcaaaaaataaaaaataaggaagtacataccttaaataaaaaaatacttttttgctataaaatgctaacaattatttgagctttcagaaagttgtaatctttttgctgatgaaagatcttgcctcgatgttgatggctgctaattgatcagattggtggttgctaaaggttaagatgactgtgacaatttcttaaaataggactacagtaaagttgaccacattgattgactctttcacacacaaaagatttatctgtagcatgcaatgctgtttgatagcattttacccacagtagagcatctttcaaattggattcaatcctctcaaccccagccactactttatcaactgagttcatataatattctaaatcctttgttgttatttcaacaatgtttacagcatcttcaccaggggtgaagtgatgtgagtgatgatcttcataaactcaagaatccactttctttgctcattcatgagaagcaactcctcatgcatttaagttttatcgagattgcagcaattcagtcacatcttaaggctccacttcttatcctagtttcacttgcactttccacgtatctgcagttaattcctccactgaagtcttgaacccctcgaagtcatccatgagtgttcaaataagtttcttccaaatgcctgttattgttgctattttggcctcctctcttgaattctctgaatggcatctggaatggtgaatccttcccaggaggttttcaatttactttgcctaaattcatcagaggaatcactgtctatggcagctatagccttatgagtcttttaaataagacttagaagtctggctcacacctctaatcccagcactatgggaggctgaggtgggcagattgcttgagtcaggagttcaagaccagcctgggcaacatggcaaaacctgtctctacaaaaagtacaaaaattagctcaatgtgtggcatgcgcctgtgctcccagcaactttggaggctgaggtgggaggatcgcttgagcccagaagatcgagacttcagtaagccatgatcgtaccactgcactcgagcctgggtgacagaacaaggccctgtctcaaaaaaaaaggacttaaaagccaaaattactacttggccttgacctgcggggctgcaaaatggatgttgtattggcagtcatgaaaacaatattaatttccttttacatctccatcagagctcttgggtgatgaggtgtgttgtcagtgagcagtaatattttgaaaggaatctttttttttctgagcagatctcaacagtgggcttaaaatatccgcgaaccatgctttaaacagatgcactttgttgatttgtagagcacaggtagagtagacttagcataattcttaagggtcctaggattttggaatgacaaattattggcttcaactcaaagtcaccagcttcaatctcttttttttttttttttttggtgatggagtttcgctattgttggccagggcagagtgcagtggcgcaatctcggctcaccacaacccctgcctcccaggttcaagcaattcccctgcctcagcctcccgagtagctgggattgcaggcatgcaccaccatgcccggctaattttgtatttttagtagagatggggtttctccatgttggtcaggctggtctcaaactcctgacctcaggtgatctgcctgccttgacctcccaaagtgctaggattacaggcatgagcaacatgagcaaccacgctcggccttttttgggtgtgtttgtttgttttgttttgttttgttttgttttgagacagggtctcactctgtcacccagcctgcagtgcagtggtgtcatcttggctcgccgcaacctctgcctcccaagctcaagagatcctcccacctcagcctcccgagtagctaggactacaagcaccctccaccacgcctggctaatttttttattttttgtagatacagggtttggccatgttgcccaggctggttttgttttgttttgttttgttttgtttgagatggaatctcgatgtcacccaggctggagtgcagtggcaccatctcggctcactgcaacctccacctcccaggttcaagcaattctcctgcctcaacctcccaagtagctgggattacaggtgcccaccaccacaccagctaattttttgtattttttagtagagacagggtttcaccatgttggccaggctggtcttgaactcctgtgctcaagcgatccacccacctcagcttcccaaagggctgagattacaggcgtgagccactgcatcagcctgcgttagcttattaagagctaattaagctcttattaataaggatatttcacattttacttccccgttcatgagttcatggacatttaggttatttctactttttcactattatgaataatactaccatgaacattagcatacatgtttttgtgtgaacatgttttcatttgtcttgagtatatacctagtagtagaatttctgggtcataagataactgtaggtttaactttttttagcaactgccaaactgtttcccaaagcaactgtaccattttaaatgccaaacaatgtataagagttcctatttttccatgtccttgtcaactctttttattgactgtcttttttacagtagccattctactgggatgaaatggtatctcattgaggtttagatttgtgtttccagatggcacatgacattgaacatctttttatggcttattggccatttatgggtttttttttttttggaagaaatatctattcaaattctttgactttttatttttcttaattttattttagattcagagagtacatatgcaggtttattacatgggtaaattacataatggtgaggtttgggcttctagtgaacccatcacccaaataatgaatattgtacccaataggtaatttttccaccctcaaccccttcctatcctcctcccttttggcgtctcccttttggcgttctatccacaaaggcgtaccctttgcttagcacctacttataagtcaaaatatgcagtatttgattttctgtttctgagttatttcatttaggataatggtctccagcagctgctgcaaaggacatgatttcattcttttttagtattctatgatgtatatatacaccacattttctcatttgtgtcctataaagcaaacagctgccctcacagttctactagcacctagtactttaacatctttgatgttattattgctataaaaattacccacagctgagccctttaagtacattatatgattgtcttttttcccatttcttcatctttaaattaataactgccttttaaaaattattactttttaaaaatatcctttaatagatatcctagatatctgttcccaaattctaggcaaaaccagtctaccagtttcatttttccttgcaataactttcctggagcaattcagtcttttgctatagtcctgcctagttgctttctagtctggctgcacaaatgttgactagcatttgtccttccccatggtctttgcctctcccatgttagactacctgtctcctgggttcccatgtcttttccttttgtgattcatttccttattttggtggaggatattcttctgtagctttccaataaagtgtgtatgacagataagagactttgcatttctgaaaatatgtatttgcccttgtctttgagtgatagtttgagtatctatggtgttctaaagcagacattttttcaaaacttgaatatgttattccattgtcttcttacagtggtgctatttagaaatcaggtaccattctgattttttccatcctttacatgtgaaatgttgattctctgagattgttctcattatcagcattgcactgaacttaacatcatgctgtgctgtgttatgagttttatgttgggcacttggtggaaccctttctatcttgtaattcgtgtgccttacttggtgaaattttttttcttcccttttacccaaatattaagtgaaaattttaaaatttcttccctcccttttctcttttctctcttgttggcccttctgctaatctagctgttgggccttctcccttaattttcttatctttcctctcctcaatttctgtttctgaacttttattctacattctgggcaatttttctcaacttaatccttactttcacctgtttgatagccaagagcttttgggagtttttggaatgttcctttttaaatttactgtagcttttcattgatgttattccatctctgcgataacatgtttctgaggaagttttttatggcagcttggtttttatttttaaatttttttgctctgtttcttatttctgttttcatgtctgcctttgatgttataggttttctaatatacgtaaaacacttaaaatggtgtctagcacacagtatgcttagtaaatgttagacagtatttgcagaacagactggaggacaggagggtgtggtggcaaagtgacaaacctttgtaagtagtctaagagatggggagtgcctgaacataagtgattttgttgagagaggataaaagaaagattacagagacatttctaaagtttccacgacaagagtaaggtataataaaaggatgacctactgatttctggcttcagaaacttggtggcctccaataagtaaaatagagaagagtggaggaagagcaatattgagagaacaatattgagtacctttttggacttgagaagtgtgaagtgacctcagcatatcactaaagcctcttcacaatctgtcttttaccaaaatgccaggctcttttctctctttttatttttttcaatacagactcagaatattcataagtctcaacatttcacttatcttttatgaaatagcaattaaaagggccagacgtagtggctcacacctgtaatcccagcactttgggaggccaagtcagcggaccacgaggtcaggagtttgaaaccagcccagccaacatggtgaaaccccgtgtctactaaagataacaaaaaattagctgggcgtggtggcacacgcctgtaatctcagctacttgggaggctgaggcaggagaatcgcttgaactcgggaggtggaggttgcagtgagccgagattgtgtcattgcactccagcctgggtgacaaggtgagactccgtctcaaaaaaaaaaaaaaaaaaaaaaagggaatagcaattaaatttgtctaaattgtttaaaacatcttccttctgtggcctcttttaagatgcaataaattcataattttgcatatgtgtgtgtatgatattgagcagattaaaacttcaataggttaagaaaaatgagaacagatacataccagactggtaaagtagcagactggtttttagcatgaggattattaactttttaaccatccttatattgttttatttatttcaaagaactttgtattatttttgtaaataaggctaaaaatgtttttaatgtagagataaataatcaaaggaaagttattttggcaagtcctggttttcaccaactatttttaaaaatagtctatgaaacaaacagaaaaggaatactgtttaatccttataatacgatttgtgtgaaatgtgaaatgttttccttttgaggtctgaattctgattttctttttctttttcttttctttttttttttttttttcttttttttttttgagacagggtcttgctctgtcacccaggctggagtgtagtagtgcagtcagagctcattgtagcctcaacttcctagactcaagcaatcctcccacttcagccgcccaagtagctaggaccacaggtgcacaccaccatggcctgactaattttaaaaaaatattttggccgggtgcagtggctcactcatgtaatcctagcactttgggaggccaaggcgggtggatcacctgaggtcaggagctcaagaccagcctggacaacatggtgaaaccttgtctctactaaaaatacaaaaattagccaggcttggtggcaggtgcctgtaatcccagctactcgggaggctgaggcaggagaattgcttgaacccaggaggcggaggttgtggtgagccaagatcacaccactgcactccagcctgggtgacagagtgagactgcaagtcaaaaaaaaattttttttttgtagagatgggggtctcaccatatcgcccagggtctcgaactcctgggctaaagcgatcctgctacctcaacttcccaaagtgctgggattacaggcatgagccactgtgcccaaccttgaattctgattttcttaacaggttttacagctctttaaaacactgcacaggaccagacaacaagtttttaaaaatgatgccagagcattagaaggtaagtatgttctttacccctttggagccagtctactttttagataactactaatctctctgagaaaccctgtgtggtcaagacccattttagggaatgaccttcactacctctctctgatatcttttataaagattagcttatattacacttatttgagaaatatctacttaaagaaaaatttttaaagatcaagtcttcataaagagttggtcaaaaaaaaaggcgagggaccagaatttcagtgtttatcattgcttgccttatattcaagccattgaactttctgttacataatcaaattttcacagtctctaggaccagatattaccatgttgttaatgtcttatatcagtctaaaagagcagctgtgaaagagaatccatcccaaatgattctaaattcagtatctccctgttttaagtagtttctatcttatctggaagtcacaggctctgaaacttaggttctgtgttattcatgttcagttccactcctcatacatttatgaacctccttaagagtgcacctaggtaaagtgtccccactgtttccagggatttaagtttttgtaactcatcaaaaataatttctgaacaaataagatatatgtattgtattatatgtactttacatgaattcctgatttaattcttgtaacatttctgtaagatagttgctattataattcctatttttacaaatgagaaaattgacaaaatgtgaaaatatctgtcccacatcatactgagtaaaaggtggacctgggatttagtctaagcagtctgattcaaaagtccaaactctaaaccaccttacgtattgaaatatatgcaacataggctgggctcagtggctcactcctgtaatcccagcactttgggaggcagaggcaggcaaattacttgaggtcaggagttagagaccagcctggccaacatggtgaaaccccacctctactaaaaatacaaaaattagccgggcatggtggcacacacctgtaatcccttgagggaggagaattgcttgaacccagaggcggaggttgcagtgagccgagatcatgccactgcactccagcctgggcgacaaagcaagactccatctgaaaaaaaaaaaaaaaaaaaaaaaaaaatatatatatatatacacacacacacacatatatataacatatatgttatatatatattaacatatatatgtatatatataatatatacatatatattatatatacatatatatgtttatatatatataacatatatatgtatatatatataaaacatatatatgtatatatatataacatatatatgtatatatacacacacacaacatagaaggaagtttttatggtaattatcaacatggaatatttttgttgctttaaatttttcaagtggaatagttataagaacagctaacaatttgttgcatatttgctaagcactttatacggattgttccattaaacgctcacagcagcacaataagaccagtgagattctaccaaagtatgctgctataatgatatcaaattctcagtggtatatgtaaacaaaagttttatttgtcactcactttatatgtcagccaagacacttaaaattttacatatatgtacacatatatcctgtttgctgccaatctctgtgtatgtgtgtatgtagtttaacatacttgtatgtattgaattttaccatcttaaaaaagcattttaatagaaatccttagatttgtaaaaataaaacattaaattagatttattataattcagtagctataggtatacaaatgaatttgagagtaaaaatcagtggaagaaaaaatattagagtgccaaaggtttatagtaggtttacctacaaacttgtcaccctgtcaaaagctctccaagagacttcattaataaatttcttattcttatgctttgtttttcatgagggcaatttctatagtagagaagtagccattcatagtgaataatgtgtcaattattgagataggaattatagattacaaaagcgaataactatatgtatttttctctttgtagcagccagaataaagataaatgaagaattcaaaaataataaaagtgaaacttcttctaagaaaatagaagaggtacagtaattttttcaattatagtaaaacttatacaattatcttgtcaaagaggaaatgatgaagatagaggggttatgtaaaataaaaaccattacttgatagttaaggccatcacaactgtagataaccttcacttatttggtatggctcacctcctcaggctcatctgccgacaccaaaatacagcaaggtaccccatcaacagaacatggaaatagccatgatcaaagccagaacagctgaacaaacccagaaacctacagaaattctatcttcacttaaagcaagtgactggaactaaagagaatgagtgttgtagtaactcagaactacagaggaaacttctactcttaactgaactaagcggttagatatttatttttaatcccatcttggcaatgacaaacagccgcagtatgaactattcttgctttgctttctgtatttgcattttggtcacttgctctagttgaagacactgtacagacactactttctcagctccctaatactcctagtagaagtttattgaaaaaaatgcacaatttttcttttcctatatattatgtattctggcatatacatattatctctgtcctcagcttcctatgtctaactatataaaggtaaggaaaggacccttaggaagaaaacaaaacaaaaaaatggaaaataatttgcaagatagttatggttccaagaattgatttggttccaagaattgatatggttccaagaattgattcctttaaaaagaatcctttttaaaggaaggtacaaactagagaaattttctatgttcatagaatttccagatgtttaaaaaaaactgataaaaaatgcatttatatttagtggagaaaatgctatttttgaaatagtaaatacctttaataatggagctcatgagacaaaatgagatagcctaagtattccctctctataaaataaacaaaaagggaaagattttgctgaaacatgatagggcaaatagggaatatgtaatttttattcatggcagaaattaaaatgaccatataatcaactcatgacttgaagggaagttaaaaggtatatgaggaagtttgtactgtttgctattcagtagactaattcataacatatgataattttttaattttgaaattatgattaaagacttttaaattgaggtctgtttatatcaagtaaactgggaaaatgaactacaatctcccaaattcattttacttacagagcattaatttaacattaagcaatctagaaattccatatttgttatatacaaatgtatattttgtactttctgcaactgaaaaatattaagattttagtaattttaaaataattgctttgttattagagggttgatagagtcttggcactaaaaggaatctcaggcatcctctctagaccagcagttctcaaacgtggtcatctcaaagaacctttacactcttacaaattgaggaccccaaaaagctttgtttatatcattatttaccatattagaaatgtaaactgagaatttttaaaaatatatattgattaattcattttaaaataacaattttattatatgttaaaaagtaacatgatatttatgaaaaataactatttttaaaaatgtagtgagaagagtggtattggtttttttgtttttgttttgtttttgtttttgttttgagatggagtttcgctcttgttgcccaggctggagtgcagtggcatgatcccaggtcactgcaacctccacctctgggttcaagcaattctcatgcctcatcctcctgagtagctgggattacaggtgcatgctaccacacccagctaatttttgtatttttagtagacgggtttcaccatgttggccaggctagtcttgaactcctgacctcaggtgatccacccacctcagcctcccaaagtgctgggattacaggcgtgagccactgtgcccagccccctgcaatatgttttttaggttgaagtatatgaagaaaattcagccttacacagatttgtagttggaaaagagtaaaacaattagataattgtgattttttcttttctttatttttttgggtagagaggaggtcttgctttgttgcccaggctggtttcaaactcctggcttcaagcgaccctcctgccttagcctcccaaagttctgggattacaggcataagccacgtaattgtgaatattttttaatactacgccttgacatgaggtaatttctttttttttgagacggagtctcactctgtcacccagttaaaggttagttccaatgtgcaactctgttatctgtcagacaaatggaattttttttggcggggggggggttccaggattcatgcagaccacctcctcctcatcttctctggacccgcctaatcccttattcctcaactagccttgtttccagccttatatctaggacttgactcagtttatgtacctccagtggctgaggagacccattattttctccttctctgccctgctaagccccttcccaggtgtcaggagatgaggctttgctctcccacagctctctccatggcagttaattccagctccctccttttgatgctcagaccaaaaaccttggtgctttcttgactgctattcttctctcacacttatatccaatctgatagcaaatcctgttgacttaaatatcaaaatattaatatatacagaactcaactacttcttatcctccctgtaattatctccgagtccaagccaccatcatctctcttgttataacagcctcttaatgggcctcctgcttctagccgcactccctacagcctattctcagtacttttaaaaacagaataaaccttaaaaaaagaaaaaaaaaggcatatctcagcactctactactcacaaccccatgactcttcatctcattcaagaaaaatctaaagtgcttaacatgacctacaagactgtcatctgacctttgttaccttgccacctcaacttgaaccacatccccctcattcttccaatctcagccccttctttgagggtccttgaatttaccaaaaagtttcctcacttagggtttttatgctgttgcctcttcttgggatattctcttccatgccctcaaagcttcgtttaggtagaccagtgaactttaattgatatttccctgtgaatggattttttacccatgcatgattttgtaacatcacgcagtgatgatttagaaaatgcaggttcattaaatactacagatcttccagatattgacatagttcattacatatttttaaattatatctatcaatactaatatccatctcatcagaaaaatctttaaggctgggcatggtggctcacacctgtaatcccaacacttttggaggctgaagtgggagggtcacttgagcccaggagttcaaggctgcagtgagttatgattacaccactgcactccagcctgggtgacaaagcaagaccttgtctcaaaaacaaagcaagaaaaaaatatttaagtattgtgaagctatcaagcttaccctggcagatacaagttctccagaattctgatatttgcttgaaagcttcagttttgtcattgtcagcaaatactgtcagttgttttctttgaagtgacacactctacttttctaagaaaataagaaaatatctgccaaatagctaagtctaaataatcttaatttgtcagtggttctgtaaaggtaaaaaatggtattttgatggagaaagctctactgctgacaactcaaaccatgcagaaggctgtagtgttttgaaagtaattttgacctcacagatccctgaaagggtctcagggtctctcaagtacatattatttgatgaggtctgaaactcaaagagagtaggtgattaacccaaggccatacacttaatgacacagccaaagttggagttcaagtgttctgaacatctaattctataaaagaaagattcaactgccctcccaaaaatgtgcattttaaacacacttaaaaatacacattgtaacaaaaaatactctaaatctgttttggaagaaaatatagaattgatagataaaagttaaaactatatgcatatctgagctttctatactagttggaatggttataaaaagttaaaagcagtaccgtagtccccctttatcattggggaatacattttaagatcctcagtggatgcctcaaatctctgatagtaccaaatcctatatactatgtttttattatatatactttcctatgataaagtttaatttataaattagacacagtactcttgtgctttggagccattattaagtaaaataagagttacttgaatataagcactgcagtgtggcaacagtcaatcttgataaccgagatggctactaagtgaccacaggtggacagtgtatacaatatggatatgctggacaaataaatgattcacatcccagacaggctggagcagatggcatgagatttcatcatgctactcagagtgacatgtgattaaaaacttatacattatttattttgggaattttctatttaatattttcagaccacagttgaccacggataactgaaactgcagataaggagaaactactgtattacttgaaaagaaattatagtaaaactatcgttttcaaaaacagtacattcatatgaaacacctaaaggacttactctatttgtttggttttcttaacagctaatgaaaataggttctgatgttgaattattactcagaacatctgttatacaaggtattcacacagaccacaatacactgagtaagtaaaattaaagaaaaatggtttctaactgcaatgtgttttaaaatattgaataattatagcacatgtaatgctgagtgataaaacagcttgattttgccagacaatatggtatatagcatatatattttacaaggttatagtctataagactgaattatgaaactttgttttgccacatttgtttcaatttttattttttatttttatcttcttatatttcaacactaattatgaagacagtacaactatatatttttatcatatttatttacagttcttaatttttctggcatcatttatcacttacctagactatttctttaccttttactctataatgagttttgttttttgtttttttgtttttgttttttttttgggttttttgagatggagtctcactctgtcgcccaggctggagtgcagtagtgcgatcttggctcgctgcaacctccacctcctgggttcaagcatttctcatgcctcagcctcccaactagctaggactacaggcacacaccacccatgcccagctaatttttgtatttttaatagaaacagggttttactttgttggccaggctggtctcaaactcctgacctcaggtgatccacctgcttcagccccccaaagtgctggtattacatgcatgagccattgcacctggcctataattagttattttaattcagaagatttaggattataggaaatggaaatatagttgaggatcctccatcatatctcgagactccagatggtgcttcagcaaaatctcatttcacataatattttgtttttattctctaaagtatctttggggacagtaacaacaaaaagatgacattcaaaattgttggccaggtgcagtggctcattcctgtaatcccagcactttgggaggccaaggcaggagtctagattgagcccaggagttcaagaccagcctgggcaacatgaaaaaaccccgcctctacaaaaaatacaaaagttatcaggatgcagtggtgcacacctgtaattccagctagtagggaggctgaggtgggaggatcacttcagcccaggaggttgaggccttaatgagccgcgagtatgccactgtactccagcctgggcgacagagtaagaccctgcctcaaaaaatatatatattgaaaggctttgttttttaagcagactatggaagtataacatacaaacaaaaaagtactcaatttgtaattgtatagctcagtgaattttcataaaatgaaatacccatgtaaccaacatgtaaaacaagccacatgtaaaaaaaaaaaaaaaaaaaaattggcctttctgatggatatgtggtggtatcacattgtgattttaatttatatttctctggtaactaatgaatgatgaggaccttttcagttgtttagtggacatttggatattcttttttatgaagtgcctgtttgagtcttttgtccatttttctaaggggttgtctgcctttttattgttgatctaaaggatttctttgtatgttctgaatatagaaatttggtgggtatatgtattacaagaatcttctactttgtggctttccttttcactttggtaatgttatctttctgtgagaagttcttaatgtagtcatatttatggatttcttaataattagtgctttttaattctattaaagaaatctttgactagctcaagcaagatcgtgaagagattctcctgtgctttcttccaaaagctttattgtaggctgggtgcagtggctcacacctgtaatccctgcactttgggaggccgaggcgggtggatcacttgaggtcaggagttcaagacgagcctgggcaacatggtgaaaccccattttcactaaaaatacaaaaactagccaggcatggtggcgcatgcctgtaattccagctactcaggaagtaagggaggagaatcacttgaatgtgggaggcagaggctgcagtgagccaagatcatgccaccacactccagcctgggcaacagagtgagactccatctcaaaaacaaaaacaaaggccaggcgtggtggctcaacgcctgtaatcccagcactttgggaggccgaggcgggcggatcacgaggtcaggagatcgagaccatcctggctaacacagtgaaaccccatctctactaaaaatacaaaaaattagccaggcatggtggtgggcacctatggtcccagctattctggaggctgaggcaggagaatggcatgaacccgggaggcggagcttgcagtgagtcaagatcgagccactgccctgcagcctgggcaacagagcaagactccgtctcccaaaaaaaaaaaaaaaaaaaaaaaaaaagctatattgtttgatcttttccatttggttgtttatatcaactagagttggtttgtatatggtatgagatgggagggtcaagatttatttttttacatgtgactatccagttgatccagcaacacttattgaaaagaccactcttccccctactactctacaggatcacctttgtcataaaatctaagaactatatatgtgtgcatctgtttctggactttataatctcttcaatctgtttttctgtcctgcatcatataccttcatgtcttgatttttacagccttataatagatcttcctacctggtagtataagtccaaagggcttttaaagttacttttaattaatggggacttatcagaaattattagatcttgggctgggcactgtggttcacacctgtaatcccagcactttgggaggctgaggtgggcaaatcacctgagctcaggagtttgagactagccagggcaacatagtaaaaccctgtctctaccagaaatacgaaaaattcaccaggcatggtaatgtgcacccatggccccagctactagggaggctgaggtgggaggatcacttgagcctgagaggcggatattgcaatgacccgagatcgcaccactgcacctcagcctgggtgacagagccagaccctgtctcacaaaaaaaaaaaaaagaaaagaaaaaaaaagaaattattagatctgagttatggttttttcgttttgttttgtttagtttagatggagtcttgctctgtctcctacgctggagtgcagtggtgtgatctcgtctcactgcaacctctgcctcccgggttcaagcaattctcctgcctcagcctcctgggtagctgatattacaagcgtgtaccgccacacccagctaatttttgtatttttagtagagacggagtttcaccatgttggtcaggctggtttcaaactcttgatcttgtgatccgcctgccttggcctcccaaagtgctgggattacaggcatgagccaccgtgcccttttttttttttttctttgaaacggattttcgctctcgtcacctaggctggtgtacagtggcatgatttccgctcactgcaacctccacctcccaggttcaagtgattctcctgcctcagcccctcaagtagctgggattacaggagcttgccaccacgcccagctaatttttgtatttttagtagagacaaggtttcaccatgttggccaggctggtctggaactcctgacctcaggtgatccacctgcctcagcctcccaaaatgctgggtttacaggtgtgagccactgcacctggctgatctaagttatgtttataagggcagaaaacatagttaatcctaaacttaagatgtgtagtcatcagcttttatcttaataatgatctttagagtttctgtgtagtatagccaacattttatacaggtaatcacagatatatattatttttatcatatgaataaagttttaggttattttaaataactaaatttagtatctatttcaaatgccttgttttagatataacactattgaatattatttagatttctttttatcctttggttttatgtatactttaattttcccacagaattaaatattttgactcttttatgagtattaatacatattgccttaataatagcctcattctttctgtgtgtgtgtgtatatatatgtatacacacatatatatacatatatatatgtataggtccaaaatgtaagaaatttgattccttaatctctctttctaaaagttactttaagcaaaattccttcaaatattttagcagtgtctatactgtcacgtagaaatgacaagaataaaaattctgcttcttgtttagaaaatggaaagttgtgattatgtgtttctaaaaaatataatgtctcaaaatgaaaaataatagaaattgaaagtaataaaatgaaacttcatttggaagagtaatcaccttgtatgcgtgaattctaaatcaatctctctttttcttccattcaaataatatctacagtggaaattaaattttgaatcccagcaggaactctttatcttaaataatttctcatttttaattttttttaaaaatcacttccagacatctcttaaaaggagacacacaaatggccaacaagtatatgaaaaaatacgcaacatcacttatcagggaaatgaaaattaaaaccacaatgaaatatcatctcaccccagagagaatgactattgtcaaaaagacagaaaataacaaatgctgacaaggatgtggagaaaggagaactcttatacactgttggtgggaatgtaaattaggatagccattatagaaaacagtatagaggttcctcaaaaactaaacatagaactattgcatgatctagtaattcctctactgagtatgtatccaaaggaaaggaaatcactgtatccaagaaatagctgcattctcatgtttatcttggcactattcacaataaccaagatacggaatcaacctaagaatccagtgacagttgattaaaaaaaatgtggtgcatacacacacacacacacacacacacacacacacacacacacacacacacaatgcaatattattcagccataaaaacaaggaaatcttgtcatttgtgacaacatacatgaacctggaagacattatgttaagtgaaataagccaggcacagaacgacaaatattgcatgttctcactcatgtggaacctaaaaaagttcaacttatagaaacagagtgcagatagtggttactagaggccaggaagggtcagagggggatagctagaggttggttaatgggtccaaaattacaattagctaggaggaataagttctagtgttctatagcactgtagggtaactataattaacaatttattgtatgttttcaaatagctagaagagcaaattttgaatattcctaacacaaagaaatgatcaataaggtcatagatatgctaattaccctgatttgatcatcacacatatacatgcattgaactatcactgtaccccttaaatatgcatatatagtatgtatcaattaaaaataataaaaggaaaacatttacttcctttatccttgccggtgaattcaaggttctttattacaagcataattttatcatttgaaataattccttatttttaaaatctttaaaaaatattttggaaactatttttctttccaaatattttctgctctattttttgtattatctcaggtgcctgaatttgtacaaatcataattttttattcatatcattcatcattggtctagcatagcctttaactatgagttagaaaaatactcaggttattcattattctatacttgctgttttattattaacatttgtcaaaaccctctttctaatgtggatattagtcgcctggtttcagtgttggcctttgacaaacatatatattttcattcgtacaaatttatgataaagatggtcccaagaaaacccaggacttcgggtcattattttttacggtacttagttttttaataggatccatattttttaacttcctctctggcatatatgtaagaaaaaatagggatgtacttctaaacgaacgatacagttaaaaaaacaaaaagctccaagaagctgttctttagatgtattttaaacttctgccttttggtttatttagatttgtcattgtctaaaactatcttatggtttgtgttctaagacatgttaatgtgactcaacaaacattgaatcgctgttatgctagacgccagggatagaacaatgggcaagacagatctggttcctatccagtggaacttagagtgctgtgtaaaagacaggcaattaaatgtacagctacagttcttggaatgccaggataggaggcagagactgctgagacacataagcagagctacagatccaaacttgatgagttagggacaggttctgggaagaaaacacttttgtgttacagtttccctaatttgaagtcatcatttatataatatacataatgtgcttgaaatatttagaagtatttctggaacttcagtgtgaaatattttaatgtcctttaaattatttggattccaaatatctctgtgattgtcacactattataaactatgctatccataataatttattttaaaatctttacctaaatttgtactttggtccaaaattgagataaagactttatttcaaggaattgctttttggccgggtgcggtgggtcacgcctataatcccagcacttggtgggaggctgaggcacgtggatcaactgaggtcagaagttcaagaccagcctgatcaacatggagaaacctcatctctactaaaaatacaaaattagccgggcatggtggcacatgcttgtagtcccagctactcaggaggctgaggcaggagaatcgcttgaacccgggaggcggaggttgcagtgagccgagattgcgccattgcactccagcctgggcaacaagagcaaaactccgtctcaaaaaaaaaaagaaattgctttttattgatatatctaatatgaccagagtagataaggcgtttcaggggcctgaagtacaggaaataaaccatgatctcaatgcagttcctttttaaagatctggcaacatcaacaaactaaggctgttatagtactcagtatctaatgtggaaagcaaagtcagggattttacaatctataagacaaaattataataaaaacagtatatagcatataaatatagttggagtgcatttgacctaattaaagtgttaacagttaatgaatacagaagaattcagttgtaaaatatcttttgatgccaaagattatccaataaggtgaattgggtaaagaagtaaaatagtggatatttgacaggttttctgggaatttactactcttcaaataacgctgctttgtttcaagacttccaatctgcctgaattctaaatccctaagacagaacctagagaatttaagttcctctgtttcctttgtagctcaggcacaggcgtttgattaggtgaagcacactcacttgtattcagcacagaatctgttttgctggcaggagtagcatcagtggtttcaggatcaagttcctcatggagaagagaagtagcattggtatggtggcaagagcagacatagtaaggttgagtttctggcaacatccgaagtgtagcatcttgtgttccatgagggtaaaaatggcagcatttttttctggcaccccacgagagagcagcagtttttatcattagcctatttctgtggtatggctttggtcattgtttctggaagcttagtctcaagcctgcctggttctggacaatttgaaacaacctgtttaatgcctttccagcttctaagcagccagaggctgcttctgtgactagtaacaaagaccaacagttaaagcttttatagtccacttcctggtgatatgagttaggcaaaataaaattggccgggatcgctggctcacacctgttatcccggcactttgggaggctgaggtgggcagatcacctgaggtcaggagtttgagaccagccccctggccaacatggtgaaaccccgtctctactgaaaaatataaaaattagccaggcatggtggtgggcgcctgtaatcccagctactcgggaggctgaggcaggagaattgcttgaacatgggaggcagaggttgcagtgagccgagatcacagccactgcactccagcctgggcgacagacagagcaaggttctgtctcaaaaaataataataatgataaataaaattgaaaaagaggttgaatgcagattaagctagcccacaaagcagagatagaaaaaagtattactttgctaaaaggcacaattctgtctacagcctagagtctaattgattaagagtcccataatttagagccttggagagttaaaaatgctaattgttcttatccactaaaactaaagccagtacaagcagggaaattctgagctgtaacatgaaataagatcgatgcctcaagactttctcattcttccagacaaagattagatatatgattcatttactgactggaacttactattcttcattgctttaagaagtggcccctaaggtaagggttaaggagatgggcagaacgtagaggctgctaccaaaggatgacagtcttcatccttatttttctgtggctacttgtgcatggaaatgactggaaaccaatttgaagcttataaagtttttgagtgaattgtattgccaagaaactccaggcctggctagctcttttcacctcttaaggccacccctgggcccctaaactcctatcaccaggaagtagactatgaaagcttttaaagccccaaagaagggcatcttccccagtatctccaccttagaacaatgaggctcagcaggacctaatggaaacactagcactgtaaccaaacatccttgatttcagtctagatgagacctgaggggacaggtagtgagtggatgtatgctacagatggaaagaaggatttatatgcattttgcatagccaaaggggttgtgcttgttgcctctccagtatctattctcctgttcttttttttttttttttttggagatagagtgtccttctgtcgctcaggctggagtgcagtggcacgatcttggctcactgcaacctcagcctcccgggttcaagcgattctcatgcctcacacctcctgaatagctgggactaccgctcgggcaatccaaccacctcggcctcctaaagtactaggagtataggtgtgaaccaccgtgcttggcttctcctgttcttttttactaactgagaaattgtgttcagggtgcaatgtaccaagcaaaaaaaaagttattttccagaccatgtgacacctttctggtctatataaaccgtgtctattcggtgttacttccaagaaagtcattgttttcctgtttaaaaggagcaggctgagctggcactctccttttgcccttttctctcttcttcccatctggagtgcagatgtgatatgacaagcagcagtgaagacaaaaccactcatggaaggtagcagaacaggaagagagaaagagcctgggtccttagtatcactaaggacaagcactagcccagaactgccttaatctgtatttctttttttttttttccgagatggagtctagctctgtcgcccaggctgaagtacagtggcacgatctcggctcactgcaacctctgcctttgggttcaagcgattctcctgcctcagcctccctggtagctggtgcctgccaccacgcccagctaatttttgtatttttagtagagacagggtttcactgtgttggccaggctggtctcgaactcctgactttgtgatccgcccacctcggcctcccaaagtgctgtgattacaagcatgagccaccatgcctgtcctttaatctgtatttattgataatgtgagaaaaattaaatctcttacttatttaaaccagcttttggactttggttattcagaactgaacatactctaaagtgatatgggtatatttaaccatttatttttccattctcccataaaagtcttgttccacttttgtaacacatgacattatactataatttgttgtttatctagctatcttttccattagattgtgagtttctggaagctgaagagactattatatattcaccttcatatcttaatttcttgatgtaatgtctagcatgaaataggcacatataggtttgataagtgaaacaaattattgccattgttaacaagttaaaatgcacactacaatttattctctgatgaaatctccataggtttggtaaaagcaagtgagatataaacaatggttaaataatacttatttaactggttttcatttcagtaagccaaatttatcatctggctaataagagcactattcttagtcagaccagttctttcttaattaagtgaaatattcagtttgccttttgggttgaatttgttttagtgttgtcttctgtctttttttttttttttttttttttgagagagagagtctgtctcccaggctggagtgcagtagcataattattgctcactgtaatctcaaactcctgggctcaagcaatcctcctgcctcagcctcttgagtagctaggaatacaggtgtgcaccaccatgcctagctaatttttaaacaattttttgtagagacagagtctcgctgtgtttcccaagctggtctcaaactcctggcctcaagcaatcttcccacctcagcttcccaaagtgccagaattacaggcatgagccgctgcatctggccactgtgtgtgtgtgtgtgtgtgtgtgtgtgtgtgtgtgtaaatatatatatttttaaaacctttttattttgaaataattcagatttacaaaaaaagtgcaaaagttgaagggtatgagaatttcctttacccagattctacaaatgctaacattttaccatatttgccttattgtgtttccctcatttttttttcctgaactttctgagagtaagttgcagacataatgcctatttaccccaaatgaacatttttagaattatgacagcccatttgggtctagatctcctggagaaataccttagagtatatttttttaagatacttcagtgtgtatttcctaaatatacaaggacattctctaatgtaactgcaatataatgaccaaaaccagggtattaatattgatgcaatgctatcatttaatctttccatttgtcctaataatgtattttatggcaaaaggaaaaaaaattccctgtggaccagtatcctattggggatcacacattgcatgtagtcatcatgtctctttaggtatccttaatctagagcagtccttcagtctttcttcgtctttcatgtccatgatgttttgaaaagtataggcaggttattttgtagaaggtcgtgcaagcattttttgattgatagctcatctaggttcagctcttctggagaaaagaagaagaaatcaatgtatctcctcaaaaatttggaattttttttttttgaggtggactgccactgtgtcccccaggctggagtgcagtggcaccatctcggctcactcactgcaacctccgcctcccatgttcaagcgattcttgtgcctcattctcctgagtagctgggattacaggcatgcaccaccacacccagctgattttttttttttttttcagtagagatggggtttcaccatgttagtcaggctagtttccaactctagacctcaaatgatcatccctccttagcctcccaaagttctaggattacagccgtgagtcaccacacccggccaaaaatttgtatcttaagagctttatcttaactccagcaagatgtcttacctaggactcaacaggtttttgttgttgttttatgatatttctcaatgtgggcactattggcatttttgacaggacagttcttcactatgccagactgttccacccattacagaaggtttagcatccctggctcctgcccactaaattccagtagcattctccagttgatatgaccacacaaaacaccctcttttaagaacaattgttatttaaaatttagaatctttaaattaggagaccagtcttgcttttcatatagtagatagtataagcaaaatttccagttgttttcattatcagtaattggtaattaaatgaccaataatagaagttttagctgaattctcttcagttatttgatttgctatatttaatgataaagggttaagtggatcatatatgtttttatataatctgaaatgagaatgctattaattctaattagagtcaaggatgccaccttagatatcaactgaaataaaatatccctggaagatttatcttaaaactggatattttactattttaaattttagggggaaatgagtgtccttgcatttaattctaattttagtgatgttaattattctcttttttttttttctttcagaactggtccctaggaaagaccttcttgtagaaaatgtgccatattgtgatgcaccaactcagaagcaatgagttttctagaatacaacaagtctttgtactttttaactttaaaatctacaactctggcaaaagtcctggaaatgcagacattttccctgaactggcatattgaaaatgaatgaattacagaatagcttcatatttaaatttcatgttaaaaggtcattactgagaactaaagaacataattaagtatttctaaaggaaattagataagaaaacatttcattttcattgaaaatcaaatttcataaagcaaagtaaatgcttagggagatatattcaatctttgaccttgatgagtatttgatcttaccatagctatttgagaatgtggtgcttttacaaattggtgagttttcctgccatgtgaaatgcaattattacatttaaattgttagattaaaatgatatttagtcctgaaaaatattaaattggtcaaaaaaatcacagtgtatgccagctctctacagaaagtggcctttgttttctaaagcactgggattatttctgtagctaatatataattgtacagtttctttttagagatagagagtatctctgtgttcttatgaagacattttttatcagttttctgaaaatagatgaataaaatattatagtcacctagggtcactatggaataaagaaatcctagtttaaagaggaaatagtggcccttgatcaaactatttaatatggccttagtagaattagctgtatttagacaaagttagactttagtgtgaaatgtaatcggtggctacattctcatcgttttaattaatgaaacttaaatggcttctcttcttccacatgtcctgtccttgacaagatgggcagtatcacaaaaggtcctggcattctaccatctaacactaggaactgtaaaatactgtttaatattcttcttgtttctcttttatctgtgtatctttgccattctattttctcagtgaatagtatgttttctcccattcactgataaattctctcatttgatgatgatacagggtttttaatttttgcaagattctcaatgcaagcattgttatgtatctagaaattatacctagagaaaaatgaaagtcgtttcaaatttgaaatttgcccttttaagagaatgctgaatgtcatcgcagtatataatcactatataaatgtgctgacttacagttattttagtgtctatatgacatattttgaggaaagttggctgacgttatttaaatttaatatatattctatattttagtgttattgaatattttatcactgagcttttttctttaacctgaattccctgttccatttttcattcatattaatttaaataactccagatttctttcttatagtcattattagtagcagatgagattaataattcacatgtttattaaagatagtggcttagaaattttaagatatattgatataggcccgggcgctgtggctcacacctgtaatcccgcactttgggaggctgaggcgggcagatcacaaggtcaggagttcgagaccagcctggccaatgtggtgaaaccccatctctactaaaaacacaaaaattagccaggtatggtggcgggcgcctgtagtcccagctactcgggaggctgaggcaggaaaatcacttgaacccgggaggtggaggttgcagtgaactgagattgtgccactgcactccagcctgggggacagagtgagactctgtctcaaaaaaaaaaaagaaaaaaaaaggaaaaaggaaaaaaaaaagatatattgatacagataggtagatatgatattgtactttcatgccataagactacacaataaagttcctgaaagttcctggctgggcgcagtggctcacgcctgtaatcccagcactttgggaggccgaggcaggcagatcacctgaggtcaggagttctagaccagcctgaccaacatggggaaaccctgtctctactaaaaaaaatacagaattagccaggtgtggtggcacatgtctgtaatcccagctactcgggagactgaggcaggagaattgcttgaacccaggagacggaggttgcagtgagccgagatcgcaccattgcactccagcctaggcaacaagagtgaaactccgtctcaaaaataaataaataaataaagttcctgtgaagtatataaacatgtcaacaacaggcttgactgtcacaaaattctgaaagatgtcgcactctattcttatatagcatatgctaatttatttatttattttttgagattgagttctgctgtgtcacccaggttggagtgcagtggcatggtcatggtccactaaagccttgacccctggggctcagcagttatgccaactaagcctcccaaatagctgagactagaggtatgcgccaccacacctagctattttttttatttttagtaaggacaaggtctcattatgttggccaggctggtctcaaattcctgagctcagttgatcctcccacctcagcctcccaaagtgctgggattacaggtgtaagccactgcaccctgcctattcttataatcatatatttatatttcaaatggattttaactggttatttaatagtttaattagataaagtaattcatggctgggtgtggtggctcacgcctgtaatcccagcactttggcaggctgaggcaggtggattacctgaggtcggaagttcgagaccagcccaaccaacgtggagaaaccccatctctattaaaaatgcaaaattagcaggacatggtgatacacacctgtaatcccagctagtcaggaggctgaggcaggagaattacttgagccagggaagcagaggttgtggtgagctaagattgtgccactgcactccagcctgagagaacaagactccgtctcaaaaaaagaaaaaaagaaaacttttttacacatgggtatctcaccatgttgcccaggctggagtgcagtagctattcataggcacagtcatagcacactgcagcctagaatttctgacctcaagcaatcatcctgcctcagcctcctaagtagctaggactacaggtgcataccaccataaccagctttaattaaatgttttttatttggttattttttttaagttttctgtattcacacaaggggttgcccaaatataattttgctttgactattgagatctagtgaaagtggggtatatgaattctaattgcaaatatccaggctcagaggcccagcaggactttctaacacaatcttttagcggaagttagaaatggtatatagcaggagagtcagatttgagaagcatatgtagattcgaagctgggggaatatggcaggtagtttgtacaacatctaattcagaacattaaaattaagattttagtcaaactgtgtttaagttagttcttattttcctgtagatgcatctcacagcatcagtacaataccaaaaaagcacacaagaataagaatatgtggaatttctatacctattgacaaagcacataatttaaccataaacacaaagccataggtcaacaaagaaatgaagattccagttctgaaggtgagttttctgaagccaaagtggatacatgcaaaattaatatagttttactgtatatcagttgtcaccaatcagaaatggaaaacagatcctatttataattgcaaacaaaactgtaaaatagactttttaaagtctgggaatagacttctaaaataagctataacacttaaaaaggagagatatactatgttcctagataggacaattgaaaattctggagatgacagtttttcaaaaatctattgaggccaggtgcagtggcccatgcctgtagttccagtactttgggaggcctaggtgggtggatcacctgaggttgggagtttgagaccagcctgaccaacatggagaaaccccgtctctactaaaaatacaaaattagccaggcgtggtggtgcatgcctgtaatcccagctactcgggaggctgaggcgtgagaatcgcttgaacccggtaggcagatgttgcagtgagccgagatcgcaccattgcactccagcctaggcaacaagagcgaaactccatctcaaaaatagaaaaaacatttatcgaaatcccaacaagttgacaaatatatccacataaaaatataaaacttctgtattctgtgaaagctactataaataaagtttagagaaagttatttgccacctatgtcatgattgaaatagttaattgatcctgtgaatcagttagcaaaacataactcaatggaaagataggcaaatgatacaaataagaaattcacaaaagaagaaatactaagtctctagtgatgagagaaatgtaaattaaaatgaaacatgtttgttcatcaagttgtcacaagttagacaatcatatccaatatttttaaaggttgtaagactataaggaaatagccactgtcatatcatttttaaaggaatataaattatagggccttttgtttctttgggttttttttttttagagacaagatctctccgtgttgtctaggctggactcaaacttctggactcaagcaatcctcgcaacatcattaatagctgagagtagagacttgagccaccacacctgactatagggcctttttgaaaggaaaattgacatcatcaaaattttaaatatattcagtctatttctcaaaaactcaaagaatactaataaatgtgtactcaggtatatgtacagaaattgctgtaacattataattttaaacaatttaaaacagactgagtttccaaagttagggtacaatgaaagaaaaggtggcttatttatactctggaatattttccaagagttgaaaaggatgaggatacacacacacacacacacacacacacacacacacacacacacacacagtttgggtatccctaatccagaaattcaaatgctccaaagtccaaaactttctgacccaccaacatgactgatgctcaaaggaaatggccactggaagatttcagattttcagatttggagtgctcaaccagtaagtatataatgcaaataatccaaaatacaaaaaaaaaaaaaaagaaatctgaaacacttctgatcccaagcatttcagaaaacggatgttcatttgtgtgtgtgtgtgtgtgtaagcaggtgttgctagaaattcacttatatacaagaaaactttttgtgtacatatttgcatatatatgtacaaatgggtagaaacgatacatgattaatcttaatcgggaaggaaaagagatttagggaaggaagcagtaagtgagaacttttattctatttactcctgcacgtttaaatattgtttacagtgagtatatcaacatgtaagtgttaaaagacaataagctactagtgatttttaatataaaattaactataaaatattttaaatattagcaaataatatagcacactcatgaacctaattcccacatttgatagttgttacattttgccatgtttgtttaaaggtctaagtcataaaatcttataaagctaaaccccacccttctctttctcctctctctccaggataattactgttttatagtttgtggatatcattcccttacttgtgtttatacttttaccaagtgtgtatgtattcaaaaaacagttgttttgtgattttaaaatgtaaatgaatggcgttatgctccatgtattctgcaacttttcatcatacattaggttttggcgatttagccataatttggcatgaattcaggtcttttaagttttattccattgtaagaataaacaagtttgttcattcatgtctccattgatgagtgatagtattgtctccagtttttttatgttgcaaaccaatttgcaaaaaactctggcacatagatttttacacccaagaaaaagtttacctggacatacaccaaggagcagaactgttgagtcctagcgtatgtgcatattcagcttttccagaaatttctaaattgctctttaaaatagttgtaccagtttacattccaatcgacagtgtgtgaaaggtcccatttccccacatcctcactgttatgtatgatttttctcattgtcaaactaatggatataaaatggtatattgttttaatttgcatttcttaattactggggaggcagatcatcttgtcatatgtttattggccattatggtttcccattatgaatgtgtgtctctatcttttgtcctcttttctctgttgggttgtctggctttttctaaccaatcctttatatattctggatactagtcctttgttaattatctttttccaatatgtggcttgtcttttagtttatgataaacttgactgggctaagggatgcccatatagctggtaaatattatttctgtggtgtctgtgagggtgtttctagaagagattagcatttcacttggtagtctcagtaaagaatgtcactctcaccaatgtgggtgggcatcatccaagtttttgaagtccagactagaatcaaacggatgaggaaggtcaaatttgctctctctgcttgaactaagacatctatctactgatatcactgctcctggttctcaggctttcaggctaagaccaggacttacactgtcagctcccagttctcaggcctttggactcaagctaaattatgccaccagttttcctggttcttcaacttgcacatggaagactgttaaacttcttagcgtctataactgtgtgagccaatagctttaatggatttcctctatcagtcaatacataggtataaatatacatatatcctattgattctctttctctggagaccttgactaataactatgttgaaaacagagtaggtttgttaagacagaggagttctggacatgtcttgattgagatgtttatcagatatcgaagtggagatgttaaaaggacattggatataacatctggagttcagtacgtgatctgagctggagatataaatttcagatttattagcatagataaaatacttaaaatcatgacattgggtgatatcatcaacaatctattatagataagaagaaaggtcaaaaattaggtcctggggtgctctgatgttaacagattaagggaacaaggagcaacaaacacaagagacagaaaaggtaaggtaaggatgaatgaaagataggattaaaacgaggagaatatagagcaaaagttggcaaactatagctcacagagaccaaatctgacttgctgccttttatttgtttacatattgtctatggctgttttcacactgtagtcagtacaggcagagctgagtaattgcaaaagagattataaggtcctcaaagtttagagttgctatctggccctttacagaaaaagttggctaatctctggtatagagtcctggaaaccaagtttcattgaagaggaaatgataccctttgccaaatgctactgagaggccaagtaagatttagattaaaacttgcctgttggatttagcaacatggaggtaactgatgactttggcaagacagtttcagtgaaacaactggagagactctgaaggctcatgttgattttcccccaaattaatctctacattgactgtaattgcaattaaaattccagtaagatttaaggaactagtaaaactcaaaaatgtatgaggaataataaaggtccataaatagctaaatcagtcataacaaagattaaaattaggtctccatatccaaaaaaactttaatccatacctcataccatacccaaaaattaaataaaaatcaatatttagaactaaatgtaaaacctatgtgaacccccaaaatttgagacaggtctcagttaatttaaaaagtttattttgccaaggttgaggatgcatgctcatgacacagcctcaggaagtcctgatgctatgtgcccaaggtagtcaggacaaaacttggttttatacattttagggagacatgagacatcaatccatgagagacaaaggcagcattcttttgagtttctgattagcctttccaaaagaggcaatcagatatgcatttatctgagtgagcagagggatgactttgaataggatgggaggcaggtttgccctaagcagttcccagcttgaattttcgctttagcttagtgattttggaggcctaagatattttcctttcacacctaaaactacaaaactgcttgaagtaaacgagaaaaatctttgtgaccttttttaggaaaagattttttagatacaatgctaaaagcataatatatttttaaaaaactgaacttcataaaaatcttttgctctgtaaaagtaactattaagagaatgaaaatgcaagccacagactttgagaaaatatttataaattgtgtatctgataacttttacccacaatatataaagaactttcaataataagaaaacaacccaattttaaaaatagataaatatttgaacagacacttcctccaaaaagatacttaagtggaaaataagcatatgaaaagttgttcaacatcattagtcactggaaattaaaaattacaatgaaatactactatatacctattagaatggccaatattagaatggctgaccataccaaatgttggcaagtcttatgcctcagcctccttagtagctgggattacaggcatatgtcaccacacctggctaatttttgtatttttagtagagatgggtttcaccatattgtccagactcatctcaaactcctgacctcaagtgatccatctgcctcggcctcccaaagtgctcagattacacgcatgagccaccacgcccggcctggaattttcataaattggtgatgggaatgtaaaatagcagaacaactttggaaaactgttcaccttctttccttttttttttttttcttctgagacagagtcttgctttgtcacccaggctggagtgcagtggcacaatctcaggtcactgcaacctccaccttccgggtttaagcaattctcctaactcagcctcttgagtagttgggattacaggtgcatgccaccacaccaggctaatttttatttttatttttattttttgtatttttagtagagacagagtttcgccatgttggccaggctggtctcaaactcctgacctcatgatctgcccaccttggcctcctaaagtgctgggattacaggcgtaagtcaccgtgcccggctgttcagtttcttaaaaagttaaacacatacctcacatataatccaaattttctactcctagtatttacctaagaaaaatgaaataattttctatacaaagatttatttatagtagctttatttgaaatggccagaaactggaaacaacccaaatatcatcaacagatgaagggataaattgtgatatatccatacaaatccaaaccatggaatacttctgaggaataaaaagaaacggcagtagctacatgcaatgtcatggatgaatctcaagatatttatcctgagtgaaagaaaccagaccaaaaaagaaaggtgtatgtatattgtatgactcccatttatatgaaattttagaaactacaaactaattcatagtgttactggcaggtgccctggattcttgcaatcccccagtatagaaatcaagagagatcaccaaacatagcagcaaaggaaactttattcagcttgtgcacaagaagccagcaccatgaaagcaaaaggaatgggctgcctcctgagggtagcgtgtggattagttttaatgagtctctctctagggaagggttgggtcagggcatgtatgggagggttttttctagcacttgcacagtggctctacatgcttcttcatacatcctatgtagcattagcattttaaatcttcatgccctgggtgtgattgttagcactgaaatgaggaaggggtaactgtaggttggagatgatgtctaactgcacatgcagagccctggggaagtccctagctccctgagggaggaagttgtttttaacagtttcttaggcgttttgttactaattggctgagaggtaagctagcacttaagcttaaggggcttttgttcttttcctccagaccacattaaaacggaaccaacccgcctatctgtctcaacagtgacagaaagcagaacagtggtttccaagagatgagggcagggggacaggtgggtgagaggaattaaaaatgagcatgaggaaatttggagaggatgttatagtttggatatttgctaccctcaaatctcatgttgaaatgtaatcccattgttggaggtggggactggtaggaggtgtttggatcacaggcatggatccctcatgcatggcttagcaccatcaccttggtgatgagtgtgttctcgctctggtagttcatgagagacctagttgtttaaaacagcttggcacgtctccccatctctgttgctcctgctcttgccctgtgataagccggctccctcttcatcttctttcatgaggcctcatcagaagtggagcagatgctggtgtcatgcttgcacagcctgcagaatggtgagccaattaaacctcttttctttatgaattacccagcctcaggtattcccttatagcaacacaaacagactgatacagaggtgctggaggcaatttattttaacatatttgtcaatctccttaaatttagttccaccttgcttttaaccacttccttctgttagtcattaacttttcactttacactaaatgcttactaaaatataattacacattcaacattttctttgttcaccactgcttcttgaatccttcttcctttttgaattcaatttcctccttcttgaagtacattcttaatagttctttcagtgaaactgtccctaaaaatatttatcttcacccttactcctgaataatagtttggtatagaattccacataggctttattttcctttaacacttcacagataatattgcattatcttttaccctctcattttgctgctgaaaagtctattatctctttgcaaatccttttggctaatccaccttttctttatgattgcttgtaagatttttgtcttttctttggtattctaggtagaggttttatttttatttatcccactcaacacttggtctacttcatcttactgaggatttatgttgtgcatcaattctagaaatttctcatccattttcaaatactacctcacaaaaactctctagtctttttttgtgtgtgtgagatggattctcactctgttgcccaggctggagtgcagaggcgggatctcagctcactgcaacctctgcctcccagttcaagtgattcccctgcctcagcctcctgagtagctgggactacaggtgtgcaccatcacgcccagctaatttgtgtatttttagtagagatgaggttttgccatgtaggctaggccatcttgaattcctgatctcaagtgatccgccctcctcggcctcccaaagtgctgggattacagatgtgagccaccgcgccctgccatctctattctttcatacaagaattcttgttagacacctctcattgtgcttcattctggttaatttacttaatttcacaaatttggtacctgctgtaattcactactctcctcagttgtgtctaatcagctgtttatccaccccatgtatttctcatttaatttcataaatctcatt

SEQ ID NO: 2801 - DNA, 2278 bp, Homo sapiens
ctctgcggctcctcgcgattttaccagttcccatccgtttagcaaacgcctttagcaaacgcccgtttagcaaacgcctcctccgtcctttggaggagggcggggctaaaagggagatgctgcctagtgattcgttgtggcgcattagtaacgcgactacagggggctggaaacagttcagtctttgattggttgctgagaggcggggctactcgactgctctggaggtagcggccgcggtgaggagagccatgggacgggcagtcaaggttttacagctctttaaaacactgcacaggaccagacaacaagtttttaaaaatgatgccagagcattagaagcagccagaataaagataaatgaagaattcaaaaataataaaagtgaaacttcttctaagaaaatagaagagctaatgaaaataggttctgatgttgaattattactcagaacatctgttatacaaggtattcacacagaccacaatacactgaaactggtccctaggaaagaccttcttgtagaaaatgtgccatattgtgatgcaccaactcagaagcaatgagttttctagaatacaacaagtctttgtactttttaactttaaaatctacaactctggcaaaagtcctggaaatgcagacattttccctgaactggcatattgaaaatgaatgaattacagaatagcttcatatttaaatttcatgttaaaaggtcattactgagaactaaagaacataattaagtatttctaaaggaaattagataagaaaacatttcattttcattgaaaatcaaatttcataaagcaaagtaaatgcttagggagatatattcaatctttgaccttgatgagtatttgatcttaccatagctatttgagaatgtggtgcttttacaaattggtgagttttcctgccatgtgaaatgcaattattacatttaaattgttagattaaaatgatatttagtcctgaaaaatattaaattggtcaaaaaaatcacagtgtatgccagctctctacagaaagtggcctttgttttctaaagcactgggattatttctgtagctaatatataattgtacagtttctttttagagatagagagtatctctgtgttcttatgaagacattttttatcagttttctgaaaatagatgaataaaatattatagtcacctagggtcactatggaataaagaaatcctagtttaaagaggaaatagtggcccttgatcaaactatttaatatggccttagtagaattagctgtatttagacaaagttagactttagtgtgaaatgtaatcggtggctacattctcatcgttttaattaatgaaacttaaatggcttctcttcttccacatgtcctgtccttgacaagatgggcagtatcacaaaaggtcctggcattctaccatctaacactaggaactgtaaaatactgtttaatattcttcttgtttctcttttatctgtgtatctttgccattctattttctcagtgaatagtatgttttctcccattcactgataaattctctcatttgatgatgatacagggtttttaatttttgcaagattctcaatgcaagcattgttatgtatctagaaattatacctagagaaaaatgaaagtcgtttcaaatttgaaatttgcccttttaagagaatgctgaatgtcatcgcagtatataatcactatataaatgtgctgacttacagttattttagtgtctatatgacatattttgaggaaagttggctgacgttatttaaatttaatatatattctatattttagtgttattgaatattttatcactgagcttttttctttaacctgaattccctgttccatttttcattcatattaatttaaataactccagatttctttcttatagtcattattagtagcagatgagattaataattcacatgtttattaaagatagtggcttagaaattttaagatatattgatataggcccgggcgctgtggctcacacctgtaatcccgcactttgggaggctgaggcgggcagatcacaaggtcaggagttcgagaccagcctggccaatgtggtgaaaccccatctctactaaaaacacaaaaattagccaggtatggtggcgggcgcctgtagtcccagctactcgggaggctgaggcaggaaaatcacttgaacccgggaggtggaggttgcagtgaactgagattgtgccactgcactccagcctgggggacagagtgagactctgtctc

SEQ ID NO: 2802 - protein, 104 aa, Homo sapiens
MGRAVKVLQLFKTLHRTRQQVFKNDARALEAARIKINEEFKNNKSETSSKKIEELMKIGSDVELLLRTSVIQGIHTDHNTLKLVPRKDLLVENVPYCDAPTQKQ

SEQ ID NO: 2803 - DNA, 237186 bp, Mus musculus
  misc_feature (1)...(237186): n = A, C, G or T/U
atgagccgcacgggccgccgtagtcagctgctacgagcaggaagtgtcccagctgcgggcggagactgcaccatggccccggacccctggtgagttgccggtgatggcagcagagtatggggattaacttgggggtggaactggcttccagggactggcagagaccctgcccatctttgagcttgaggctggcggccttagggatgaagatcagcgagaatcctccccctgttgaggggactcagccacgtactgcctactcggtgctaactctgtggtcctagggtaggctatgacctgggggagctgggacttgagcaatcgaatatttgccccccttttctggggcttcttgcccatcatgcttgtggctgactgcatgcatagacttccccaggctcctgtaaaagtgaggtcaaaataaccttttggtggggtatcccttcacccagtaatccccagaaaggttataaactgaagttcacactccatggtcaccagttagtagctagttgggcacgggtgctatgggcttttcacagaaaacttgtaggacattgggaggggaaattttgcacttttcctgcatcagtagcatgaagacttatgtcagcacgaagtaggaagtgcctgataaggtccatttattcagcaaagagaccccaaggagagaatgatgaaaaacatctttgtacaaggaacaaattgctataaagtcctgaccttcctgatgaataatttataacactgcattcctataaagtttgtgttggagaatatgccttatggtggtgtttccggtacaatttgtagttgtttgatggcagataaatttgaatattaagagagtggatcccaaggtcagaattagagttatctgggatctaggctatttgggccagttgctgaattgtttgttgttggtttgtttttcagtgtctcggggagcccaagttgatcttgaatccctgacccttttgcttcagtctccaaaatggtggctctgctaccaagcccagccaagtgctgaattttgtcctaaagttttaactattgtatacacccctggtagaaaattgagagactgctgagtatctgaagggagtaaaaagcacccctatccctcggaagcaatcagtgctcacctttttttccaatgcatttattgtttggatctatatcctgcttgtattttacaaagcagggagggagcatttctccatgtccttaaaaggtagtcttaaaaacatgatttttaatgtgtatcagtgcatcatctgagtgtacataacttatttcaaattttagcccggttgtagaacgattgtttagcacacgcaagacaccctgggtttggtccccagcaagaccagaaagctttcagctggcaaacgagaaagccgctgagtcaaacagttaagactaacagtaaaagagttgaaatgcttcagtgtcttgggtaaaattctcccgtaagtctgatctcattagacccccgtgccacgctgtgcagagaattgacttctgctcatctgtcctgcttgcactataccttcctcccaggaccaccgcgtggcagaacgtgccaggcatgctttcttctttcatctttgcttatgccatgtgccttccacagtgcttagactcggctcctccttcccatagggaaatctgctttagtcttgtttagagtcggcccaaattgtcctcttgtggcccagcccgtacgagtgcctctctcatcagtcatctctcctttccccagctctagaggcacttaagttaggtcccgttcctaagcaacaggatttagttacggggttttacatgtttgatgtgccgtcacagagctggactgaagctcctgtcttcatagattatttacttattgcatggaggcagtaagtaaagtgtggggaagctggggctaggacttatttttttattattctgatgtttttttttttaaacacctgctctttttcatgcacacctataccagattatactgaatgattcatatggctgtatacatgaatctaggcttaggggttgccacagcctctgaagtgcttgtggagttcacaacacaaagttctctgtataggacctggagccgcatccccagcccaagctagacacttcagtggctgagcctagtgcattgcgcaagctatagacaaatgcttccccatccatctgtgcccttagtaacgcccagccccttttctttaaagttggagactgatctctaagttttacccaggcagcttctagctgactaacgttgaagttacaagtcccttgtctcagcctcaagtagctgaggttataagctactacttccagtgctggaatattttagagacataagctagttattttcttatgggtaaagctgggacatcagggcaaacagaagttttcaatattttgcaatgggcagtcctagagaatacatcattcacttgagcacatgagttcccacttcttaggagcagactggtgtgagagatgagaccagaatttaaaatgctgtgaagaggaaaacacagggtgctgttgggtgttgacttgaatttttttcttttgaagatttattaatttattttatgtatgtgagtacactgtcactctcttcagacacaccagaagggggcattggatcccatcacagatggctgtgagccaccatgtgattgctgggaattgaattcaggacctctggaagagcagtcagtgctcttacctgccgagctctgaatctttttttttttttaatttatttttattttaagtgtgtgggtgttttgcctacacgcatgtgtgggtgtcatgtgcttgcctggcaactttcatgggctagaagagggtatgagacaattctgaactgccatgtgggacctgagaattgaacccaggtcctcaggaagagcatcagtgctcttaaccgctgagccagcccctgatttagcttttcatttgaatctttccaagcccaacactgttgagcagcaagtggaaagccagtcagcgttctgagagaactgtggcaggctgaggagtctgccaggctctcctgtcagagcggttttttttttttttttgctgcagatacacagttcctgctgtccctgcagtgtgcttctgcacgtcacttctcatctttcctctgtgtctcctgccctgaaacagtgtctccttgtcactgtgttcttttagaccaggctggcctcgcactccttcctccacctttgcaatgctaggattaaaggcatgcaataccacactcagccagcactttcttttaaagaactttaacctgactttgactttgatgcaggttctccacatacgattctacgtgtcagatagcccaagaaatcgctgagaagattcaagaacgaaatcagtgtgaaagaagaggtgaaaagacaccgaaggtaatacatggaggaatcaacgtgctaagctccgatgtctgaaaccattgctagatctggggcatgcggggcgttgtggggtggtgtgtatgtgtgtgtaagtcttttaaatctttgaaatgtgttttcatatgttgtagcgaattttactttttttgccactccccggagatataaaatcctctatatttcattcactgactttatatagctgctgttcttcatacttttgatagccactggcatcacactccatagagttcacacctttggcagctgctggcaccctacccttgggtgtgtgtgtgtgtgtgtgtgcatgcacctgtatgtacttgtgtgcatgtggaggccagaagttgttttgtcactttccaccttgtccttttgagactgggtttgccattgaatcaggtgtttaccaacttagtcagactggccagttagctccaggctgccgtgcctgacttttgcctcctgtgtggcctgctggggatgaaacacagatccccaagagtgtgcagcaagccggttcccaagccctcccctagccccctgtgttttgtttataataactccttatccaattgtgtgggctacatagggagatcttatctcaacaccaaacaggttaagcagcaaaccaaagaaataaatgcagtacccagtcatgtgcacactatgataggcacaggcactcccctttattttgcataaatatcatttgtcttattttcattctctttttccccttcagggtaattttacttgtttgttcattcattcgtttgtttgtttgtttgcttgcttgtttttgagtcagggtctcgctgtgtagcccagggtgccttggaatcactgtgtagtccaggctagacttacaccatgatctcatctcctgagcctaagattacagatgtttgtcattttataggtaattttataaaatgtcactaaaaaaaaattgcactgtatcttaattatcaataacaagattccaaatggattttaaatagacaggtagtgggtttgtggattaagtaaaggggcggggtcaggttttcagtagtgctagtgcttccttttgatccactctaagcgcagcgtttactacgtagttactgtgtgcccactaccagtttacaaatattccttcagattttgttgatattattttatgtttttaattaattaattaattaattaattaagagacaggctgtcatacacccaggctgtgcttctgtagttcaggctggtcttgggctccttatcctcctacttccaccttctgagtgctggcatagtaggtctgagccaccatacctggcttgatcactctactgaattgactttgtgcgtgtgtgtgcacacacgcagtatatgtacttgtttatgtgtgtatatacacgtgtgtgtctccgtgtgaaggccagaggttaaggatgggtgctttcttgattgctgggtagtttttttgtcttattgttgttgttcttgttattgtttgcttgtggggtttttgtttgcttgtctgttttgttttgagacagcatctctcattgaacttggaacttaaccaatttgggtagaccagatggctagtgagccccatcgatgctcccatccccatatcctcagtgctgggatcatcagcgtgcctggcctttttacatgggtgcttggacctcaaactcgggtcttcgtgcttgcatagcaagcactctcctgacagaaccatctccccagccccgaactgattctctttcactttctcaaggggattattctccatctgcaagtaatactttagtttcctttgagcccttagtatttcctgagtcttgatctgttagtaagaacttctagatcacagctgagtgatactgttcagacagtgtcgtctaaatttccctacactgtgttaatcatatgcttattctgtttttaatctttgacactgcgagctttctttttagggttctaccactaagccagtcttaccttgcaagataaaattgtacttcatggtagcatcttgtccttttcaatgtagttctgagttttctgatagttcactagcgttttgtcatccttgagtgggaatggcatgcaggagtttttgtttgttttgttttttcagttatttaagtcagtggttttgcttcttttttgtatattctgaaatttctgctttattacaactaaggaagttttctcttgattattaaatattattttcttataaaattttaagagatcttactacggaatgctcccctatggcatcacagtgcagttggtttctgggctattttctttttgggtgacatttcattttatgacttgatttaaaatttgtaaaattacatttgtttgagtgtgcgagtatgtgtgtgtgtgtgtgtgttgtgtgttgtaccctttggatagagtttgtggtgtgtgtgtcctacttctccctgagctatatagctgctactttgttgttgtttgttgagtgagggtctcactggaagcctttgctggcctggaccatgctgacctttaactctttcttagagatcctctcacctcctcagagctgggattataggcgcgccccaactcgcaccctaacatgccccaagtaactgctacttttagcaagcagcagtgagaacagtggcattctgcctttttaatattcctctctgatttcatccatggtccaatatgttttcatttaaatgggtccttttgttcttcacatttccaaatgtcagagtggggctctccccaccccttcttcatctttagagtcacaaacagacatgtcctctgggttttgaggatgattggagaaaattcccacagttgtagaagaagagccatgcatggttaacattcctttcatggaaacagagcacgcactctccagtgttcacatgggctataaatacaccagagtgctcagagaccagtcaggatggtaatgggacctgacaccttgtcatctgaagtatggttgagggaactgttgggctttgcttttgagcatagactgggggaacacaatttcctgcatggctccagggtggataaaatacagtgaattttacagaagaattccagttgagtatgaatgcaggctgacagtttccactcagtatctgcgttcccgtgtggaccaggttgccatgaacaggcaggtgcactatgggtacaagctccaggtgggtggctagaccaggatgccattgagacctttacaaccctgagagtgtccttgggaggccaagcctctctcccaggcctttttaacttagcagatgctacaccgcaggcccagtggactcaggctgtgtccttctctttgcagcttaccttgacaatcagaacgttgttgaagaatctgaaggtaaagatcgaccttttgaaggacttactgctaagagctgtgtcgacacgccagatgtatccatgtaaacatttccaccttttctggagtgggaggaaaaacaatcttaagacaggaaggaatctgggccatccagatttttccacagctcaaggaggacttggtttccacactgttgctataattttacattctgtcttaagtgtctgctcactgttacagtgactgtgctagcaagggacgacctacctaaggaatgaatttgtttgggtataaccttgacaggcaggaagctaatgctttctgtcagtgctttgtggagctgcacactgctctctgtcactgccttgaggatggctggatgctgctccaaccagaggacttccatgacacttctgagcggtggttccctgctggacgttgcagaacatttcccccccttttctcagtagcccaagcaggactcagattcactttgtagccaaacctctgccctcacatcctgagaactcaggtaaaggcatactccggtgcacccagttttgtgtggtgctggggatggcatcaggactctgcatgctagccaaatgctcccccgactgagcagtctctcattccttgggatgtcttgtaatctgcttcgtgcccaataacatcctttttgctttttaaaatttcagccataggctggagaggtatgacttgcctgtctcattctttcagggacacaggtaaatgtccctagtttgggagctttgggggtagagtgtgttgggacttgattaaggcaagctgggtcatctgatcctcttttgtgagccgggtggttgtacacatctgtgatcccagcactgaagagtgaggcggggtagagcgttaaaagccagcctgggctacatagtaagtttgaggccaggctaggctctatgatgaggcacccttccccaccccaccctgtctcaaagcaaacattttttaaaagaaattcacgatgtaacctgctactaaactaattcttcaaacctagtttatattgaagtgaaaactgaccccacatttgtttttctttaaattgtctgtagttcaggccaaaaatatgactcttggtagcagaggaaactgtgtgtcctggccttaaatgtggggaaacgtaggaatacaacttttttttgacaaaaccattgaaggtgtttcaaaaatacattttctcctaaaggaacccttttgtgttagcaggatggttggcatgacttagttgcatggttttccgtatgtttaattattaatcttctgaagtttcaaataaaagtctaattttagtaaacaatgggggccttctttcaaacccaattgaaatattctggcatgtaattttaccctctgcctggtatcatttggtgctgccctgttagtctgttacataaagagcttttattttaccccaatcaacaggttttaatccacagaccttgagtggtttctgatgggtggggctggctcctcttctttcagaagtaagcgctgggaagtttgcacctatgtctaaggtagaggactcattttagtgtaaccagcagcatattcatcagaaaggtagctagatactgtctcatggctgttagtacctgtttgctaacttctaggaagataattattgtgctgcactttatttatatatatgctaaccctgtagagcaagagacatataaaattcaagaactctaggtcctgtccctagtccctggtagacagtaaagagcgagcactcagtgtgtaattgccttcatttttgttgacaccttttagtctggtcagctgttgtaatggacttttggttttgttttgacctcataatgagatcctacatgtcacatatttatgttatgattcataacagcagcgaaatcacagttaggaaggaccaatgaaatagtttcatggctgggggtcaccaccacatgaggaactatgttaaaggttgcagcatgaggaaggttgagaattactaaattaaaacattagcaaagcttgagggactatgaatatgaatgatttcatatctcctggggtggggggaaggaaacctcaactggattataaaagctttttaaaataatctttttttcttttttccttcaagtaattgcgttttgctggtagaggtgacatttggatcatacaccacacgggggtgctcttaaacctgttttcagggaagccccctcctttttttttttttttttttttttttttttttttttcttctagactggaaaaggaggtggtgaattcaataaacttcttttgttagcttgtttgatgctagagattgaacctagagtcctagacctgctaggcatgtattctacagctccagccccaggtagcatcttccgtttcttcaacatcattcctcttaaaacatttttactaattcaggctttcctccagatttaagccacttgtcagtgctagttacttcatatgcttggtcttggtgatttctttccttctttataaaaaaaggtgacgtggtcagatcaaccttgggacctcatgtcacagaaaataggtgaagagatcccaacatcacagcagggagttttatagagagaggactcctggataagccaggatctttcccaggaccctacagctatatatacaggagtcaggttcaaatatgtgactatctggctccaagtccattgttttaagctgaattctcctttagtagatagaatatagtcacaggtaacctggcgtgtcttggactcaaattttctattaactgtatgttgctgtcacacagattctcaaggaccttcttagtcactgaagtgttaagcacccgtcactgtggcctgttagttacatcttatcatgatctttagtttaaaaaatggctgtaaatctctgatagaatggctctttaaaaatcattttaattttatttgtatattgtgattgtgtgtgtatgtgcttttgtgtgcacagtacctgagaaagccagaaagggtgttggagttacaggcagttgtgagctgttcagtgtgggtgaactcgtgtcctgtaggagaacagccagtgctcataaccgtgaagctgtctctccagaccacacagggcaacttctaattactgtcctagggagcaattagtgttgagtgacttttatttctgaggcagggtctcactgtgtaattcttcctagcctgaagcttgcttatgtagaccaggctctcctgggactcagaggttggcctgcctctgcctgcctgagtgttgagattaaggtgaacaccagcctacccggcactgggtgactttttaaatgcgaatctttgaacagcacatctccttactgagctgaataattgagaattgatgggactttcctgaacatgtttacatctccctgtcttcatgaagttgtccaaaaactactgggaggtaccagaaagagaagttcttttctagacactcagattcatgagtgtggacttgagatgtcacattctttcctgaaaggtggttttgttttgtctttttcaaaggaaagcggtgtgctttgactccattagcatgtaattaataagacagagtcctgcggagtgctcagatctgctggatacatttctaaaatagttcactaatgtctctgatacagggtctcatcctgtatcccaggctaggcaatcctgctacttctcagccttttaagtgccaggattatggatgcgagccaccgtgcatggatacagaaagcattcacttgtatttctagcttttctgtgatagtcattttagttgcctcactgggttgcaggactacactgtgctggggggggggggctccatgtagatttcacatcatactcaaaatattctcagctggcttttcaggggcttcctcctttgttagcttttcaaaaccagcacctgtaccttttgtgagtgttagctggtcctgggaactgaactcaggtcctctggaagagcagctcttgactgctgagccaactttctagccccatcctttacctttttttttttttttttttctttttttaaaggcaaaaacagtctctttacaaaaggattcatatcagaggtattttgatgccttcagagagggcctgtgcagatagggtttttttgtttgtttgtttttgttttttaaagaaatctcttactggtcctcaactctgagttttaggaacagtgatgggtgagaagatgtggtaaccactgtatagttagtggaatggctgcagccctggggaggtgtggagattctagaaacatcatcgctggagcggcaacagagatgaaattctccaacactgactctctttgacagagttttcagtggtatctgggaatgtgggaaaaataagacatggtgcttgtgtttggagaagcttcatcaattatagtctgtcactagatctctttataggttttggtattaaaatcttgttattattttccacagtagtaggtagttttggttgctattgatttttgtctttgaatctccaatccatacatgggcaaatgtacgattggtagctgcttgcccatgtccctagcttggaagtctggcaccttggtgctgtgggatcaacactgacttggagaccacccagggctgagggtgaagggcagccctatcactcgaggccagagagttcagccttccctggcttgagttgcattatctacgaggtggaactaatcctgttttgggaaatagaagaagcacttttgaagtgcctcatgggattagcccccttccatcattgagatagtcaccaggctgtggaaggggctcagcaagtaagggcacttgccaccaacccagatggcctgagcttgaccctgtatcttccacactagttgtgcaacatacacacaaataatgaagtgtaaaaagaaggtactcaccagtagtaatcaggacagcctaacctcctacctagtgcctcgctgaatttgataatgtaaagaatccaggtgaggggctacagggatgctcgctggttcagagcacttgttgcccttgcagaggacccgggttcgttcccagcactcacatggtggatccagttccagggatccagtgtcttcttctgacctccaagggcaccaggcacgcatgtggtacacacatgcaggcaaaacggttcatacacataaaataaatctaaaaaagagctttttttttttttttttttaaagtgagctatgaaaaactgagctgtgttctcaggcttctctgttaaggcatggaggggcgatcggaggcttccttctccagtggagctcagttcccaagataaagactacagtcttaactctttaaaattacagttttactttgtgtgtgtatgtacggaggcctctccttccactctgagggtcgcagtgactgaaatgacacccccacgctctgcaacaggcacctttaacaactgagccatctcgaaaccccaaggctaaataccagaggttgccaaaaaattaagtcctaggaaaatactttctaacagctttttctgcatgtgttgagctccccgaaggattacccgtaggggcagtgctctgtcagggacagcagagaagctgggctttggcacagaggtagggattggtcctacaggatcagacctcacgatcagacctcacgtctccacagctttgccaggctacatgaaaatatcaatggtgccgagggcaaagggccagttagtgtagacgtcctcctgttcctctgttctctgactttgcttgttattcccaagttagtaggagaggaggctcccggcaccagcccccagccgggtcctctgttcttcttacctttcttagccttaggcacagcttgtctgcacctcctcactctccagctatcatccacacgtccacatacatgcagtgtacatcagagatggcacagttctgcagtctcctgtcacttccccttcatctgtctccttgggggtctgttgtttccgtgtactagtataatataaatgaaatataaacggaagaggcagtgtgggtaattgtgtagttttccaagctttagcaggagcctctagagatactgagttggcgtattaggctgtgttccttatcgaaaataagtgggaccagaagtatttcagatataggaatatttatatgtacatgatgagacatttctgatggggacgcaggtgtaaatataaaatgtgcatttacacatagcctagtgttaattttatagactatttaaaataattttgtgcacaaatccaagtttcacattatgaaaattttcacctacagtatcatgaggaagtgctcagaagctaacaaatttcagagcacttgagattttagattccggggttagagatgcccctgctgtactggtattgttttaaacaggattgaaacagtgggcagtgctggctgccctggggtggagaaagcccagggtgtttagtgtccagcaagcatgcaggaggaagccctggcagagtagaaagagctgggctttagcctatacagcttattcatgctggttctctatttcctaccagagaaacagtgagaactaggggatccatagggcacctctagtgtcaggcatcttcagtcctgatctgcagaccctgttacccgctcactcgtgctgcctctcacagtggtcccaagtgctggctcattccaaacattgctttaaacctgtaacttgcattcattacatttatttcatttcagaacatacctttaaagtttttatagcataaaaatattttctactaatacgtttcttcttcttttttttttttaaccaagaactcctttttctcccacaatgacatcctgtcccatctcattcttcatcacaaacaatgtgaatggttgtggtttatcatcgcagattttctaggcaggaaatacatatacatacacatacatacatacatttatacatacatacatacatacatacatacatacatacatacatacatataaatacgaaattcttccggcagtaaagggctcaccttgtaatgtgttccttgatcttttgtttccttttagcacatacaccatggtcgtgcacgtgcacacagatgaaaaagccaatgattcaaaacattatttattactgtttacaccttggttgccagttctctttccttagaggcacttttttttttacaggcttataaagtattttctacacacacacacacacacacacacacacacatacacacaccataccacatacataccacacacacgcatgcacacagactcaaacaaacacacacacacacacacacgcatgcacacatacacacacataccacacaccacacacatcacacacacacacacacacacacacacacacaaacctctgcctggtctttatgagaacgttaactgtccaacggttagcttgttgctgtagctgcgtctctcctccctccatttctcttgagcactgtgcgttttagagcttattccatgaaaaccgattccagtgtgcccttgtgtatacccagagttgtcagtcaccaccaccagcaccctgtaagcagcttccttttcaacctgaaatcattgccatcggggccttagttccttactcgtgaatattcaggatgcttccagaatttgctgaaataattttgcagtggacttctgtgctctcgagttgtcgaatttgcatacatgagtggatctgtgggaatgttgacgtcttgctaggctcacagaaggcagcctggcagttggttaagcccattggcatgcccctaaagaaggtaggcacgtgcctggctcctgagtcctctcctggcctcttgtcagttttctaccctgataggtaagggaggggtcttggaattggtgcttcttttagtcacaggcacctggttcctgctagaggctttagtgcccgctggctttgtcctgttatggcctttgcctcccttttgtcattagaagttttattttaagaactcttatgtgattggactgaggtgatgactcagtggacaaagtgcttgcttgcattgcaagcttgggaatttgagttcagaccccccccagccctcacacaaaagcctggcacagtctagtcagtcagcagtctctgggttccatgtgaggccctgcctcaaaaatgaagacacctggtcgccctgtgtgcatgaactattcatacaggggaacaacacacatgcatgcatgtatgtgagtggacacgcacgcatgcttgcacgcaccatgttttaggtagtcaatgtctccaaggcttttactcactatctgtagattttcatcccttcctggaaagatttttctcattcaagattattaaaacatttgtctatgcattattctaatagtgcttatacaattttgtcttttaatgttttaagttccagaaccactggaattggtgcataattttaacactgagttttgttgagcgaatgtccaatgtatgtttcttgggtggttagatgataagatctctatagaatgacaggtcggcagggcagggtgggtgaaccgagcatgtagggaaggctagctgatattgggaagtgaccaatagccccacaatctaggagttccactctgccttgttctgtataattcttgtcacagcttctgtttttctccctgccccatcacccaaggaacattgtttaaattgactaaaaggtttctgctttattggtagtttatcattaacttgaaagacatagatacttcttcttggttggcactgatcagaagactaatatctggcccttttcttttattacagaagaagaatatctggggtttctgtttcttagttacagttgcaacactgtggtttccaagctgggtacgtggtgactgccgtcagcaggagatggaaaagtaatgggagtgatttgaagtgatttgacccagggatgtgtggcgcactggaatgctgagagaatccatttattgttatttttaatatggagagtaactgtggtgcaaagactaaggtttaggagatttatgatttttctaataacttcgttattgagggagactttttttttttttttttggccggggtctgtttactgttcctactagctagccagcactcctctgtacaaaattaacagcagaacttgtggatccatgagccgtgtatttccctcccaggcagtagtgatgctattccttggttctgccgagctctcagaaatctttggggcctgaacactatgttttatgacccctttaaattttttcctattactttatgtatttgtatatgtactgtgcgcctgtgtgggcacactcatgctgtggtgtgtgtgcgcctgtgtgggcacactcctcatgctgtggtgtgtgtgcctgtgtgggcacactcatgctgtggtgtgtatgcctgtgtgggcacactcatgttgtggtgtgtgtgcctatgtgggcacactcatgctgtggtgtgtgtgcctgtgtgggcacactcatgctgtggtgtgtgtgttgagagaatcagttctcttctactatatgggttcctgcactcaaactgaggtcctcaggcttggtggcaagcaccgtccccggtgaaccagctcaccagcccctcatgatcccgttttacaaagaaaagaatctgtaacccgaagcagccatctttcatgctttctgttgttgccagaattggtattagtggccagccctgcttctcatgccagccttcaggtctgatgaaacagccatttggtttagaaagaaagaaagaaagaaagagagagagagagagaggtgggggagggagggagggagggagggaggaaaggaaggaaggaaggaaggaaggannnnnnnnnnnnnnnnnnnnnnnnnnnnnnnnnnnnnnnnnnnnnnnnnnnnnnnnnnnnnnnnnnnnnnnnnnnnnnnnnnnnnnnnnnnnnnnnnnnnnnnnnnnnnnnnnnnnnnnnnnnnnnnnnnnnnnnnnnnnnnnnnnnnnnnnnnnnnnnnnnnnnnnnnnnnnnnnnnnnnnnnnnnnnnnnnnnnnnnnnnnnnnnnnnnnnnnnnnnnnnnnnnnnnnnnnnnnnnnnnnnnnnnnnnnnnnnnnnnnnnnnnnnnnnnnnnnnnnnnnnnnnnnnnnnnnnnnnnnnnnnnnnnnnnnnnnnnnnnnnnnnnnnnnnnnnnnnnnnnnnnnnnnnnnnnnnnnnnnnnnnnnnnncaccccccacctcccaccagtgctaggggttacaggtgtgcactgccctgggatccacactcaagaactcaggcttgagggcagcagttaatcggctgtgcccctcctcagcgccggttcagtgaacccacagaacttagcatctaatgtttggtctcaagaaagctagaatgtaaacccttggttggtcacagttcacacgcctgtaactctacactcaggaagctgatcaggagtgggagaccagcttgggctacacagtaagctgtgtctcagaaagacaaacacaagaggaactttgggttcggggcagagggtgtggcttggcagtaaatctgatggctctggagtcaagtcccaggaccaaaaatctactgaaaggtgttaagtgttcaggagttccgtataaagaaccacccacacctcagtaggtagcattaggaccctcgtcggccacgtttacatgtcagctacagcttgtttgtagtttcccacaaagatcccatggtacttttaactactgagctgacagcacagtgttgcacaaaagcaaccttcaggaagcttctatctgagctattatgtgcactggagatacctccccctttccaaaccgtaggctttgcaggaagggtgttttgagtttgtttttgcactgctaggaattatcccgtccccatcttagggtattgatgagtatgcagacaccctcgaaagctaactcctgtagtttaagcctaaggctccagactgcccttgtagactgttctctggcaaaagaaggaaacagacaaacccagtttttacctagtatactctttagtgataggactcaaatagtgatctcggtcagtatctgcattatccatttgcatcagtacagtcatggtcatttacctgaaggattctgggtaagggtagcggtgggtggagcctgtaatggttgcaggtgacttgggttaataaagtcctagggaaatgagctaagccacccactgttggaccttaacaactgaccgcagaacacaactggagggggatcgaagacagaacctgctggatgaccttgtcacccgagagagactgctcctggcatcgtttaagaatgagggtgcagagccggatctgatcaggtacgatgctttcatttacagggagacctgggctcctgaggacctatgtgctgttcctacaggaggaaacgagttcagaagagaaactactctccagtgttctagcaatgagtgatggtttctattctgcatggtttctgttctgtataaagtctacttgtttatagcatctgactgtattttcccactgagcttagttttcatgaattttcctggatttagtaagcctgatgtgttcagcttaagctcatgttaggtgaggcatacttatggagaatacaagccagaaattttcttttgccttctttgagttttctgcctggtaaactcttgaagttggctttttgaaaatggtgtcctgggcaaagtcgcagagagaggggcttccctggctggtttcctttccaggctctttgccagcctgtgatgggcactgcatatagctaacagcggccctgagcacagcctccattgctgcggccaatgaaggataagttgttgcatctttaggttggcctctccccgcttctggaacttacgttcatggttgggaatatcacagaaggaaacaggttcagaagagaaactgctctcctcgtcagcgctctaggactgagtgatggatccatcccggagttcagggaatcagctttctgcttagttctcaggcattttgtagtttcccaagggccactgccaggccccacctcaaacgatcgatccaagttggtgtgggtggcctcaggtggttgtcataaacagctaggcttgcaaaccactgtccttggacgagctggaggggaagcagcagttcattcctgttggttccacggttctctggtgcagttaagtcaagggtgtcagggagaatttgcaaaacatacaaaggtaggtgaagctaagtcatttttgtgaaggatgaaagctggggttagggaacatggagctgtgtcttgggcaaggttttaaaatgcaggcagaggcttgtggggccaacttactgagactccttagctctctctggccgtattccatcccgtacatgacaggttgaagtaagaggatgctgatcccgattggtgtgtcaaggcaggtgagcaggggaattcaaggtgagaacatgtcttccagtaagaacagggaagagaagaagctaacaggtcagatgtcgttgctcactcctgtaaccttggcacttgtgagaccaaggttcgctaggatatttaggccagcctggaccacagtgaggctctgtttcagaggaagaaggaggaagaggaggaggaagaggagaaggggaaggataaagaagggaggaagaagaggagaaagagaagaagagatgacaacaacaactttaaacaaggcagttggtgagaaatgtatatcccgggaaaatgacagccaagtggagagagaatgatcaaaagacaaggaaaggcttaaatcccccattgatggtggatttgatcatggaggatagtgaccctgaccatttggtcagaggctttgtgcaccagactgtagtcactgctctttatgaagtgccattcagtaatgccaaggggtcacctgaagagtgagaacctttgtggtttgggttttgtggtttctgctccatcttaccagtcttccatccctgcttttacagtctcggcatctctgtgtccctgtatctctcaccagttccagctgagcatcagtggcagcacctcggttgaaggttgagcgttcagaatcgcagctcccagcttgcagattagtggcagtgttttcacagggtcttgggtgatttggaaactactgctttgtacctccctgtcctcctccttttctgagccagggtctcactgcgtagacctagaacatctggaactctgtgtagaccaggttggacttgaactcacagaggtcctcttacctctgccttccagagtactagctttgcctaattcactcataactgtggcactttgcatcagagtcacccaagaggctcactgaaaacagaggaaagaaaagggggaaagtgccagcacctatctgcatgctcaccgagatctacgtggcagtgaggctggggaagctcctgtaggtagcaggctagagcctccgcgtcctgtcagagagtggcatgtactctgtttgctttctagacactggacactgctagctcagccgctctttacagcatcgcctttcagaaggacacaggaggggagtcagttctaaagtcaacctgttgggaaggttggggtttagatgtaaaatgtttttaaaaaagattttgtttgtttgtttgtttgttcgtttttcgagacagggtttctctgtgtatccttggctgtcctggaactcactttgtaaacctggctggccttgaactcagaaatctgcctgcctctgcctcccaagtgctgggattaaaggtgtgcatcaccacagcctggcttaaaaagatttattttctatactttctttctctctctttctctctctctctctttctctctctctctctttctctctctctctctctctctctctctctctctctctctctctgtgtgtatcatatatgtacatgtgtacaggtgtctttggaaaccaggggaatcagaggcagttggacttgaagttaatggtggtttcaagtcactgaatgtggatgataggaaccaatgggtcctctgcaagagcagcataggattacaaccactgagccatctctctagtccctagatatcaaattgtaacttttacataatagaaaggcctggaccaggcagcttactagtccctcagttatctggggttctagtttattgattttaaaactgggccatgttttgcccattttttgttattgttagaaccacatgatgtgattgcctttatgagctttgcaaacagtgaaataaatgtctttaaagatgtcatctctggagtgttgtgtctccgctgggtcaggggaagctcacactgctgccaggtgtgaggaccttctgtctcacctgtcacatgctctcctcaagcgacctgccatgtgccgccctggtaccacccaccctcccagctgtccccttccagtacccagtgtgctgcctgttgccttatcattacctgacagtcttctcttaggtctagctagaggatcaacgttgagtagtagcttatcatctgtgtatattttaatcaaagcttcctcaggtcctaggatttaaaccaaagccagtgactggatgggagaattttaggaaacttggcaggttcagagcaaaaggcagtcgtggtttcagttggaggcctgaggaccgtctctttgctgtcactagggctgcctcccactggtcctgtgtgttaaaggttgatccacctgcacccaaaacagctacatatcagtttgttggtaaatggttggggtgacttggggacagagaaaccagaccgagaataaactgaagtaatgcatgagttctggaagatcatgtaagatgatcatgtaagatcatgaagatcatgtaagatcactagcctaactcacctgcatttccccaagatagagagccaaagacaatgcgtgcacacacatgggcgcacgcagattttccttcagtaagcttccagagaagttgtgtttaagaagtacataagcacagttaaggagaggtgatggctgaggagagggggcctgtttcacagaacacgaaccctggcttatgtaagaaatcagtgggccaaataggagtcagtcaccatggaaacataaagaaggagaatgttagcggattattagaaggtgaattcctcagtttcttagcaaattgttgtgaggctagtgttggttagctcgattgtgcccatcctaacaggagtatatctatgtgtgcctggacaaaaagtgcaactctcatagtctaggaaagtgcagccagtaaggaaatgcatactagagagaaggtactccaaaatgctgctagggaggtccctgggtgctcagctgcagggtcatgggaatggactcccaggttggtggtcttgctctaactaggcagggagatggctcccttgctgatgcagaaaccttaagggtgggtcctgagtgagggaagggatgctgaggctgaaatttcttgctcctgcttgctttgtgaagcccatttccctcattcccagaagcctcctgtgcctttcctccactctcctctcctttcagacggagctgattagggagagaagcatctaggcaaacgtcagtttggattaacacttcctttaagcagacattaatgtgctgatcccatacttgaatgtgtagccctcatgtgacagagtcttcatcttacctcacagattacccgtcattattcaagagtggtaagcccacgtccaaataagcaatggttggctaatttaggtatttggacagttgtcaaagaagcctctgtgtgacagtgtcccttggaagatgataagcagtgacacagcttcggacttgaaagccagttgccctttgcattcagagcagtgctgagcctcgcaattagctagagctttgtaaagagaaagaagaatcattgcatactccagtgcgctgtgacggtctccaaggttaactggcctgtcgtgggtggctagctggctaagcttaacctcacaccactaaccatacagaggattatgggaaggggaagtcatttggagcttgtattcatagttttatgtcaggaggatgctaacaagttggcagcttgctagaatcaaacggtgatattgaaatgtcatattttcttgcaatagaatcactttaattttagatatacacttttctcttgatctactgaaaacatatagactacacagtatgtattttatgttactgtgtgggcagcctaagtatgtacaagaaaaattgcgttgtcttacattaaaaatataacctcaaaatgaacaaataaaaaaaaattaaattaaaaaaagagtatctaacccctcttgcagggcacgatggcccatgcctatagtcccagctactcaggggctgaggctggaggagtgctggaattcaggagttctgggctaagtatgttattccaatcaggtgtctgcactaagtctggcatcactatgatgtcctggtagtggggaccagttggttgcccaaggcataaactggctcagtttggaaaaatagaccctctctcatcttaaatcatggaatgttttatttcagtttaatggtttataagaaggatttgcactcaatagtgcctagatttcttaaagaatcatttatttatattttatagtactgatttttttttgttcgttttgttttttgagacagggtttctctgtatagccctggctgtcttagaactcactctgtagaccaggctagccttgaactcagaaacccgcctgcctctgcctcccaagtgctgggattaaaggcgtgcgccaccactgcccggctatagtactgatgttaacacaagaccactcttctatcagtaggcagttcattggctggctcagacagcgtgcaaacggaatatttatccatttaattgtacccagaaacatggtaacccttagcttttctgtaaaggtgtgctgacaccagtgaagcgctgtttttatctaatgagcccatggtaggtacgaaaggcagctaactaaacactgcgttccctggcaatgtaataaactgtggatatggatgcaagaatactgtgatagagtgcacagtgcctagtgtgtgtggccattgccatctctgcctctcaggatgtggcagcccgaagcccgcactgagagcacttgctctctgtaggatgtagtccccggaacacccatacagtgacatgacacataccatggcaggaagtagagtgaactctgcagaagagcaagtgcattgccctctgtgtcagtgtgagcctgtgtagtaggcgaggtcatgggacccagcacttgtcacttgccttttttttttttaatgtatttttgcttcttgatggaaattttaagtatcttgatgtcagggatcaaagactacacagtgcttaaagagtctctcctaaatgaaggagcacctctctacttctctgtgtctgtctccccaaagacctatcctacagctatagagtatacggagtatacagcaggcacacttgaacacagcacatttttgttgactgaaagccaatccaagatgtgataggacacttcaggaactaaacagctgggactgttaggtgtgcttatgcaaaagctttctctgcgactcagaggtccaggttgtctcatcacagggctgtgctgttgtaacacaggccatatatcctgtggatggggtagagagagaagtggggcactataccctcttaggtgatttgtcctgcaaatatcttaccctctgcccattgactggaggtggtcacattggctccaaccttcctgtgagggaagctggggactatgataccaaactggggctggggaagcatgtactctgtgcctctctggttcttttgagtaatttgataggtcagtaagagacagcacatcagactgcagaatacagaaccatttaagccaaacagcaccgggcaggcatggaaacacacacttgagccagtgagcagaatagagaatccggaagcaaagccacacagctgcagccgtctgagcctccacacggcagcaaagacagcctctttaacagatggcactgggaaaactggatacccacattttacagacagaaactagatgtctgactctcaccctgtacaaaaagcagtctatacatggagcaaaaactgtgcaagaccccaaagtctgagtcatctagaaaaacacatttcaagattggggcatagacagcactttataaataggactctaacagctcagaggatagtacaatttgacaagtggggaatgcctcaaaataggaggctgatggtagctgggagtgtggattagagtctgaaatcctgaagttcctagtacctaaatcaataaatggctcccacatacacaaggagactgatggtgcagtctacagaatgtcacagagccttgtggctttccttctgacagacatgtaaacatgaaagatccaacagacctgttcagagaaggccagatgaaccgatctaacacttttcaaaagtatgatgggttagcaaggtcacggagagtccaaagctctacaccctcagccatcagggatgcaactcaggttactaagattctgtcttaccctaatggctgccatctggaaaagaaacggcaacaaacaccggaaagagtgggagtaacgcctggcagaagctgttgtgggaaccattatagagtgcttcaaaaagaaaatcattatagaatgcctaaaaaaaaaaaaaaaagagtagacctagtatatgatccagcagtaccactccttaggattagacccagagggctggtgagatggctcagcggataagagcactgactgctctaccaaaggtcctgagttcaattcccaacaaccacatgaaggttcacaaccatctgtacagctacagcgtaccaataaacataaaaataaataaataaatcttttttttttaaaaaaaaaaggctgggtgtggtggcacatgcctttaatcccagcactcggaggcagaggcaggtggatttctgagtttgtggccagcctggtctacaaagtgagttccaggagagccagggctaaagagagaaaccctgtctcgaaaaaccgaaaaaaaaaaaaaaaaaaaggaatagacctagagggaccaaaaccatcatatactagatacttgcatccctgagtttaaaccagcaccatgcgtgatggctgtgcttgggaatcagcctaggtggtgatggaagagtagaaaatggatctaaatgctataagccataagaagaatgaaattaggctgtctataagaaaatgcagtcacacgtttgcatgtgagttcaggtgcccatggggggaataagttcggttatcatgcagttaggattctctcagccacagggaacagatggtactaccaagtctgcttaaagaaagcatccccatgaaggagaccccacattaaacgctggctaactcagctgcctggtgctgccctccgtccctacgctctcctcctctgccttgctcagagtggtcccttccgttcagtccgaagcctctcatggtttccagatggatgcagctgctattagctgcactccggccagagcattaggagaggcagaagatacttagcatgagtaaaatattcgggtagctaggaaatctgaaaagcatttaccaggattcagggaaagtcctcccgttttgaccctcacgcctacaaagtaattaatgtttttgcccatatccttctatgagtctctgaagattatagcaataaacatgagtatattctcttatagtccaccatctttcatacatactttatatatgattatatctcaagagatttttcccattcagatttgtagttgatattttagtataaagttattagtattaaattagtattgaattagtattaaattagatattagtatttagtatgtttcatcatgtacacataccataattaatttaactaattaatagttatattttgtatctttgtctttctattataaaaaagttcaatattttctaccacagaagttcagtactggtctgggatatgcgagactgtctctcagcagataatctgaaatgtgggcaatttctcgtgtgtcagaatgtctctctgaagaaaatctcagaagtggaggctcgttctgaggccatacgcattggaaattctgggtatttggaaactctcacccactaagtcagaaccagtcagacctgtgtcagcagttcctgcacctgtttgcctgtgcactcagcttccccaaggagagatttgtcacgtgctatcttagaaaagttgcatgcacctacaccatgcatttacagtgacctaagttctaaagaaacatggctctccactccccagataggctttctctgtgtagccctggctgtcctggaactccacctgtagatcaggctgatctcgaactcagagatctgcctgtctctgcctcctaagtgttgggattgtggcttttaatagtcaaaaacaactgagctggctagatgacggctcagtggataaagtgcttgctacacaagcctgacaacttgagtttgatcctggaacccacagaaaagtggaaagaaggtgtgaactgactctacagagggttctctgattaccccatcctatacacacagcattagtaataatagtaattttaagcagttggaactgttaagtatctgatggagaacatgaaccccactcttctccaatttggcctttgtagttttgtgtctgactgcggcttttcaaggctgaggtgctgactttgtcatgtgacacattcctgtgggccacctgagaggctcatccccaatgtgttctttgtgttctttctgctggcgtgccagctctgcagtctataggccagctctgttccaatgtatggtggctggccaggaacttgctctgtgtgtcaagctggcctcaaactcatcgattacctctttctgtctcccaagtgtcgtgatgaagggcaagcttgtgccttctttcttagtctccttgctgttttatgttcccctttgtgcacacaggcttttgatacctgatgtctgctcttaacacaatagtcactttctttttctttttcttttcgagacaggatttctctgtgtaaccttggctgtcctggaacttactttgtaaaccaggctggccttgaactcagaaatccacctgcctctgcctcctaagtgctgggattaaaggcgtgcaccaccatgcccggctatcgccactttcttaattctgcttttaatagattttctgttgattcttacattttccagttatttttgcatgtttgtgtatgcatgtgtgtatgtgtgctaacatgttcacagttgtgtgtgtgtgtgtgtgtgtaggggggtgtaggccagaggtcagtgtcagatatcttcattttctaacttacatctggaggcagggtctctcactaaacccagagcttgccaatttgtttagtctggttacccaacttgttctggagacacccccccccccnnnnnnnnnnnnnnnnnnnnccccccccggtctctccctctgcctctgcctctgcctctgcctcttgcatgctgggagtccaagtgaatcccttgttgcctggtgttaacatgggtgctgggatctgaacctcaagctgcgtgaccagtgcttttcccacggagccatcacctcatttcccagttttcacttaaagaaaatttgttattttatgtgtatgtgtatgcatgaatttatgtgccccatgtgtgtacaggagcccatggaggccagacacaggcagttgtgagatgcctaatgtggatgttggaaactgaacttgggtcctctgcaagagcagttacgtgcccttaaccactgagccatctctccagcccaggttttactatttttaagagtaacgaaccccctcctgggaacttcacaattagctttggcttaaaactgaaatcgagtagcctgtgtcacatgacccaataagaccagaaaccaagatgtctctgaattgccatgattggcttggttagtcaagctagatgttgttctgaactgaaaatgaagacagtcatgttctccagggggcagagccttgaccagagttgatgttctgaaaatgggaagagatgaggggtgctgaaggagcagacggtgggggcttctcagctttcttccccggctctcttggtgtgcagcccttgtcagggtgatatttcttgaagagccagaggctcatccccaattctttgaccaaaggaaggacttttatttcctgctctttctgtcctagagaagaggtagctcactggcctttggattcttttatttatgctaagctccatttgctagatcattgcttttacacaacctccctcccccaattttgtctttataagaagctgggatgtttccacttcccacttcttcctcaggagttgatgagtaatttgcacaatataacccagttccataacacactcatatacacttacatgtttgaacactagcatatgtaactcaagcatacgcacatgcataacacatgcagatatgagcacatatgcacaagcacagtcacattaacacacacacatatgcacatttacaattatgttcacacatacacataatttctcgtgttgttttcttctgcagacatgatcttgtgcatcctatgttaattcctgtttaactgttttgagaggtagtagcttccgactttgtcttcagaagctggagaactgtgaccagtgaattcggtgtgtggactcatacagtattgcagtcataggaggatttgaaaaggggaggggcttaagcagtctggcacaccctttgtattggaacatctgttttgcttttgtttcaggacaaggcatcatgtacggtagggctggccttgtattctctctgtagccagttagaatggccttggaacttctgatcctcctgcctctgccttccaagagcaggggtggcaagtgtgtgcaaccatgcctgttttacaccctgctggggattgaacccaggctttgtatgtctcgacaagcactcggccacttaagctataactgccgcccctggtacacctgctttgttgctctgtattaactagtggtctgatgttagtcatgtggtgaacatggcgaacagttttgttatttggggttgggccttggggatcatgtttagggcctcgcaaaaagttcactgtgccactgagctactgccccagggagtgaccatggttttttggggaggaaagttgcatatgtcttatgacagattttttcttagggctcagagtttccccccctgaacccaaggcctcatgtatgccaggcaagtacttcaccactgagccacatctttattaaccgatttggttgagattattaagccaaaattttgacactttggaatattgcagtgacttacggcaatttaatagagtatttgtttttgaagaatattttaaaataatatactattgcttatatgtttgcaccattataattttatgtttacataggttatagattaatggtaaaattttaaagtactatgttaagcaacaaaatgtccagctgtggaaagaactatcagtgacaacaaaggttcgctcagctccaacatgcactttccccgtttcttcctggtggcagccgtcttggacagttgtctgtgtgtccttctggagagattccgcccgtgtgtgcctgcacacatgcctccaggctcctgtctctaacctctctttcttcacacagatgtgtgtttttcactcttcactgtgtgtgtgatccttttttgttaggagcatgccttggagagtgttaagcaaagtttaagcttgctcttgaacattccgaagctgactctgagcgtggccgagcagctgtctgaggcgtctgggctgtgtacgcacttctgaggccagttattgcttggtgggttctctgtagttgttactctggattggcatttttctctaatggtcgagttgacttctgaatgaaggccagttataaggagaccttatctatgtggatgctcgatcaagcaatgaaaccgaagaccttgaactttgaaggactattagttattgcagctctaggtcatcgatcaagtcgttgatgtatctgttatttccaggggggatataagaaagcattctgttgggaagtgattggaagcagcagcctgggctttccaaaggctttccaggttaagcagcagcaacaaaatgcacaatggtaaaaaatgtgaagttggcctttattatattgttgaaaataactgagcggggcatgttgcttagtgtcagggttcctgctgattgctcactaggtattaaccctttatctgccctgcagcaatgtttattaacataatgtgaaattggagctggtgaggtggctcagagattgagagcactggctgctctttcaaagaatctgggttcaactctaagcacccacatggcagctcacaactgtttgtaactacagttcaagaagatatgatgtcctcttctgacctctataggcactaggctcacagtttacagatatacatgtaggcaacacacacacacacacacacacacacacacacacacacatgaaatatgtgggcataaacctaataaaaacttcacacggaataccatgaaacatcatgtagaggaaccaaggaaaacccagcgattggaacgcccagcgtggttaagatgtctgcttcctttagacggggttgtagatccagaactaacccacttacagttcccttatgaattttggcttctgtgtggtcagttgataatctggcttctaccacagtttctatgaccgacagtgtgaagagccaagcagtaccaaggcagcattgacaagaagacacagcagtgcagcagctgggctaaggctgcattgtggtgttgcacaaggagaggcaagtgaaccaggagacagaatagggtgtttaggaccagtcccacactcatgtcgtcacccgactggtcacagaggtggcataacaggtgtagcattagatcaactgatgtccacacagggaagaaaggagtctcgaagcctccgtttccaccgatccaaagggacctgtggacctaaacatgaaaggtcacatgaacatttagtagaaatcccaaggtcttcacaattgtggtacaggcaaagattttttaggccatccaagtcactaaacacaaaggaaataaacacatgaagaaatggactccatcaaaatctgtcttccaaagactacaaacagtaaagacaaactagagtggagatcagtatgttctgggtattcatctgatatggaaaatatttcaaccataaataaagagcctgaaggcagacgacattagaaagacaacagcagaggatttaaccctggacttcacaaaggagatggtgtgtgatgattgtatacaaaggtgttggctttagtcagttatcagaaaagtcagactgtaaccaggatgctacaccgccatacctaccagagcagctcggctaccttgccgggcaaaccggatgtttctgggatttgctggaattctcatatactactggtgagattgcataagtacagtctctttagaagctgcacacccactcaaatggaactgttccacagactcagaaagaatgtttatagcagggctgttcttaaaagttcccgttggaaagagcccagggaactctgtagactaatagtatattcagacattgatattacacagccaatacagatgaacagtctacaggtgcacagcacactgtggatggctcgcacaaacatgctgagtgacataagccagacactggagttacacatgtatgctgccattcctatagaggtgaaatttatagtgttatgaatcatgaaagtaagtggttccttttggaagaggaagtgaacagaatggaacagccgggcttctgggccagagagactgctcatcgagtaagagcgcttgccatgcaagcctgatgacccaagactgatcctcagaacccaggtaaaaagccagatgtggtcttgcacatctgtaatctcaaggctcaagtccagcgggacgggaggtggggatgggagaatctcctggaggcttgcaggcctctgagaagtgagagatcctgctctaacaagatggagggagaactgactgctgggcgctgtgctccgatccacatgcaggtcagtgtgtactgccccacatactctcactcagtccttagaggatttggatgcgactggttttgccctggtagccgctaactgaggatcttcactgcagtatctttgacttgtgtactgtgccctttcattttacatgttctgcttgaattaaatgtgtgtataaacacacacacacacagattcatgtatatacccttaactcacatgtaagcagaaaagctgtgtcctgagcagaccacaaggtggggacataagtcagcagaagagaaaacacccaacttcttggccaggttttgactcatgggcgctttccttccctgagagcaaggagagaacgtggaaattaattgtgctttttcctaaatgctaggaaagaattcctgctgccgttcagttctctctttagcctttcccctgtctgtggattgcagacctgtctgtctctttcatgtctcccttcatgggctccagactctccccagcctggtctgcttgctgctgctgctgcttcttcttcttcttcttcttcttcttcttcttcttcttcttcttcttcttcttnnnnnnnnnnnnnnnnnnnnnnnnnnnnnnnnnnnnnnnnnnnnnnnnnnnnnnnnnnnnnnnnnnnnnnnnnnnnnnnnnnnnnnnnnnnnnnnnnnnnnnnnnnnnnnnnnnnnnnnnnnnnnnnnnnnnnnnnnnnnnnnnnnnnnnnnnnnnnnnnnnnnnnnnnnnnnnnnnnnnnnnnnnnnnnnnnnnnnnnnnctcctcctcctctctctctccccccccctttcttttcctttccttttaaaaaacttaggtatttttttcatccattgtttttccccttgggaaaattggcacacacccactttttctactcctccttttcccactcattttcctttcttccttttctccgtgttcctctttgacctctttccaaagtctcaagtagcccaggttggtcttaacaaccacagataaccatgaatccctcacccacctgcctcttcctcccaagccctgggttacccatgcatgttgctgggttacaagtgtgttgctgggttacccatgtgtgttgccaggcctggttcttttactctgctcttggctttaaaatcaaagagatgttttcaatgtgtctttctaatagtttccacataggttgccacttaactttttaaaatgtgcttttttagctgatatgccaaacttcagattttgcatgttaatgggataccatgtcatattttatagttctttgtttcctgtcatcttttctctctttccttccctccctccttgcagggaaatgactttcctttcctttttattttgggggcagttgagtggggctctcactgtacagcccaactgagctggatcctgtgatcctcctgcctctacctcagcagtcctgagattagagaaggactcccacacttggctctctacttggatttaaaataatgatccgccaggcgtggtggcgcacgcctttaatcccagcacttgggaggcagaggcaggcagatttctgagtttgaggccagcctggtctataaagtgagttccaggacagccagggctatacagagaaaccctgtctcgaaaaaccaaaaaaaaaaaaaaaaaaaagatccatgcttatgctcatgtacggtgccaacatatatcgcctctcctttcccagatgccatgctcctaaagtcaccacttgtaatgttggcattttcttgatcatacttactgttatttatacttgtaagtatgttgctataaatatatcattctgaaaacagacttatatgtacatgtctctataatttatttttttatttaagtttggacattcctccaagtcagtaggtttaacacattctttgcaacagtgagtgctttgcagttataagtctgcagtcattcttgtagccactgtccataatggtgttggattgttttgttttgttttgtttttttgtttgttttctctatttacatagctaaggcaaattccatgtgcactgtggcctctgtttctgtaagagagggcctccaggatatgtgtgttggaaatttaaagaactgccatgtaaatttcttaaaatttgtaaggctggccagcagtatgtgggagggctcatttcccaacctgctagccatcagtgggtgtcgcagaacttggtaggttttgttaatctacggatggaaaaataaagtctcttttgcattttagtacttggtattataacagcacagtgatgatttggggcatggaaaataaagatctctgcagctgtatgtatcaattttaaattgcaaaaaccatttgggaattgaaaaggagaaaaattgcagtctgtcaacaagggggagtaagaaagaagagttactgtgcgtgctatattttagctcattgtcttttttttttaatacgctgagtactttccacgttttgctctttttcttctgtatgtgtgtgcacatatggaggtcatgggttgacacctggtggcttcttcaactcctgtccaccttagtttgtgagacaggatctctcattgaacctggatctcagtggttctgttagaatggctgtccagcgatcccagggagcctcctgcctcacccccaccccgcccctggagattataggcatgcactgcaataccctatggttttatggttttgtttttttgtttgctttaacatgggtgctggggattgaagtaagatcctcgtgtttgtgtgacaagtgctttaccaactgagccatctcctcagcctcccaagttcaactttttaataaatgaaggttaagaaattaaaatttaggtagatagctaggtagattagattagatagatcaatccattgattgatctcattttacctccacagtctgcagaggcagcaaagaaggatcaccctctgggttatagaggaggatgggttcctgggtcagagctgacccagtgctggaggagaaccagcatcctttgctctggcgtttgtctctggtctctcttgatcttggttcgtaccactgttgcctgtagcgggtgtggtttgtttgtttgtttgttttccccccactggcttcaagtgctgtgtcttgccgtttgctctttctagcctgtggacaggaataccctatagcagcagatggccaatgcagcaatgtgtgaaggagcaatgattgaatattacaaaacctgggtttgagttttaactcccattttgtttcctgtaaaataaagataaccacaactctgcagcctgtgaaactggaatgtggtgggtccgtggcaaggccctctgtgaaccagaaagcacccagtaatccgtgcttgctcccactgatcttggcagaagagaagacaatgcacaccacgtaaagaggtctttctgcctttaatagaatgaccagagaacacagtagtggatgatggcataaagaattgtatggcacgggccataaacgcagtgtaagcaattaagaggaagagaagcggatgtgggggggacaggctgagaaggtgttggaaggcttaagactctcgtggtcctgccgggcggtggtggcgcacgcctttaatcccagcacttgggaggcagaggcaggtggatttctgagtttgaggccagcctggtctacaaagtgagttccaggatagccagggctatacagagaaaccctgtctcaaacaaacaaacaaacaaacaaacaaccccaccaccaccaaaaagactcacatgatcctgagagaaggagtattgttggcataccatgcacctcagtctgctgtgaactttttaatgtattttttaaagtcagtgtctccctctctactccaggctggctcagcactgactgtgcactccacagacttgcaggatcctgtctcagtccctgagtgctgggatataggcgcatgccgccctgcccaccttactctgtgctttcctggagtctactgccccgggagcagtacttttcatgccagtctgcagactggtgtccagctggctgcataaaagtttcccgatgaagccttacacatttttgggttctgtccccgaggcaaaagggtaccactgttaaaagtatgggccaccatctcactaatttatgttttaggtgtgagttggcagagccagtgcaataaaaattgaattgtttaggttgaagtgatggctaggtaggtggtccctggctctgtgtgtattggttgtatatacattaccactggacacccttaattagtcttttagtggcatatttgcatttttatacaccggttgccaaacagatttgtaccactgctgcttgccagacagtgatttttgtgaaactccacatagcacgcttgtttccagagcagtgctagtagcactgttaatggagcattttagcatcactttataaagtaatggagtggaaacaagcatgctgaatacgggggggggggggggaaggggggaatgttgaggccgagttggccgagttagacatgtgacatttctaagtgcaaaatacgaattgtttgttcatcatctcttctggaccctctctgggtatgccatgaaactgttggcttgtaaagaaccaagtgaacagagcacagagggcagtgtccagaggtgtggctcctcattgtgggtgagcaccttggtcactattgcacactttaccgtgtttacaagcatacattgtgtattaataaagtacagagttacaattgtcattggccagttactgtagctgaatttcccccactgaccagcagagagcgctcagtcaccgagaggctggtaatgtgattggccctcccagaatggaaggtttggattttgtgccagccactccttgcctctctactacgtttaaggtacctgtgatgctccaatgctttagctagagagccctttctgtcggtgctgattcagatggcagagataatcctcctcagggataatactctgcttctgaagctgcaatatgtcctccgaagccttccaacaacctgcgtagctcttctaccgtgaactgttttgttatgatcaaatgtggagcttattgctaatatttaaaaaggcaaccaagctgggccgtggtggtacatgcctttcatctccacaatccagaggcagaggcagaggcagaggcagaggcaggtgaatttctgagttcgaggccagcctggtctacagagtgagttccaggacagccagggctacacagagaaaccctgtcttgaaaaaccaaaaaaaaaaaaaaaaaaagggagggttgctggagaggtggctcagcggttaagagcactgactgcttttccagaggtcctgagttcaattcccagcaaccacatggtgactcacaacccatctgtaatgagatcggatttcctcttctgatgtgtccaaaggcagcaacagtgtactcatatacattaaataaataaataaataagtaaaccctttttagaaagaaagagaaggaaaagaagaagagcaactgctgggattttgaagaaagaataggaaagattcccgggctgatgaggctgatgatctgggaggcggccactgatgccctcatagccacaggtcaggatgttacaacagcagttatactggggagttctcagtagctggtatattgaagtttgaaaagtcatgaaacaaaacaaaacaaaacaaaacaacagccctttcttaaattgtgtccgttcccccaagtcacccagctgagtttggcaaggagtttgtcaggagaaaaaaaaaaaggggttgacttaaaattgggcaaaccagtcagaggcatagctcagtggtgggatgggcccctagcatgcacagggttgggcttgattcccatcactaagggaaaaagggaaaaaactacaaccccaaaacgaaatgaaacaagacaaaacagaacaactaaagatacttgattgcagtaggctggggacactgatgaagtgtcccttggtaggtgatagagaaggagacattttctgtggatgagttgtttattctggacttgaactcagcaggcgttgcttattgaaattaacaatacaaatatcttgggaaccaatgttgggttaggcactgtgctgggcacttttcatccctagtgtatccaccaggtacttaagtcctgttcacttctcagccactggatcagtgtctgctcaatggaagctcttcagttgtatggatgtgtgtaggtgggcaggcgggcagatggacgggagggtggatggactacagagtatgagactgtggcttatcaggctgaaggaagttatccgcacgtccgctgatcctgacctcgagtgagtggtgttatttggggtttgtttttagaagctgtgttgaactttgaatgctaatgagaaatttccttttccctaacttgagtttattctcccagctcaggcaggcttggaaatgttcaccccgtttattcagtctgctccctcagactggtagccttaaagcagtgtgctgatcatctgttcctcacaggtccctgttgtcattttccttctcctgacttcctttgccacccacctcaattaccgctcccccgccttggcctgcctccccccccagcccctgccccagccgcttttcaatgtaatccagtctgcacgttgttgccagagtgtgtctctgaagaatttatgtcagagagtccatttctgattgaaatttgagtctctgtgcatctttatgtccacggagcaaaaccgcataaaacgttttgaaaagaaaaaggaattagccctttcataccataagggcgttttcacatctgtgggcaaggccagctagaaacctttgttgatgcaacccagctctctgacaccctagaaatagcttcgttgctcctaactgtaaacctccctgtggtctgtgaatgctcaaacactgatatttttttttccagacaaaacaaacatttttccatagtcagctgacatctttttgaaatgctaagaaaagctacttcttggaattcacttcttttcaactccttgctcggttgataagaatgccctccctgtgaactctgacaggttccaactgactttgttagcagagatggattatctgagtgctcccccccccaccgtgctactataatttaataacatacactaatttcttgagaggctgagtaaaatcatgttatgtccttataagtgatcatgaaacatgttgaggattctaatatgccatcatgtctactaattattatattattatagataaggtctatcttcaaagaatatggacagaaattactgatttattaaaaaacaaacccccgccccacacacacacgcacacacacacacacacacgcacacacacacacgcacacgcacacacgcacacacacacacacacgcacacacacacacacacacacacgcacacacgcacacacacacacgcacacacgcacacacacacacgcacacacgcacacacgcacacacacacacgcacacacgcacacacacacgcacacacacgcacacacacgcacacgcacacacgcacacacacacacacacacacacacacacacacgcacacacacacacacacacacacacacaccgtccaccatgttgtaggccagcaccgccagcacctggaaaagaggaggctgaaggacggtttgagcccaagaattcaaggccaggttggcctcatcgcaaaagagaaaccaggagttgcggtggctgaagccctgtggtgggatgggtttgatccatggtggtttaacaaggaaaatcaagtctgttctacctcagagcacagtaattagcttgtcctttctttaacttaagagatctgacttgtcaccgcaaggcaaggctgagctggaagatgtttttctgacagaattccctttcaaagtaattctccccatctgctgcagagcattggtctttgctgctaagttgtgagggcaggtagcccttgattaggacttttgttttaatttctcaagatgaaaatgttaagtacgcttctcacgctggctccctccagtcaaagccctcagtggttcccagtcccatttttgtaagcgtttcccgaatgttgcttctccagcctactcagaggctcccacttctgggtgctggggatataaacatgactgtgatgtggcctctttcctcacagagctcataacttaggaagggagacagatgagtaaataactagctacaatcctgcttgataaatgccacgttcgaggtcgtgaacagagtgccatgggagtgccagcgagtgattgatttgaggaaagggggatggagtggggatcaggaaggactcagcagcagaagtgacctttgagttgagccttaggggatgaatagaattttgccagatggacaaaggggtgggggtggggatactccagactcatgcaaaaacatgagagtgtgaaagtttgtgcctttgactctgtggtagtgagcaggatgtacgactcagggagatgaagggtgtggtactggggcattgggagatgctgctgctgagaccatggaccatcttttaaagctcacacgtaacctatagttccagggagtcacggaagttgtgaaccatggagataataatagtgagacttcagttttaggtcattctatcatcagaatgggtctgtaggagaggtgaggagggtctaaagctaggctgtactaacaggggaacatgttggctgtgcatgaggacagtgagccatctctgaagaacacctcagccactgctgtgaggtagaaggataattgcagcagcagcagcagcagcagcagcaacaacagtagtaacacaaggccctggatggcacactaagcagactcgagatggggaggagaaaagcttatggggcaaaggagtgaatttgaccttgcctttgcgaactacttgaggattcttaaatgagacaggcatcacagggcacctgtgggaaaatgccaagggcagagatacattggaaagtcttcagcttggtgattttcttgtagggaaagggagggaggacatgcctattttttgtttgtttgttttttttcaaaaaaaaatttttttttaccacttggcttattttacttattcatgtaccattctttatccttacttcagaatatgatgtgactctactaaggccagtgtcagtagagcagtagtgactaatagtaggtatcaccctaagctgatgaagtgcattcagatgcatagacgcataggaatgctacaggtgcattgctggtaggtccaggccatcagtaatcgaggaagaccaagtcagaggagcaggaagtaggcgtggcttagctctgggaattaggtcatgctgggaagtctattctctgtatcatgtttactattgatatgagcttgtgcccacatttttacttttattccctaataggtgattaaagtatacacataccacacacaaactgcacacgtcaacacagctggagtcctaacttgccatttattgaggttgcttaaaatcacctcacatttgctgaattgtttttgtcctttcatattaataccttaattttgtctgtgtgcacaagtgtgtgtacattcattttgtgttttttttcttttttttgagacagggtttctctgtatagtgtgtgtacattagtgtgtgtgtgtgtgtgtgtgtgtgagagagagagagagagagagagagagagagagagagagagacagagagagagagagagagacagagagagatagacaagggcttgatactaaccttggagcagtaccactcagttttgatacactcactgaaatgactgctcagagctggccaccaatgcactcctgagtctcgggcgatttttatagtttctgacccaggcttttgcagtgagccacatacagctacggtgtgtttcatgctggcacttgcaagatgactccggtgctaatggatatgtttggattgcaaattgcctgcttcacttcccttttcatttctttcttccttgtcttcaaagctaggtgaagctaagtgattatgtatggagtaagtgtgaaacctcgacatcttggcttcttggggccaatcatgtcaagtaaaaccttgaagaacacatctctctttttgatagactggaagaaagtcatactggtgtttgacatgttaattggcacatttgaatatgagaccagacctgtgcgtaaaatcttagtccaaagaatcaaaacagtctttgcatttagcccaggttttcttgaaggatatagtctctttttagttaaaagtgaaattaatagaatgttggaatatattgtttaaaataattttaatacctcctagtagacaatgcagtaattggtataatgaaaacagttaatctattgaaaaagatattatttcccaaacactgtattcagtagtttgcatacattattatcatctcttttcacacacaaacatatacacacacaagtacatgaggacaacacccacaaggagaagctgtatattgtcagggcaaaattttgatcagcttgtacatagtttgtttgattaaaacagtgcctactgaataagtattgacaaaatcattttatgaatacataaattactctagttaatccatgctaaaacttccagaggtagatgctactgtctatatactcccagtaagtggcatgctcgtggctatttgctctacactggggagcagggtgcaatagaggggaggtgggttctatgtccacttcctatccagtggtcagaaggcttaacgatatggaaggccaaacagtagggtagcagttacttccagacaacacaagagatgccatcagggcttgaaaaatgataagcaatggagaaatgagtgagtgtacactaaatcacccagagagcgtctgcacatagcagttgcttaatccatggtgactgctactgttcctccactcctacatcatcatcacccctctctcaggctcagcaagagcaatggtgtgaatcccgttcaactctgcactggagcagtcagggcaacgggattcttacatcctttggacagggaggcagcggcaggaactacgcgctctgtccttagatggaagaccaagatgtgttgtacaagagccaatgtgcattgcttcaggggggtaatgatcacagtagacagtcacactcagtgtgattgttttgactgtagtcacacagttgaattggaactctgaatgtgtttctgtgagcaaccaagcaccctttaatgggagattttattacttttctatgctgtaatctgtattattagtattatatttgcatgaaaatatttgtatttttatttgtatatatttgtatgaaaaaatattatttctgtgccttctgtgtcacaaagcctgtgaaacaaaatttgttctgataaacaggcaacttcccgatggccttgtggtttgagacttaacaacctaatttaccaccatctttggagggttagtagaatgctgtgtaattgtctggggaccacagcctagcctcagatctcttacagccctgggcatggtccctagaataaactaagagtgcgataaattgtggagatggctttgcaaagcgtgccaggctggccagctccgtgctcgtcacagtgattttcagccggttgtgttttgtgagatatgtaatgtgcttgctattgttctcaggtccagcctgatgagcgaagaagcaaagcgaggaactcccaacccttggctctgtgaggagccggaggagaccagaggtttgggttttgatgagatccgacaacagcagcagaaaattattcaaggtacctattgctccaggactgtggctcacaagcctggctattctgctgtgcttgactattctttatctctactgaaagctagagtccaaaagtaaagctcttggttttggcctcaagctgcttgaggcaacgacttcattgctgctctgactccatggtcatcacatcagcttttaccctcaacttcatctggaccatcagggttttttgtttgtttgtttgtttgtttgtttgtttgttttacctttttatttgtaggttccacacttttgctttaaagtgtgctgtttttaaagtttctcattttttaaactttcagaagtaatgtactgttgctatgggttcaggcaagatttgggacagacaagacagagagtactttgtgatgcctctccagtctcaaaactagaggtggattagtatgtgtatccacagtcccgcttgcattacatctatgtctgtgtttagtatacatctatgtgtatgtttagtatttaagtacacatgtaaatagcacgtgaggtacatagctatctcactatgtgaacatttcatagttttcaacttaatgttatggctttttcccatgtcagggtgcctgctgctctttctacagacgtatttactgaaatacaattggcattatcataagcagcacaaactcaacgattagatgaactttgacacagtatacacatgtgtttgcatgtaagcccagcacatacacatgtgcgtgtatgtttgaagaaagcatcactggagtcaagatagtgcacacagcttgcagaagttcctccgcctacctctgagggtcttcctgttcttcctgttgtctctccccaattcctcgacagcggctgatctgctttctgtcgctgttaattggtttctattttccagtttcacggagtacactcatacagtatctaccctctttgggggaaggggatctggcttctttctctatggctaatttttaaatgcatctgaattgtcacgtgactcttcttcacacatgctgatttttttattcccctaagatgtctttagttttctcttcctctttcattaacctgtaagatattttcatatgtccccctcaccgttctcttgtcagatagctttgggttttgtttttagaaggaaaattagtttccttaagatcctgcaagggcggctggctgggcggcgacaaggtgacaagcgtctctcagtgacagttttcagactacggatgttgttaagtccagttgatcaggtttttttcttgtgtgatttttgttttgattacatcgaagaaaacattcagtaggttaaagccacaagatttattgccttttcatctctagtaactttataatgtcaggttttcacgtcaagtctctcagatctcttttgaattgttatataggcacaggtgcattttccatttggatatccttctggcttcgagccattcaaaaaataaaataaaaagaatgctttcactgatgaatgtcaaaggtaatcaaatggccatgtacatatatacatgtatatacatatatgcatgtatacacatacatgtataaacatatatggccctgtctctttgctctattctccaataatctgcttgttttaagggggcatgagctttgtgcttctctgatagatcactaaaccaagtgacatgtgacatcagactttattctttttcttggtatttttgtatactttggtttttcatacttgtatttgaattttaaagtcagctttgaatttttttttaaatggcatcaaggcacatgtaattttgattgagatgacatatttaggttctttagaagagaactaatgtgacatcagcaagaatcctcaatccgtaatctggattatcactaagtaaatctcacatagtctttcatttttcttagcattgctttttagttttcatgatgcacgcctcacgtgcccttggtcaggtttatccctacatattttacgcttgtattgtaaatagcattttaaatgtccagtgtctgattattgctcatatataaagccgctgtttatatctgtgttgtctgtggatcacgcaactgtgcccactctccctagtgtgctctagtagcttatgtgtggaatctgcgggtttttctatgagtaagacaattggattttctaatttcattgcagatgccttctgtgtattcctcttgccatattgtacttgctgcagcctagtacaggtttgaaaatagatgttcttgccttgtttctgttcctcatgggacgtgtttatttgaatccaagtttgaatcttttttttccttattatttttcagtactggatattttttaattttctagaaatatttttgtgagtagttgtaggatatagttatattatttgggtcatacttttatttctatattttaaaaatgttatgtatatatacatgtgtgtgcctgtgtgtgtgcgtgtatgtgtgtgtatatatgtacaatgtgttgaggcacacatgccatggtgcacatttgaggtcagacgccacctttgtggagtctgttctttccttccaacttcacgggctctggaatcaaactcagatcatcaggccctgaggcaagtgcttttcctagctgagccatttccctgaccctgggtcttgcttctaaagacagatgaaagttaggtatttaaaatgttttaaagtgtggatcagcaaaccctggcatatgagccaaatcttattttcgtatggtgtggaagttaaaaacagctttaaatttttttaaatggtaaaaaaataatcaaaagaatattttgtgacttataaaaattatatgagattaaaagttcagggctcataaattcagttttatgggagcacggccatgctcattcacttacacaatatccatagatactttctcacttacaatagtagacttgaatgactgctttagggaccatatgaaccacaaagcctcaaatacttcctctgcggcccccacggaacatgtttgcctctggtccagaggtaatttatacactgctgagcccagaccactctggatagtctgcatgtgttctaggaggactgaggtcatctgcttggtggctttccccggttgggtttagatcacagttccttctacctttaaagtgacaccagccaggacttgatgcagatgccttgcagcaccacagggctctctccgtgcagctctcttcactctcgcactccaactgctgccccgtaggactcaattcaagagtcccactggtttcccacctgggctttccagctcctcaccttgatgggatcattcacaaggcagcaggttgggctcctctgtctccctctcccagagatctggccttgtcagctgatgtatgtttcttgaaatagtggatttgaatattttgcctgttgtctctgttccttgttcatccaggccagaagggaacctggtccctgtcagtccatcctgaccagaaacaggagtctaattctattttgaactctcttcacaatgaaattaccgagtaaacaaaacactggctctccttgtctttaatgttgcatacctcacccattaccgtgtctgacgggaagtgaacagatgaaaagcaccccagcttagctcacggcacagctcacacagggcgctgtgctctgcatggcttctgggaggactgcctagccctaaaacaaatgggcctctctgtcattcccatttgccaaggaaagctgttttctgtccctgagaatgtgctacactgggggctgctcaggttttctacaagtccatgccctgtgcacttcttaaactagagcatctccccctctgagattcccaccccttgccaccttgcttgcctccaggtcttggttttgggacaggtggactggcctgagttttgggtcactttatttccctgccctttcttgctgtcgtggtttgaagtgccaggtctcttgttgcgttgttaatatagcaagctgtttatcaagccaaacacaaacatggaagtagtctttaccccatatgctttgtagtctttcctgcgctccagaaacctcatgatgttctgtgggtctacttcattgctgggccctattctagataaagaagaatctgaaaaagccatttctgattgcattttggcctttgtcttcggggttttactgctgtgaacagacaccatgaccaaggcaactcttaaaaggacaacatttaattggggctggcttacaggttcagaggttcagtctagtgtgatcaaggtaggaacatggcagcatctaggcaggcatggtacaggaggagctgagagttctacatcttcatctgaaggctgctagcagaatactgacttccaggcagctaggactaggatattaaagcccacacccacagtgacacacctattccacctattcaactacacctcgtaatagtgtcactccctgggccaaacatatacaaaccatgacagcctttctgtactttagtgtggagacagaagtactctggaaattatccccaaattattgctagatcatagacttgaggacagtgaataccgttcttgctaaacctagaagctaggccttgtgacagccagttacctaaggttagcccaataattaagcagtagcttgggatacacatagaccttagcagaggtaattgtggtgatgacaggaagtttgcctcctgaggatcaggatagagcagaggaaggaaacagtggtcagtacaggctactgtacccaagtcagactataggatgtgaagtgtgcctcctccccagctcccatcaccccctccccacctcctgctgtcttaggagtctgttggtggagttcctaagtcagcatagcttggtctccattattttgtagctgttctttctagctttgcgcatttgctacagacttcctggtccctctgctggaatctgacctcagggtcctgtgcacgctgggcaagcgttctacagctgattcccatttctagcctcttcctttttgttgttaacatggtgatgatcttttgctatgggaaatttcaaatgtattagagtaacttgtattcctttccttatcctgcttcagtaattatctccccatacctagtttggttttatctgtgtgtatccagatacccacctctaggattgtgtatatgtatatatacatatggcacacattcccatgtttttcacacatgtgaaggttaaaggtcactttgggtatcatttttcagaaactgcctacctttttgctcctactgggacctgatgcctgccaggtagctaggccggctagtcagcaagacccagaggactcctgtctctgctaccccagtacgtggataataagcacatgccataacacctagctttcactgtgggctctcgggactgaactctgatccttatgcatatgccctgggattatttttatagtgaactccagacattatgtcattttaatggtgaatacttgagaatattctatctaaatactataaaatatgtttataaaatataaggacatttaaaaagaaatgtttatttttttaaattatgtatacatctctgtgtgtgtgtctatgtgcacatgataatctagatacccatggagtctagaagagagtggcagatctgctggagctataagtgaatataagctgcccagtgtgggtgctgggaactgaattccagtcctctgtaagagcagcctgcgctcttaacctctgagccatctctctgtgctcaggactggtttttaaagactacaatgcaattaccacgcctgccaaatgagaaataattcctcagtccaatcaaacagccagacagtttcctatctctctgtagtatttcctctagactccttggttcagggtatgaatgtaggccatccattgtcactaataggtatatctctgaagtgttttaacagtattaatgatcttatttcaaactattttattttcctgtgcactttctttgttaaacaggattgtttactctgtagtttccccttagctagttcttgcagtgcatttcccatatgttgttcagcatattctgtgacctagatattttctgtaaattggtaggatttagtggcttgcttagaattgggcttgttatttttggcataatactttctgatgactctccctttgttttttatctaccaccaccaaactgtcctcccacagttgagtgattcttatttagaggatggttttcctgaatgtctaaaataggaagtatctccacacctaatggctccacggggaccctcagaaatgatcgtcttagtgctcccacaataaattagcacacatatagtgcattactcacatcgctacagtttgaagggcagaagttcagtttgggtctccaggggctcagatcaaggtgtcagctggctgctttcctttctggaggtccaagggcagaatctgtcccattgccttgtgcggcttctagaagatccccatttccttgactcatagctccgtcttcaacgccagcaactgcatctctttaaccctctgtcatggctccctctgacaggctgggcaacctctgtttctcagagctaatagaattgtattgggtccacctagattccgcagcctcatctcctatcatacgccttcatcttcaccacatctgcaaggttgccttctccatggaaagtagcatagctgcaggttccaaggattaaaacctggacagcttggatgtgttggtgtgtgtgtgtgtgtgtgtatgtgtctgagtgtatatgtatgcacatgcatgtgcatgtacatgctttcctttttccacggtgatccagtcttaaaatctacaccgctgtaaagttgaagaacgactcagggtctggtatgttgcaagcatcccattgtgacacagcaccacggccttcagccttggcccgtgtgacagaatgcggtggattatggagaatgagctgttacaatgtcccacctctgctgtttgtaagtcgatcgtctgcagtgagtcctggcttatttttgttggaagcagccttttattttgattattactaaatggtgaaaccattgcctcttagaaatgtctgtttatagctcagaggagcttgggtgattgacatgatcattttgagctgcccagcagctttggcgtctggactgtgggatgacagttgattatcccagagttacacagtgaggaggtgctctagttgatggcaatcacaggactaggggagtttctcctctccttcctgatatgcactagggagaactttaggagacgacgaacttgggagaaaaggtgagcgtagctattttttactaacaatttgtattccgactgaatgaaaaacagtgtcagcacttcagtgtcttttcctagctgacagccttagaggcagttgctttccgctttcatccattttcccatcatttcacagggcactgaccctcagtccacctatggattactccttgggtgcctttggacttttgctgtagcatagacgtccctctgcagtgcgagtttgatgatagatttatcttggaggccatccaggaggctgctactaaggaccaagaggacctcattataaagtgattttgctgtaaaattgtgccttagagtgctccctggacacagcaggctgtttatagcctttaaaaagtacgctgtgtcaaaaagtgtcaccaagaggtccttgcctcacaccttaagtttaaataaattccaggcgaatcaaagagctaagtatagtgatttaattctgtaaaaaagagtgatacaaaactgtaagtagatgctggcgagctccgagcgagactctgtgcttctgcttccctagataagccattgcgtgacgcagtcatttcacaaatgcaaacgtggagctgcattttagttcctgtcagtgacgctgcttcttagtgtgccagggtaaaccctcatgataaagcacctcactggtgctcgcttttcaggcaccgagggaggggggtgtagggaggagcccctgatctggggtccactgagcttcagaggaacaggtctcggattaagctttgaatactgaaggaggctgtaagaggaagagtaggagctgggtgtgtggtgcagtgggagagcctgtgctttgcatgaaccaacctggcttcctttttcaggacctggactccaaaacagaaacaggcatcgccttcttcctgagggagagacacacacaagggagaaggctggggccaggaagtgtcttagttacattttctgtagctgtgataaaagcaacttaccatggcaaaagcaactgaagagagaaggggtttgctccacttcacagttggagggaaactcctgtggcgcctgaagcacctggcttcaccgtactcacggtgctcacggtgctcacggtgctcacagtgctcacggtgctcacagtgctcacggcctcaccgtgctcaccgcctcacggtgctcaccatgctcagagcctcacggcgctcatggcctcatattgctcagggcctcacggtgctcatgcctcgtggtgctcatgcctcatggccaaggatcgtcccttcttacacagtctgcgacccaggcccacgttaagggtgagagcctccaactttgcgtaaactaagcaaggtaatcttgtctaggcctgacagaggcttgtcttctagatgattctagaagaatctatgaggttgataatcagttttaagcattacaccttatgcagaggaaaaagagccaagggctccagaaaaagtttcagagtagtcaaaagatacaccgagaggcagtaagttgatttccagcacaagggacatgtattagggaagagtcttgtagaagcattattgcttagctgcatatgttcttatatatgtttcctagacctagtaagagtgggtagattgaagtctcaaagatttctgtcaaggccttgagcttatttcccatataccacatagtgctcaggagcttcaggcccctcccacttcaggtagccttgtgccagagagaaccaactttataagatatcctctgactccaacacgtgtgtgcctgtgtgcatgcgtgcccagttactattgatttatacatgttctgtttgtattatatactagagggttaactgtcactgtagccaaatttaataaaatttctgtttcatatttgagcaatgaatttatcaggaaatcatttcagtctgtggtgttaagtatttaaattgttgttctagtaacgccaccagtgccactcttgttatatgttggatagtgtcagttgcctggagagatctccctctgcatgtgtgtatgtatatgtgtgtgtgtgtgtgtgtgtgtgtgtgtgtgtgtatacatatttatattaacttgaaagtgttttcctttgatttttagtcagttgtttttccttttctttcagaacaggacgcgggtcttgatgccctttcctctatcataagtcgccaaaaacaaatgggccaggaaattgggaacgaactggatgaacagaatggtaagactgagtgtgagctccatcacatgttcactccatcagtttccattatgcggcacggagggtctgcagtcagtaggctacagtggtttattgcgcctgtggtggtttgtggacagtttacattgcagttttcttttcttttttttttttaattttttattattattaggtattttcctcatttacatttccattgctatcccaaaagtcccctataccctctcccaccccccaattccctacccacccactcccactttttggccctggcgttcccctgtactgggggatataaagtttgcaagtccaatgggcctctctttccagtgatggccggctaggccatcttttgatacataggcagctagagtcaagagctccggggtactggttagttcataatgttgttccacctatagggtcgcagatccctttagctccttgggtattttctctagctcctccattgggggccctgtgatccattcagtagctgactgtgagcatgcacttctgtgtttgctaggccctggcatagtctcacaagagacagctatatctgggtcctttcagcaaaatcttgctagtgtatgcaatggtgtcagcgtttggaagctgatcatgggatggatctctggatatggcaatcactaaatggtccatcctttcgtcacacttccaaactttgtctctgtaactccttccatgggtgttttgttcccaattctaagaaggggcaaagtgtccacactttggtctttgttcttcttgagtttcatgtgttttgcaaattgtaacttatatcttgggtacgttgcagttttctaatactgtgtaaagatatgtcactaaaacctctccagccttcagtgactgctttagttaattttggtttttataaccctggtagtcttgatctcattatgcaggtcaggctagctttgaatttgcattgctctcttctatctttgcttcccaagtgctgggattacaggcaggtactgaccgtagctggccctactatgttgacaaataacttatgatctattttttccaagatctatgtattctgtgaaagttgtgaaattgctcagtgtttggtaccttgatataaatcgtaagaaagctgtgtggggcctcatctcatctctgctcccagtggaaagctgtgtggggcctcatctcatatctgcactcagtggagtttgctcggctttcatcataaatgaccaggctacaggacaaaaaacagtttgaaggtcagacatgacagaaaattgacgcgacagaaattgtttgagaaggaggaactcgtaggctgccgtggtctgaagccttaggtcttggaggcttttgtgcttgggttgtgtagggagtgagaacctgaccgagagtagcagcaggagcagagtgaggtacatgcaggaaacaacccacgatgctctcaccctgggggtccagtcagagaaaccgagaggcctcagtggtttgtgagtgacgactgtaagtccagattggatgcatccaaccagagatgccaatgagagggccaaatggagacattaagtcttcagtagtggcttagagagaagacaagacaaggagttggagacgctacggcgtagatgtgatgccctggccctcgttatgtgctgagcactcttgtccacagcatgttgtgtattctgcatgagaacaggaaggtgatgtcacactgctaggaatgatgctcagaggtgcggagcgacctccgaatgccatatcttttctaaaatgtggaaccgaacctgcttgtgatatggctccttttctgttgtaccagcttcctcagcaaggaagacagagtagggaggcaaaggaactgtgaaaggttctgaagtttcagatttgggggcagtgccatagtggggtggcttccgaggaaagttagcatcatgtgtgggtgtgggtgaagtcctgtagtagatggtgtctctctctgcagggaggctgcacttgccaaaaaacatacaacagccgctcccctccttgatcctgaggaggaatgtggtcattgttcccatggtttcagtccatttctctatcataaataaacaaatccagctgttgagcatctgtcacacacaaataggctcataagcaaatggaaaaccctctgtctctacagtcctaaggcggctttcgagagcttcacactgaggggacaatgtgttccttctcctgttgggctatgaacaggccacttatggatttgtgtttggtccaggcattgctcagtcccttcactgtgcgacagtattagtaagataataagctttactttaaaagctgtggctatctgctgtttattttttttatctcaaggaaatttgcctgtttggggcagaggggctctgacctaaactgatgaatatgtcttcctgtggcgtatgcaggccacggtgtctgggtacgtgactgaggacgaaagaatcatgattttatgtgggactcactaccttctcaggtaaatttgccacatgtttcccagcacaagcaagcataccagcatgccgttgtctttagtctagtggctatcagactttgctgcaaattagaattatttgtggagctttaacacccctcaaagcctaggctgtgtctgcattagcgcctgactgctgttacgatattatcacaaaagtagaggcttaaaataacacagacacagtgtcttacggttcagtagcgtacaagcctgacttgagtcttgctgggtgaaaaccaatatatcaacaagagatcaacattcctttctgatggctccagggatggattggtttccttgccttttccagcttctagtggccacccacattccttggcttatggtcttcttccatgttccaggccaacaacaatactgtatccccactgcttctagtgctgccttcccttccacatttaaagacccctgtgcttacattgcacccacccagacagctgaggaaacgccccttaaggccagcctgttggaaggctcagtttcacctgcagcctcgacgagccgttctgctgtctatcacagaactttacaccaagtaaacctgagtgtcgggtggagagcaggttgatggcagcaggctgccacacccatgctggctgcactgagaggatggagttagtgctgcactgttatgctgcctcccctatctatcctcacgtgactcctgtgcagaaccttcagttccatgtgtcacacagaggttgtggccaccgacaggtctttcctctctgtatcacatagtttaccccacatctttgcatcaccccccctcccccagcttcacctcccctcccaatcatcatcccacactcagatggatgcgtgcgtttctagataaacgcagagttcttttccatgcactgccaacagaagctgggttcctctgtggtgacctcccagggagccagcagctatttacatgggtggttttctgatgtgtgttttctcctctgagatagagcagactcagccattttctctcacaaggactgacaattctcaggataaaaacaatataaaacccaccccgacaggattccagtcagcctccatttcttttgctaaactgaactaaggctggaggtatctctaggtggatgaggcctgcagcccactgtgatctggactgtgactcatgtgtgtcagagaaatcagggccatgggcaaagggattttgttgtaaatatctctatatgacttatggagccaccgaatcggtttgattttccttggagaagcaataggctagaatgatgaccagccagaccattttggactaataaaggcactgtacttagcacataaccacagaaccaaaggatcaaattatcttcaatttaggaattccatttttatccttaccatagaggataaccatctggctcaagcacagtgaccaggcctaataaaggaaagagtagcaggggaagggggcatcctagtgatgggcacctgtaggtccctggtttgttgtatgtaggggatgggagagcagggtggcagggaaggccacttgtcttcctaacaccaattccaggggcaaggaaaccagcgagtccttcagagagctagaaacatgactgttcattgacggacatgacgctctccatagactcatagacttcagttggtcagtgcttactgattggttagaattcctggctgaattttcactgtgaaaagtgagaataaaactgtgtagttagttacctcccccaaaccctgtaagaaaggcacagctccatcacggaaatgttgccttataggggcaaaagggactttactgggattatgcaggtagaccctaaatgcagctacaggtatccatatgagagagagagagagggagagggagagggagagaggggggggagagagggagaaagagagagagggggggggcagagctgggtgggtagcaggcagtaggccctaattttcatgtctggtgccaccaaaagaaaaagtgaggctacaggtgagaggcaggggagattcgacatgtaatgtctgagatgagatggtatcttctagctctgaggagagccgaaggggctacaaagaaagggatataaggaggctctgtaagctgggaaaggcagaaaatggtctctcaaaactctggagggaaatcttgactttaaaactggtgaaactgatttcagcctctgtccctactactgttggagcagcagtgggaaacaaatttgcataatcaccatgtctttttgttagttgccacataattccgattagtcacatttacacgataacattcaagtttacctgtaagtctgtactgtctgagcctttgagatgacttctttctttaaaacaagacaaaactttttttcagattgttatttcgagtgttttgactgcatgcatctatgtgtatgtactgcatgtgtgtcttctctcacggaggtcagactgtgtggtactagattcccagggtctggagttaaggatgcttatgagccaacatctgggtgctgggaactgaaccggggtcccctgtgagagcagtcagtgctcttaacccgagtcgtctctctagccccttagtctgatttctttaaagcataatttacaggaggaagttgttcaggtcaactgtaccagaagttctgagatctcttcaagtgtttccttatgctttgattgtagttagtcttgttctggtaaggtgtatgaggagcggagcctcttctgtcctatccagtgttagagttttttaaaaatatatatactttgtgcttataattgtatttgcatagacgtgtcacatgcaggagcctgaagagaacagaagaggcattgggacctctagaacggagttagggatgattgtaagccattgtgtaggtgctgggaactgaatccaggttttctggaagagcagacagtgctcttaaccactgagtcatgtccccagcctgagtgttagattcttccaaagtgtgtcagtcaagtttctttatggtcacctgtagagaagcagctcccgtcctcctaagctatgtatttctcctgttgtgctagagagaaaacgtatgagtgtttgaaactagagatttcatacagtgtgaaacttccctatcctgttagcctggataagcagcagaagaaaagccaactgatggaagaaaaagcttgggctgatagggtgggtcagaaggcaaggcgcttgctcgaagaccagaaacaaccttctcttagtccctgggtcccacaaggtggcaggagagaactgactttagcaagtgtcctttgacctccacacatgtgccctgatgtgtgcagggttttacgtatatttatttgatttggcttattaattatgttctcatgtcatatgactttctgaaatgtgaagtgttatcctctgagagacaaaaatgaaatgaaatgtccttcagtgtttctgaatagcaacgtcctgttggagtctatcaagtcttctttataaagtttgagggaaggtttctctctctctctctctctctctcacacacacacacacacaaaacacgagctttgttgggtatctctgtcattggtaccttttactttatgctctcagctaacagtatcactccagacttgactttggttgccattacctagtaactagctctccaactttggggtttaggaccctttatgttcttaaaaattattgtgaaatcctgaaaggtgtttttttttttcctatttcttttgctactgcatttaaaattatgagatatttaaaaattattaagtttacacataaaaaatgtaaatttaataaatataagtttaaaattaataagcatatctgttgatataagcaaacttatggaaagtatctgtttttcaaagacgtttgtggaatcaactcaccttatagttttatagatgtttgtgtttggagtggtgaagctagctggattcttgtatgtgtttctgaatttggctcattgtaatgcatcattttgaatgttgtaaatgaaatacatttcatgtagaaatgtagttggaaaaaaagcattttaaaaatctttgcaaataaagtttttgcttttctatatgacagcaaaacataacatttagtttctggaaggtttgccacatgcagttctcctggcttggtgaagcagaccgtgctggacactatactaggaaataagagagctctgggccatttgcccctataattacgtgctctgccctaaaagtgacaagtcagcttgttccctgcctcactggctacactgatcagctgctccatgcagccatggtgaagtataacccaccatatatcacagcaggtatacttcatagtgtcgagactctcagacttagagtgaggtagccaggctttagtgtctgttttcatgtatcaagagaattcctaggacctatttcactgtgttaagaacatgaagcagccccatctggggatccatcccatatgcagacaccaaacccagccactattgctgatgctaagaagtgcttgcagacagaagcctggtacagctgtctcctgagaggctctgccagattctgaccaatacagatacagatgctcacagccaaccatcggactaagcacaaggaccccagtggagaagttaggggaaggactgaaggagctgaaggggccttatctggcatcagtgggaggggaggcccttagtcccatgaaggctcaatgccccagtgtagaggaatgctagggcagggaggtgggtaggggagcaccctcatagtagtaggataaggggggtgggaataggggtttgcagaggggaaaccaggaaaaggggttacatttgaaatataaacaaatatatccaattaaaaaaaaaaaaaaaaaaagaacatgaagcaggttagtgcgtgggacccacattggaagcagcctacagtgagcctctactgtttcttgccttcagaggtctttggttaaaaaaaaagcaacagactaagtgaataggtgacctccccactcacttttctaaagactgtcataccactcggcctcctgagtaattggcactgcaggtacaggctaccatgccagtgaggaaggtactgctgtcctctgttgataagtaaaacgactgcagggtggtggtgctgcacacctttaatcccaagcactcaggaggcagagacaggtggatctctgagtccaagggcagtcagggctacacagagaaaccctgtctggaaatacaaaacaaaacaacaacaacaaacgaataacaacagtcttagctcagcatctaaagtggctttaattaatgattctgtgacaggggcggagcattctggttgaagaactgggctatatcgtggacaagcagcctttgtggatagagaacaggagtgaggcccgagctattgtgtggcttgccttgtttgagataggtgtctgcttagagtgactgaagctcagcccccgtgactgaacacctgtgccctgtgctttctcttacatccactttgcttgagcagtcgactgtgttggattggtcccttgttcaaatcaatggctttctgtaaattgtatttcacatatagaactgtgaggtgaaacagtttctaaaacagtccttcaattcttagctgggtttggaaacaaccaagggattctaatccttgccagtggtgtctagaagcctcctggtcctgagataactcagcctgatggggacagggacctcagcggcaagtgtgtacacacccatgcaggggcgggcatgaatgaggctgggcttcctatgcctgtgagcagatggaagccggccttccagataagtccagaagttaggaaatggcaggtttatgggaatactaatttcttccgtcccctcccaagaatgggatactcagaccacccaccttggtccacaacatttttaacatgcatacctaagtttgtatttttttttctttttctttcaaataagtatctctggataaatcaagtttagacattttcagcttcacttcagagtcctcatttttcatactgttttcaacagaagccccactttatctgggccagcattttatgtggatttatcgtcatccatgcctcttctaattggtgtgtgtgtgtgtgtgtgtgtctgtctgtctgtctgtctgtctgtgtctaccatcactgtgttgggggggtgctatgattttcaccattaaaaagctttaatgtttatggttgctttttttccacggaagtgtggtttttttttttttgcttgtgagatcttttgaaaacctttgaatggtactaacttatttttcttctcttccttgtatccttcctgctttttcttggcaagttttgggttgttcatctcagagtttttctttcatgctgttgtgggctgaattatgccttgccccattcacacgtcggtgttctgacagcctacccctaagaatgtaactgtatttggaaagagctttttaaaggggtaattaagttagaatgaggtcagtcggctgggccctaatccagtgtgactagtgtcctttgtaaggtgaagaaactggaacaagacacatatggagggggaccctgggaagacacgagggagacacaccatagagggccttagaagccagtcttgtgatgacaacttgatctctggctgcagtctctggtctcctgagaaaggaaggttgttttaggcatgcagtttgtaatgagctcaatctctgctgctatgattttccttacatctctactaatgtttttttaaaatatttgtttgtttatttatttattatatgtaagtacactgtagctgtcctcagacactccagaagagagagtcagatctcgttatggatggttgtgagccaccatgtggttgctgggatttgaactcctgaccttcggaagaacagtcgggtgctcttacctgctgagccatctcaccagccctctgctaatgttttatcagcactttaggtttatgaatggaggaccatgttgacacatatagccagctttttaaatggtggcagatcgggttacccagagggcttctttcttgcctgggacaatgtgccatgaatctacaagtacttaggttctacccgggcatgcttctcatgggctaagtaagaagaacacgcaagcagagtcagggccctagaagtgatggcattagaacgttaacctagggggaaaatgctgggaactttcacctagggtgacatggcttcttcattgacctcttattaccctgtagctagctcagagcctctgactcatttccttgcctgaacaccagctcccaagggccttccattcacagcagtccttcctctccagagagagctggccaagggttgcagctgggggtaaaccctggaggctgcagcccacacagggcagggctcagggtagttgggcccagctgctccatagagaactctgcacacaggcctgattcctgcctcacagtcactctctgtgtagaacattctgtggctgccagtagccattgactccaagcctggcgggtctccagtgctctctagttgggaagaaagagcttctctctatagctatgtgtgtgtgtgtgtgtgtgtgtgtgtgtgtatgtgtgtgtgtgtgtgtgtgtgtgtgtgcgcgcgcacgcgtgcatgtttgtttcaagttggagtttccctccgttgtggtttgtccatacagcccaggtctcgtctttgaacaagtgagtcttctgaaggacttgttcattgatagctctcctctgtgtctctgtgtctgccattcttagagaaaaaggatcatctctgcagcgtggttgtgctctctggaaggaaggaggcaacacgctgaactctactgtctacaactcaaaggcatgtttttatgaattaacaggagctatataaagtattttaccaaagtggctgggtctctggaagctttgctagaacagatgtttcatttggagtccgtggaagttgtttgcttggcttcctatgagtggcaccccaccttatcacctgctaccttcatggctgaatttccctaaagtaatacaattagggagatgaggaaaggtaatcctgttccttgtattcgtagttttaggtacttgagggtggacagtctttgtctatagacagaggcttgttaacagagtaggaacgaatgggggaacaggaaagacagtctgtcattctaactactgtctgactctccctgggcatccagcagttcctgatgctccacaggtctatagactcagtgtccccagaccatcccagtgtagatacagctattaagtcctagatgtccctaggcacttctatctgcttggctacaaattcccgtgactcttcttctgaattgggtactttatgagaacattcacagagctcaggaaggtgccgtgcttatagggttttattgtagtagttgccactctggaagagccaagtagtgtagtgaatgtggcaaggtgtcggggaggaggtgcagagtctccatgccctttccacgtgtgccgtgctcagagcacatccatgtgttccctgccctcaaagctgtcaggaccttgctggtgggttttcgtggaggcttcagtacttgattgatcattggccatggtacaaccagcctccttcgccaccactgaaggtgagcttgggcctgaaactttcagtgctctaatcatgcatagagctagtcctcctctcaaattacttaaaggtctcctaggaatcatctccttgccacaaatctaaaagcatttcttaaagataacaaaaactactcttatcagggaattccaaggtttttgatgttcttgctaagaactagggggtaaagatgagaaatatacttttattattattattattacagcacagctaggagccagtgtctgtgagtctgctgagtatgcagaaatgattgcttggcatgggtgtggtacttgtcacatggctttgctgctgctagctttagttttgatgatgagctgagaccattgagccacaaggactttgccttttctagactatgccttcttcatttctttctgggcccatagttggtttatgtcttgggacagctcgggtaggtgactcatcggccttcctttcccatgggcttccccacagttcctacttgatctctgaaaaggaggaggcagccacagtccctcctactgtagcagctgaaccaaagaatgcacctcagcacagcacagcacagcacagcacagcacagcacagcacagcacagcaagcagaaaggatccagtagcatcacagatgcaaagagtaggtctccctgagctccgctcctgccgctctgcacagtggttttcttcctcagtgcctttgtaggaagaagggagggctaaagctgagttggagcctccccaagtttgtagcccccacgtctgtgtaggtgacacttttacaatcttgagtgattgtaaggcgacacagaatttgagtcattcctgacatgttctaaggtcagacatggcaacgagctgcatttttctttcctctttcctccaaagatgcccgaaggttggaggttctggccctgggtcctgttgcaaggttttgtgatgactaacagtcattgccaacttagcaggatccagaatcacagaatctagaagatgatctctggatgtgattgggagcttttaggtgaagttgatttgggtgggtagacctaaatgccttgtttttcttttgaaatacaaagaaaatagaagcactgtaatgagttgctttggggacaaaatactgtaacttgcatgatgagatctggacatagaggtcacatggttcccttaggaacctggtctagtgcttactaagtcagcgtttgcccacaaacaatgagcatgcactgggtatgctcatggttattagttatcacatgagaggatacaaaacagaatcagccaagggccgggctcagaagtaaagtccaagggcacccagggcaaccttccaaggacattgagccagtaaagtcacacaggatatgcttaatcccaccgaaatgagttctgacagcgtgtatgagatgttactaatcagggaatcgcattagaggtgatcgcccaggctttattcaaggcatctactacataggcgtgttacctcctccctggcgggtatccaaattccagagaaccagaaggaaagcaggtgttcagcataagccacattgtctgtgcagcccagacaccttgggccgcacttatcagttaacagttcacccctccccacatccaagttccaaggtacctgccaaggaccaaccacagaagggcacagaggcccactgcatgtccgctttacttgcgtttacagtgatgggattaaaggcatgcaccaccaccaccaccacctggcaagacattttatcttgtctaaccatctcaggcagtcatttggaaacagaattggcatcactggagaatagttctgttttttgtgtaccgagaatttgttctctctgcacctgcttcattcctgtcattacagggatgcacattccctgtgtccccatcagtggggtaagcggaaaagcttctcgtttagccatcttgattggttgccccattacctttggaaatcacatttccttatctcagcactgagggcaaatagagtaggataagtaatggtccccagaaggttgttgaggagaaaacgaggtggtgcttaacacagtgcatgcacacagcaagtgcttaataaatgctcacttttactgatggcatgatatctcttgtttcatgttcagttaggctgagattttatttgtcaccgggcattgggccatgctgatgttcttctggttgcccctgtcaggctggaggtgtgttgcaccaagatcttgccacgtctatcactggaaacagtgtggggttttaatatcagttatacctctgagggtaaaatgtccacttcctccgatcctcccagtcatacagagcacctgaagagctagcgtgtgtctctccatgctgctaccccttcaactctcatgtcttctcaccagcctaagtgccctttgtcctggaagtatacacggaatatctcttatctcaaatgcttaagataagtatgttttaatttgagagtattgacattacacaaccggagatcttgaggttgcaaacctagtctaaacacaaaacttacttgaattttctgtgcaccttgtctgtgtatcctgaaagtaattttatgcaatatttttgtgtacctgtatttttaagtttttatctatttgtatatatattttttgcaggtacagggaactttaatggcattcaagagagtagggctccccttgggggggtgtggaatggagcctgtgaggggagcctctcagtgatgggggctgagctgggacagagattccagcagctgagggccactctcttcctctctgtccttgctggggtgggtggtccagggtttcttactccttggaagttctgtaggccatgaggtcctctaccctgcctctgtagccttcttctttgtcatgctaagaagtgagctttacaaagttgttgagagcaatgttagccccaatgtcaaaactggaagagtgggcatccctgttaaagtggcaggggacagtctggtcctcagtgtagcacagggttctccttagtgggccctccaatacctgattcaccaccttcttgctatcatagtacttggcagctttctccaggtacaatgtcaggttcatgactgacacactggggggggggggcgggtaggaacatggaaggccatgctaatgagcttcccattcagctctgggatggccttgcacacacacagccttggcagtgccagtagatacagggatggcattcagccccacgtgtatcatgccacagctttctagtgggacattcaccgtcttctgggtggtagtgatagcatggcctgtggtcatgagtccttcacagtgctagagttatcatggatgaccttagtagaggggcagggtgtggtactaagcagttggaggtgccataggcattgctgacacttttaaatgacttgtcatactattcctggttcacacctgtcatgaggcatcagcaaaagggacagagatgatgactcttttggctgtacccctcatatgacccctggccaccagcatgactcatctgatgttggtgggatctcattcctggcaatgtgtatgtaagggtgcacatgccacagtatgcatatggaggttagaggagaacgttcaggaatcagccttgctgtccttgcactaggtgagcccctggagactaagctcaagtttggtggaagcacctttatccaccgagccatggcactggccagcacctgagttttgacctaaggtcaggggtggaattttctactttaaaaaagccagcacttagaaagctttggattgaggggcatttggattttatatttctgcttaggaatgttcgatttaccatacttaatgtatcttccaaggcgactaaggagttcagtccaccctttggaagtcgatgcctccctgttttccaaggtcttcttgaacagccagaatctttttatgtttgcatgtttcctctacccagctttcggctttttacctcttaatgagtcctagggcataagaagggaaaagaatgccggatgtacagtggtaaagagcaagattttggaatcggataggcccgccccgcccattccccagctgcgtgactgaagagcgacaggcttaatcttcccaggcgctgctcccttccttccctgagagaggggatgacgatccctgcctcatgggctgagagcatcaaagcagacacactcatgaagatgcaggcttggtgtgtcggctgcccctgtcagtcctgggggtcccagatacgatggggtgctgtcgggttctcagactccgtgatgacaggcgtgctgctggaagaaatgtttgaactggcctctttaaagttcagtctctccaggtgatcctgcacacctgtgacatggctgatctcagggtataaatttcccgagcacacaaaatttccttgtcaccacgcacagctcattcctgatattagtcactgaacttggagccttctggttttgattggctagtcagggttcactgaggcaaattctttcctgcgatctctccatatgttcaggaaggggagtgtctgtgagctgcacagcagcagtgtgcacccgaggccaggagccagcagtgtgttgccattttcagtgagtcccagtgggcagctgggcagggtgattaatattttagtatctttgttctttctgtccggttataacaccgaagctgtttaaatcatgctgaaaacaacaagcctggcatttctctgctctgagctccccctcttccccgactcaagtcagaatcctcagcctatgaccaaggaagtgttttgggtaagaaaggatgggaaaagatggacgactcaggggaacaggatggttctcagtagcttcatgttggagaatgtattcaaaccgaagccttgaaggcacgccggaaagtgtttgtgtaagagggccgcttctcatcagaaggcacttcgtgtttggtggctgctcccaggtctgcttcctgagctcggtttgaacatttattatgtgcctgcttctgacactcttcatttgggacacacacttgagatctctcagcacatgcagtcctccaggaacctcagggtttaagtataacttagtggaagccagagagcagagagcgtggcttgatttcctaattcctttccgttctctcctctggttggccagcagtcatttattcagcctcctctgcatgaggctgtgagctaagattgagatctaagggttgaacgttatggttgatttataatctggatgtgccttaaacatttgtcttgcgtggcagctttttaaaaataagtctaactggatggcataattaaagatcataatttgaatacctcagaacctttagatattatgttttaagattttttttttatgtatgtaagaatactgttgctgtcttcagacacaccagaccagggcattggatctcattacacatggttgtgagccaccatgtggttgctgggaattgaactcaggacctctggaagtgctcttaaccactgagccatctctccagccctgtagaagtcttaaaaaaacaaacaaacaaacaaaaaaaccctaactaccttttgttgacagacgtctttctgcagttgctgacctttaacaataagacttagacaatagaatatattttgtaactgtctcaaagcagaatatttcaaccttatgataaataaaatcattgaatttgaatcagcaaagagaaattagattaattgggaagaaaaacttaatacaaaagaaaacatatgaaatagattgcctggaaccttacttctatggtaggaagacaaagcccccatgaccgttgttcttagtaacaggaggtgaaggatttgatcatgacagctccttacacatcagtgcctgccccatttgacaggtgagaaaacagacttcgagacttgagacttgcgtaggcacacatggctaataaatggccctgctccagcaggagattgtttatttacttcttggtgcagccatctatttctctaagtagatctctgcctgtaggctgagtggattctttgaacattacaaggctatgtccccatctggcaccttggcagtatgaccagccccttagcttctagatggctctctgcatatctcagcttatccctgcccaaatgcaagggagtctagaataagtccccagcagctccttcccatattctccattaggacatgatctttacccctggagttgtttgtttgttgggtgttttaccagctcctgtgccttgtcctaatggaaattcttgaaaagagaaaaggtcatgttttttgtttcctcatagactttgtgcctccatgtgtaagccaactttctaccactgatggtatacccgagagcatcagcttacaaagagaaaagccttatttagactcctagttttagaggtgccaagccatagtcaactgggctttgttgcttcaggtctgtggtgagactgtatttcacggcacgagcacatggcagaatgaatgaacctgtcccttgatgagtcaagaatcagtgagaaagaagagagaaactaggtccccacagttcctttcagaggtgtactgtcattggcttcaatcctcaaagctacctgggaacaggaccttcacacgctgaacttgggggacagttgaccaaaccatttcagatttgctagctgctgcattgtctccattggctccctctggggctccctgcagacgcctctcagcatctggtttctttacataaagactttatagtaggctccctgtatggctaagccagacacctctctgtgcaatctctatggaagcagccactgcgttatgtttcctcaggtctgtagtccacccggttcagtgggcactgtagatccatactttgtccttgcactgacctttaggatttctccgatgctatcagagaacacaaatttatgtcttcttgacactgatttggtttctgtctctacctcccaatggaataatgtagtaataatttcctaagacaatccagtcagaatctagggacggtgctagatgtagggtgaagatgtccttgggaaaagccctatgtgattctgatacacaggcctcccaccccacctacagaaattgccctgtgcagtgcctccatccccacagtggccccatgtggcactgtgcacatcagcttgtattttgagttgggggtcattgcttctatccatcaaagaatgtagcatattttcaggagcagtgtttatgttgaaaaaggtactacacactttgaacaactctcatttcaattgggaagattgttgcttataaaaaaataattttaagacttagagattagtgctgtcatcaagattggaatgctgtggaaaggccacatgcccctcaaaagcagggatgggcaatatttttcttcactaggctgttaagtcatagaaaatgataaaccacagttgatgaccaacttaacgattttgatgatggtaaattaacttaatcttcacattgacctaataaacttggtactgttattaatagttagggagagtgaagctgagggcagttaagtaattatgtcctgtcgaatctggatttgacccaagatccatttgctgacaaagtatgttttatttttagatttatttttatatgtgacctctgtgtgtgtgtgtgtgtgtgtgtgtgtgtgtatgtgcttgtctgtctgtctatgtctgcatgttacctctgcaggtacttatgggggcagaaggagggcgtcagatgtcttagagctacagttgtagcccaacatgggtgctaggaactgaactccaatcatctgagagcaacaagtgcttttaactgctgggctgtcatctctctagccctggaagatgggggggggagagagaaatagagagagagagagagagagagagagggagcaagtgtatgcatatggtggctaaagggtgagctcaggttctttcctcaacacctctgcttttccattctgcatcatgcagtaaggcaggtctcttgattgatactcagggctcaccaattcaactagtctagccagcttactactgggaattcttgtctctgtctcctgattgcaggcaggatgcttacactcacccagcatttatatgggtgctagagatctcatctcaggtccatatgtttgcatggcaaatgttttacccactgggccatctccccagcttcaagcattagacagaattacttcatcaatacttattgtaaatgtgacaagacagtgccccccccgtctctgtctctgtctctgtctctgtctctctctctctctctctctctctctctctctctgttcttttgtaaaagggtctcatgtagttcaggctggcctggaactcaattatgcagtcgtggatgaccttaaacttctaatcttcctgtctctgcctttcaaatgctaggataaaagttatgtactgctttctcttcaatgtaataattctacttaagagacattggaaagcaaatataattgcatgtttgtctacctttaccctataaaaggatgggagtaacagcaacacctaggaactagtagggcttgctatggttaatatgaagggaacacataataaaagcacaataggcagtactaaagtatcaaagcttttttttttttaaagtgtattctatagcataggcacctcctttatcattcccaaggatgtactacaactatgaaatgaagatactgccatgggcttcatggaatggctgtccgtgtgtccttcactaagctgtcggttgtcagtcagcttcatgtacagccttcccagcatcccctggagatgctgaagcaggagtctgccttgtctgttttgttaagccatgcttgcaggaactacgctagagcagtggttttcaacctgtgcattcagacctgtggggtggagggcggtgtcaaacaaccctttcataggggtagcctaagaccatggaaaacacagatttttatgttaactattcataacagtagcaaaattacagttaggaaatagtaacaaaaatgcttttatggctgaggtcaccacaacttggggaactgcattaaaaggtcacagcagtagggaggttgagaaccggtgctttaaagatgctgtggtcctggaagacaggagtgttgcctgcttccccttgctccctgggcttcctgtctgcatcactctgcaatgctgcctctttcacactggcagaagccctcaccctactcagctgccctcatccttctcagaagccctcaccctcttcagaagcattctcgctagctctttattttcaccgcaaacctttccttcatttttcagacctgaaccacacctcggatatgtggagagtcttttctttttttctcccctctgtatctagttaacagttctctgtactaaacttttctcttataaaagcaattggtgggaattctgcctcttcactggaccctgactgataagcctgtaagactcaggcttgtgctgctcagcttccgtttcacagttactgtcttcatctgagggagctgttcccctccgcagctgcgacgctgtgcttagatgctgtggggatgctgcccttcagacaggcttcaagggcaagaacatgctgacaaactcatcttacatctctgatgtgctttcttggatctgtagggtggacttcctcggtgttgattccctctgaaagcattgccacaacgtggaagagtaccgttttgatagacaatagagtttgtttctctttggtccccgataggatgtacctccatctccatttatggtaatgcagtcatcctttggtagcatgagggattgcttccaggacccccacagataccaaagtctggaaatgttcaagtccttgtatagatgctgaagcatctgcatatgacttgtgtgtatctctctgtacgttttcagtatctactacagtgtaaacataaaagtggttgttatgctggatcatctgtacagcaacgacattgacaaaagccccaacaccttcattacgatgtgggttgtttttttttgtttttgtttttctgttaattttccatctaaagctggttgaattgatactgtgggctgactgtagtcatcgatacagaaactgtgagctgactacataggaagcttctagccgagcattggtttataagtgaagtttgagtaatgcctccctctcaggttgctgagagcgtgagatgacacataagccatctagcacagtactgggcctgtaaagagtaacaccttcccttcatggtacttgctgctctgtgatctacagggaggtcaactctgacaactagactaaattattaattcaaaaatatttttttgttgttgtaaaaaaatagtggtggggggaggctaactgatatgcaggcaactgcatagcaagtgatcctctcttggacttcttgcagaagtctcttctttttaaagaaagatgtgtaagaaagaattggcttgtctcgtgtcttctggaaggtgtgtctgcctgagagccggaagctaattatgtcaggaaccagcaaagaaactcccctgaaggtaaagatgtcactgaagtcaggggagcacatcaatggtggttggcagaatgctttaaccaggatgcctacatcttcccctctaaaacccatggacagctgtctacatggccaaagagcctttccgtccaggggtggcgacgtgtgctaggatcccatagttgaggaggctgaggcaggggagggtgaattgaaggctgtggttacatggaagaccccatctgaaaaacaacaaaatgaagagctttgtacatgtgactcaaggcatgggggcctgagttgggaagattggcttggtcatctcatggctcaatgccatagagcagttcttagacgtggaagatggcagttggacagttgtgatgtctagtgggcccactgacatcacagcggtctttagaagtagaaaagatggaaagatggatcagtggttaagagtgtgagctgctcttccagagggcccaagtgtagttcccagtgtctgctttgtgcggctcacaaacacctctgacttcagctcccggaaacccaacctcctcttctagacttgggagtacctgcactttatatgaacattcccacgtataaacacacacaaacacataactaaaacaatgaatcttgtcttaaaatggacagtcagcatgagattaatttgatgtgagaaggacttgtccaatcactgctggcttgaaggtatttggggagggttctgggaaccagtaaaggggaagaaatggcttctcccctaaagcttctaggaagcaatagacatgtggatgctgaccacgtgagacctggcatcagactgcccacctccctcaagtgaggtgataaatttgtgtggatttagccatttaatcagtggtaatttgttgccacagcaggaggaggctgatgtagatgaaaggagcctgggtacttcatgccttcctcgccctcccaatcagccatccccaggggcacttcatgttgctgccatgtgagacaattgacatggtgtttaatctactttgagtcaggtttttctacttctaacccaaattgtcctgtgcatgatccttccgtgtttagcagagcaccctgtattggccagacggtacgtgagtattcactgggtagttaaagagaggttagtgagaaaagaatctcagaatcctcatctgaaaaagcactgctgctttctgattcagagtatgtatgataactcttttcaaataaaacacaaagggtgcttggaaggatggataaattatttgaatgccgagatggctgggagaccagcaggtgcactttcaaattgccagactcatttcctattgtgacctccaggcttccaaattctcctctccgaaatagcatttcagcaggccctgcaaacacgccaagaagtgattatttttacaaatccagatgatttcctaattttggatcactcaggcagaggtagaaatgaaggggaacatggactgtttttccatctccgcagagtgggaacagacgagaactggctttaaacaaatgttgctgacaaccgcagccgtggttatcatcggacagctgttcagtggcctctgtgaactcagctggaggcccagcccagctcaagacgtgaagggccaaaggtcaaatgctatttcagttggtttccaatgcttccctccaccacttctggggttcgaattaattttgtagtttctgttccaaagaccttggtaaggctcacaatcgccctctacgatcccttgatttgctccgccaccccccaccccacctagtgtacttgtccagtcttgactctcttctctctctctcagtctatttttctaaagttagttcatgacctcgggaaagtagaattcctcttagtgccaggtccagccactgcctagctactgtgggttctgatcaactaatggcctaatggctttgctcgtgagcatgcccaccaagatttcaatcttccatgctatgtggttctaatgttagcgtgggcagggtttgctgggaactctgaactgggctgccatatccaagctgggtggtgagctccttcgctgctcggtatctgacctggtctctcacaggatcagttctcagaagttcagatgttgcagactttcttttccagtagtgagctagaaaggtttctaagagattttgagagatggaggactgtagggctagcacacactgcggaagacatagcacactgtcagccatctgcaaagcactctgattgcattgctggtatttctgtgttcttgtttatttatttgaatgtttcctattttctgatttatgtatttatttgtgtctttgtttatttatttatttacatcctgattgcaaccccctccctcttctcttcccaatcccagcctcacaaacccctcaccccattaccttctctcctcatcaaagaaggagaaggccccctaggtaccaccccatcctgggactaagggcgtatcctctcccactaaggccagataagacaaggggaaggggatccaaagacaggcaacagagtcatagcccccgctccagttgttaggcaacccacatgaagaccactctgaacatctgatacaaatgtgtgatgggcccaggtccagctcctgtatgctcttttgttggtggttcagtctctgtgagcccccaagggcacagattagttgactgtaggtcttcctgtggtgtccttgactcttccggctcccgcaatcctagcccccactcttccacaagactcccaaagctccgccttaaagtttggctgcgtgtctttgcatccatttctatcagctgctggatgaagcctttcagaggacagatgtacataaagtggggggaatagaaccagccatttcacgtgttaatgggcaggacaaaggctcctgcacaaagcatgcttggagcacgtggggtaaaaaatggctagatcagaataaaatatcaggaaacagatcagagccaagtacagttactggcattgagtcataccagcttggtatgtataaggtaatcagacttccttgtaacatgtcttagggttagatattattgtattgcacacacacagagagagagagagagagagagagagagagagagagagagagagagagagagaagagtttatgcactcagtgttaagaggaacagactgcagtgagcacatgatatgtgaactgtatcatgctaaggcagaaatatttatatttaattggattaagagaagagcataaagctctcaggccacatcagaaaagtttctattgtgcatggtggttagcgaagatgttcataactagtcagtgtacagagaaaattcatctgtggagtgctcagccacagtgggatatccacgtcacacgaagcttggggacctcgtgggcaagtagtcagcttgtaaggaccagaggcctgagaggactggcgggaaacagtaaggcctttgcactcctgaacttaccagcagctgcagttacctgcgggagacctgcaggagagcaagccagtcagcactgcagcatgagatgtgtgtgcctcatgagccccacctctaactgagcatctgtggatagttgatgacttccgggagcagaagacactgcttatctaatggcaaatgagaggggaaaaaagggacaggagatgcatggagctcccaggtctacaagggatgacttaactcagtgacttaacttcattctgtctggtcacacagcttaaggctttcaccccttcccaatggtgccctgggttggggaccaagcatgtgggctcttgggagacattgggattctaatgatgtttactgggtgcaaagcacataatattttcagtattatgaggcatgagccgctataaattctgctggaggccatctttattaccagagggacatatttagaaaaataagaaattactgtacccaggggagtagattacagttgtattaaacatggataggccatgcgtaaggtctcaagcagggttgattttctctgtagattgaacacttagtaatgaagcatgagatgaaagcacactggtgagggtgaccctgtttgtctcttcagtgagatattgcaaccaacctctgattactttgagtcagtctggaagaagttaattcagaagagaagtgctggagggacgggaggggagggctagcagaaacactggagtgtattttaaaatcatggaccagaagctttgccgcattaagtttgtgttaggtactactgctgcttgcagaggacagcaggaggcagtgttgttcatcccgggttcctggctctgagtgaagggctgagcacaggctgtgtgttggacagatgatatggggtgggtagaaggccccagctttgatggaggaaggtcacaaggtcttgtttcaggatgttagctggactttactggtgacttagagcagatacagagtcctgtgataccacttatgagaacatctgctgcacaaatggaaagaagatcctgatttgaaattaatcaggaggttctgtcatccccagacgtcatgctggcctttgcaggaatgatcagaccaatcagatttacagaaacagaaacaaatcacccgtttatgtgctgctagatgcaaatatgcctgtgagtaataataataataataatatcctcactggagaatctgaaggcatgtaaatcattaaagtattaaacttatcatttttgatgctaggtatgctgatttagaatttatagctaatttcatcctttttagggaatgtttcgtgctcagataaacatatgtaatcaagacagaacaactgtgttccccagaaagttctctcagacccttttgtgtccatcctgctcgccatgcccagtgtctaggcattactggttgttttctgtctgcatagtcgtgccttttctaaagtgaaatataaacatagttaagaaacctgtcacttgttggacctggtgcatgtgcattctagatccatccatgggttgcgtgtatttgaccatctattgccttttattagtgaggaatattcccacagtgtgaaggcagcagtttgattccccatctaccattaaaaggacggcagtcagagcaatttacaccaaagtgcatacccatttgtattagggtgtccgggtgaacaaatgtattgggtaggattgttggattctatgataagcatgtatttctcctataatgacttttccagagtagcagaggccattcccatgtatatgaagacgggatgtatgtgcgtagtggctgtgtggaatagagtcctaccttggatagttgtcatatagagttgtgtcttgggacgttgttccttgagaactgtccaccccatttttaaaaacaggatatctcacaggaacctgaggctcattagttagggtaggctcgctggtcagtgattatcagagatctccctgtctctctttctccagtactttgattgcaagtgtgagccatcatacatgaattccgaggcttgaactcaagttcttgtgtttatgcttcagatacgttgcagactgaagcattgccgaggccccgttcttagcatctcgttaatacattttatagtgtaaagtgtccttgcctttccaaagtgcacagcctccttttaagtaactatagttttgtagtaaggccattttggaaaatgatcggagtcagttcttactatttgtggtggttatcgtgtgtaaagtctccatgaacactgcattagttgacaccatgccactgttcttagggggatgggaggttagattcatagaaccatgttttagtcaaccatttaataagtaatcttgctttcattgtgtttctgtttgtgtcactgtagataaagaaattagtttgccacgtgaggactagctctatgaaacacattaaatctcaaactgggcatgggggtgtgcgtctttaattctggcactcagaaagcagaggcagatggatcccagtgagttcaaggctagcctggtctccatagtgaacttgaggctagccagggcttcatccttagaaagctatctaaaaacaaacaacaaacaaacaaaacaacctacttcaaatctttccttccatatttcacacactagtgcagacttacacttttgcttttatgttcaaaaatcttcagtggcagtgaagcatagcaacaagaacacacacactcaattcttataaagtaatgtaaatgctgagacccaaattttgtcatactactagctgtagagtatgtgtttaatattcagagacagattaatgcactttccaaacctcctttgctggcaagtaattagaagttttctagattgactgccaatatgatataggtcccaaagaaatcacttctcttttccgagacaggacaataaattggttttcctgaatatactgggtaaagaatccgagttcttgaccttgaatatttcattggtcgtgctgtatgcagtggggaccagaatgacattcgctgaaatgcctgagatttataacataatagcttgagcatatgtgccaagaaatagaaatcttaaaccctatcaaatcaagattaattacctattaaaatgctaacacgtagcgtagttcactcagtgtaacaggcctgctccccgagtatattgttacaaagcacaccagctcagctgctacccggaacctcccgtgtcccatctcaccactggcggtgggtgaagcatgctgcccagtcattcttctccgggtggctctggctcctgctcaggacctttccaccacaaagcgcatgctgctctctggaaactgagaaattccctggctttgtactgctgccaaaagcctgttgcttccctcatcattaaccactccatatctatccctttctcgcttggtggacagtaacccacacagcgctcccatgacaaggaaaacagtagtttgcttcccctcctacaagccttgaaaaaatggatcccatgggcggaatctcttcttgctgttcagctttcctttgcattcatggtttcaactgttgtccaggtggcagtgccagaaatgtgtggggaaaacgctcatgagatcatctcaccaaccctgccgctagactccaacagcaagtcatggcgttgctaagttggcttctaatgaatggtcagtcagcaaatatttagtgagaatctattatgtggccaactctcttctgggcttggtgacaccaagaatggagggtaagattgtccctgaccctgagcagctattcttctttcttatgctaaatggctgtagttcaaatatcctgtattagaacacaatgggaaagaagtgctggatcagggatcgagataaatagcagcatatttaaactatcatcattctttaaaaagtcggccagggtgtttgaaaagtgttctgttaaaaaaaaaagaagataaagtacaaccttttgaaaattttaatatctcaaatttatgcaaagtcaaacatattacaggcttttcaaattcacaccttatacatcagtttccttcaacaagcaattatgcctcagctccttgcatagcacttctgtgttcttggccttgtgggtcattaccatgctccacattctgaaggacacccagcacatgtccttttgtgagatccaggaccgtctagctacaaatggtgtgacaagctgcacctcttcatttgtttttacaaaacaaactctgcggcactgacgtgaaatatcatgtctttcctttctcactctcagtgggagaagggggaagagaagttccttcgtcattctctttgtggattttggctttctttgggaagtgccaatacgcattcattttttatgttgttcaggaaagctgtaagccgtcttctaagccacaaagcaaactcagtcccgaagggttctccaagtgcaggtcagaaaggtgggacgctttgtttttctaggcagagagagcatgtataatacacttgcaacctgcttagcttcccgggccctctacgtgagccagcttctctgctaaggaaccccacatcaatctgtcactggtggtcagcggagcagcgaagagccagtgttctgtgaaccgacgttggaatgacttgcctcccagccggtgatcaatctgtgctggacagcaacgtgtttgcctctacaaacgagctgggcccctctgccacatatctctgccaacttttgaaagaaagagtctgtttcagttcttttgggggtaaagacaaaagacccgtctctctttacacaaccagctattgaactgtccacacaaagattcacagccagtatcctacaaaaaattgttttgagaagccaggaagttatcaaaaagccatggggggggtggggggggtataggtagtatgaatatgcacacatacctaacagagtaaacatctgtttttcttcagcaaagatgatgtgctcatgatgctagatgctccgttcctgggaagttcttaggtaaatatagaaagactctgattctggagttcagagttcaggatgctagttgacttctctctgctccagttgaaggcagtgctgtgaaaatatagtcatctttgcctgaggcttatcatgatcattgtgggccacagagcgaagggcccatgctgctgagtgactcacgtttctaccaagtcattgctacagggagcactgactggcgctctcgccagctgccaacactgaaggtttttcttgtagttcactgtggcagagtggggcttggataacccagcaagcatggtcagtagccagacttggatttggtagaagtgggaagtaacagaggtaggcagacagaaagtagatgactagggagaacttcctgtgcccagtaagccatggtacctgcagggtaggggtgaatccaggccaacagaagtagatgatagcaaagtggaaaacttggaagttcccaaagaaaagtgtgtgtttggtggagagttagaaaccacagctgttggttaaccagatggcccgctgggtaaacagattgctcggttgtcatttagtagaacaatataaagaacatagatgtttttgtcttttatggtagataagttccttgtttctccttagagagcacaactctctagacccagggaggaaccagtagagaggacacagatgagtctggaagaaggaagttatttgggccttacactgctactcagctgggcccctgtgaccgtggaaggttcatagatgaacctaatggacccttccaaaagcaaactttgtgaacccagaggagactaaactctgtggccacatttgacgatcccttgggatgggaactgtgtgtgatcctttctttttaatgctctctacttacacaaagtaggagatgatttctgatggacgagtaatttgatgtttgattccattctggcacagagaaaagaactcaaagctctaagctgcttcagtaactaagttaatgagttagccccaaacacagatagtctcaactcaagaattctgatgttgccctcttaagtgtgatatacaaccttctagtcttcaagcctctctctgagggtggtgtgcaaggacatactacagaaggcttattatcttctttaacattaatggccacccctgctcggatattttcaggcacccaagtaattctttctagtcccaattagctctttttaaaaataacattttaaatttattcttcaaaaatgttaacaccaggcatggtgacatatgccttaatcctaagcacttggaagtcagaggcaggtagatctctgagttctaagccagcctggtctatgcaatgagttccaggacaaccagggctacatagtgagagcctgtctcacaagcaaacaagtaaaaggaagaatgatttcatgcatatgcacaatgtaccccttctgtcttccctttccaagcccccagacacctccaacacattctcttaaaaagacaagagacctcatggaggaggcccataagttcgacttttgtcggccacacctacaaaggaaaacaaaagtactttccctccttctgaagccatcggctgctcctagttcctcagcttgaggtggggtctcatgagcttttcctcggccatgttggaattttgattgctttgctctcatgtagattttatgtatgtaattacagctaacgtgagttcatgagcagagcagccatggtatgtctagaagaccacatttcacaggacttgccttattctacacctcttatactctttccgacctcccttctgtggtgtttcttgagcctcgggggagagaatgtagatgccctatttaggactaagtagtcacagtcacttcttctcagcattttgaccagtcatgagtgtctgcattgaccactgcccatctcaaaaaggaaactttttttgactaagatcaagagaagcacaaatctacgagtgtaaatacatatttagaagcagtttgacaggataaccatttggtgcctatggccataccaccctgaacacacccaatctcatctgatcttggaagataaaccatttggcaaaacaacagcaaacactagtaagtttccccacgggcccacgacttccccagctctaggcttttgaccaagtctttagcactgggcatgaattctctcccatggagcaggcctctgaaagtggccttcaaccgccatgccactattgtacatttgcctggaaggtcaagattgtagttttcagggtcaagcacagggtaaactattgatgtctcttcttccccactggccagtatatcaccttctggcactgtgaaagctggccagaagagaggaagtttcctgggagatggatttttctgtgtcctgagtaaagcagtgttatatctactaggataggcaattggaaccaatagtgttctagtttcatttctattgctgtggtaaaataccatgacaaaaaagccacttagaggtttgccttacaatattccatcattgtggggaagccaagggaggaacttaaaatagcagtcacgttatagccaagaacagagagtacgtttatgaatgcctatttgtttgcttgtgcttagctcaatttcttcactcttaaacaatttgagaccaccttgcctaaggaatggtgccaccaacagtggactgggtctttcaacatcaattaacttaattaagagaatcctacatagacatgcccacgggccaacccaatgtagataatccttctgtgaaattacctagccagataaatcttgcttctatcacaataagtagcaatatagtaagtagcctgtgttgttttggagccctctggggcctacctagccagtacctccaatagggaggtatctcatgccttgcactaagatttctaattaataacccatgtcttctgggaacagcattatgcactcatgtaaggtacctctacttctgcttaaacttacctccttaaagctcttttataaaaaaaaaatgcatttgtttgtttgcttgcttgccttatttgtgtgtatgtgaagggatgggcagatgtgtaccatggcaagtgtgtggaggtcagacgacagctggtggaagtcagttatactcttctgtggtgtagttcctggaattaaaatcagatcttccggcttggtggtaagctaaaacatcttgctggctatcagtcagctcttttgtttttgaaattaagtatctcagtctttaatcaggtttccaaatcccactgactcttgagtgtaaattaactccctttagcatttatgtccagagatgttgaatcactgatgctcatttccttgacatccctagttaagcatcttaaatcttgagacgcatcttatatccttaggagtctgagctgttgaagtccaccactgacacctgtcaccaccaccattcaccctttttgctccaaaatgacaacttaggcttacataaagacaaacaaggtgtaaattgatataagtgaagccagatgtgttggctggctcacatataatcttggcacttggaaggttgaagcaggaggattgctcattctacactagtctgagctacatagagtactccaagttagcctctgatatatattggggcctttctcaaagaaaatctttgtttttatgataaagaaaacatgactttagagtaatggacttttgtagggttgagggaaaatgcagggaaaccaatccagagatggtttgaagtagttcagttataagacggtgctggcctaaaccggagtattttaagcaagataagagagctgtcagatctgataggaagtattattagtaggacaaagtggttagttgaattctgattggtacaataaatgacaatgccattcatggtccaggagaccaggaaagaggaacacatggagatgaaatgaagaggccattgagttcaaggatgcccgaggtcatcttagttatttcaaagatagtatgctcctttggaggccgaagttcaagcaagaactatgcccagaactataggtatgaatcaagccatggtaataaattagaaaaagtggagttgagggctaagccaggggtctgaggaggaccttcatttatgggttcagtgatgctacacagccatcagagagcatgaggtaaattggagtggttagcaagggtaaatgatatttgatcaaatgtcaaaggtcccttctactttaatcttctctgttttaatcattttagcctttcatactcagaattacattattctttatgtttcttgtttggttccaggaggaaatgtggagtttggctttgaggtaagggaagcaggtgacaaggttgagacccagcagtgagatcaagtctgggtgctggagactgagaggaggccagccctggcaaagtgaacagagagtcacttagggaatagtcactttgggaaggttgatctagattgttctgtgaacttactggggattccacagaacgatggctgctgtggtagaggagggagctgactgacagagtaaactggcactgatggaaggtggcacaggtatcgcaggtatccaatagctggagaaacctgcagtaaatgtagggggagagttctgtggcatggtggctctgaaggtttatagcaggaccttggagagggatgggaaaaccagtgatgagaggaagcaatgagaaaaaaaaacaattcccagccttggagcctgcacaagtgttggaagaaacaaattcccaaaatcgagattagaacatttcctcagtggcatctggctcagggtttcccaagtgggttctgacagattacgcagttgtaagccattgagtctgtagagtattcctctgctcttctgtgctctcttcctgccctttcaagaagcctagtgaggttgtccagggttctagagacagcgagtgtatgcagctttcctcagaggttgaacatcccatgtgggcaggaactcaggtatagagtagaccttgtgtagcatctcttctccatatttccatgtactctatgggactagaaagaaagaaaatgctaagtgttccacaccacacatccccttccctatcaggaaagagcattgctggtgctctcctgacgaaagcccgggagttaaaatggaaaaaagcatgctattggtactagccatcaagagctgttctgtggagaagataagatggtttgcttgaaggtggaaggccattctataaatggacaccaactccctaattgaggaccatagttcagagccagcttcccatgtagcaagccaggcagtttgcaaataccggggaatccagattcaggggatctaacacccgcctcaggatccatgcttgaaaaaatacacatctgaaaacacacacacacacccacacaaatacatttcaaaagaatcttgacaaacaatggtttcatcctacttagtgcaactgaaaagtcgtgtgtgtgtgtgtgtgtgtgtgtgtgtgtgtgtgtgtgtgtgtgtttgtaccattgaacctgggacatgacataaactaagcacacactgaacttctctgctagcctagccccatctgtcatatttgatgcagttatggtctgtgtcctctggagttggggaccagacccaagtagggctccctaatgttctgtgacgtacttgagaataggtcagggccagtaaactacagcttgttgctgtttttttggatggtctatgtgctaagaagaaaaaagtaatgattagaaaagctcaaaaaaaaaaaactgttttgtgacatgaaaattataggaaattcaaagtcagtgttcataaagctacatgtttccaaaaccacggccatacttacttagttacacattgtccacagttccttttgtgttaggatacaacactgatggttgtgacaaaaacatggcctgcaaagccaggcctattgcagaaaatgtttaccaacccctggtccaaagtcacagctcccaaattgcctggcagacctgctaaagcacagattctggtttcagaagacccaagactggcccgaaagagtctacatgtccaagtctttcattaccagcacataaatgcatacacacacacacactatgttgtaagaggttatcatatttctgaagcagaaatgggcttatttcacttcattcccaagggtaaaataaagtgcaacagctttgagttttatgttgggaagaactttgtaatgatttaagatagccgtggaatcaccgaggtggccaccaggaaaagtgaaactggaaaggactgaagaggaggcttatgttggggggatggctgacgggacctctcccacctgtgcctgtatctttcttcttgcctccctcccctacagcagttttctatacagactgagtccaacttgaaatcttacaggtacccgagtgctgagctacaagctcaccaccacatctgctcagcttagtatgattgacaaccagaagtgagatgggaaagcagacaggagacttcatctgacaggggcagcattaattagtctctcaggccgcacctctgttggctatctctgtaaacaggaagagcgagctgcgggagctggtcacagtaaactcttaaagagcaaatgctctgctaggagttggttttgtttaagttttattttcatttacccctgtgcaggtgagcacatgcctgcctgcctgcctgcctgcctgcctgcccgcctgcctgcctgcctgcctgcctttctgtattcctgtatgctacatgccacctgtatgtggagtgcctgcagagattaggagatggtgtcagatcccctagagctggagttagcagatggtcctaagctgcccactgtgggtgctgggaactgaactctagtcctctgcaagggcctgtgactgctgagccacccgtttccccagcccttcagctgtgaatttcatttttagtttgtctttatgatcgctagtatgcgtttacaaagctgcagttggtggacccacacaccttcagctgtgcacgcgcagagcagctaacggacaagcctgctccccggtcctctttgcttcctttctcccacagcatgttttctcagcctcagggagagagtacacttgaggttggatttgccagctgcaagtcattttaggtcctgacgagtgaatccccttgttaatggctggctcctttaagacattctttgggggagaaataggaggacagaaactggccattttgagcaagctgatgactgttggaggccaaacccatttagacagatgagtaagtcaggatgtaagcagcctgatatttaaccattgacaaatttcaaaatcataaaactcattaagcctagttatctgctcacaatccagtgagtcctaaatgctggtcttagagttttctaccttgaactctttatttcagctcgtaacaggcctttgaagacatgatttatgcttcttaatgcccctgggaagttaagtattttcatatttattgtagggaagagtgttctgtagttgcttgcttgttctaaaatcagtttggctggaaaaggacatgagcattctgacctcagctccatatccaaaccaggagtcagcacttgaaaaaaacgtgactcagtgtcttgcccagagttttcttggttccccagacttaggggaagaacagatgtgggaggccaaactcaaacaatgctgcttttttctgtaataaactggcctggatccctctgtccagagctccgtccagagctccatccagagcttggcttggtgatagagccaagtgcctttcagctccttcagactcttgagtcagttcttcagcacctaccctatcatgccggttacctgactgttgtcccgacagggaaagcctgagcagctcagatgggatctgtcttaagcatgtcggtgatctttccatcaacagttctctttatctgtgtgtgctgacattttcaaaaccatcatttgatgggccagatggcaggtaaaggtgcttgctgccaaggctgatgactgagcttgctctccacgacccacatggtagaaggagagaattgactcctgcaggttgtcctatgaccatcacatacacactgtcatatgcacatagctacacatagacttagatgggtgaataatataacagaaacattttaaaattatgatttcagctgccctcttacccctgtgttcacagtgcacctgctcactttgagtcgcctttcctgaggtccgtgggctagtacacttattcatctatgaagtcagggagggcatactttaagaaatatctaagactaacaagaatctattacaggggccaggagtatagctcagtgttgactacttgcctagtacacacacacacagagccctgagttcaaagcctcatccctgcaagttaataatgatgatgataaggcatggcatatctgaagtagtagaagaatgagaacctcatcatcgtaagcagaggaagtctgaggtgatgaatatagttattgcttagaatatctttatttgatgcacatgggaatcaatgtatcacatcgacctcagcagcatgtccaattactgtatgtcaaatgaaaaaaatttctagtgttttagcacttaatagagtattttcggatccatgctattcagttggccacaaggcttataatttctttgtctttacccattccagaacaagaaccagaattcccgtgcagtacaccactgaagaattctttccccgtagaaactctgtttttgcatacttctctcttttttaaaaattcattttgactttacattgttttaattggctgagtgtgtatttaccacatacaatatgttttgaaatatgtatacattgaactgcatagcacatgatatatcaagctaattaacatactatgtctcaaagctaaacttgtatatatatatatatatatatatatatatatatatatatatatgtatatgtcatatacataatgtatatataatatatattggtttttcaagacagggcttttctgtgtagccctggatgtcctgtaacttgctctgtagaccaggttggcctcaacctcagagatctgccttcctctgccttctgagtgctgggatgaaaggcgtgcaccaccaccacttgccttaaaatactttccttgttacatgatttccatgttttaaaaagacttcggttgtttcttactatataaatgaagataagcctttaaggtgttatttaaaacctttaaatgtatccctaattttcttcgagcatgcaagctgctctttaaagagttccatgtgtgtttgtttctttcctcttcccgttcttggtgttatctaagtggcgagcaccaagccagagcacactgactgcagtgaccagtttcacagctctccagctcttgtgtgtttttagggaactggtgtgttttcacgatgcagagagcagtgcaagggcagtagaccattgtgcacagcctgcttcacagggtgactgatgcattcttcaagtctggtctctgctggactctgaccctgcccccctccctctgcatgctcttcctgggggccctgccctattcctgataactaacatctccaatcctctctgtggctccagccttggggaagggctcttggtgtttccagccatgctttccacaatcgcagatctcatcttcagctgtcctcagcatctgaggggggcctgtgtgttcatatgagtaatatacagcccagtgccctccccgctggcctctcacactcattctaattttttaaagatgtatttatttttatgtgtatgagtattttgcttacatgtatgtctgtgtaccatgcacgtgcctggtgcccacacaggtcagaaaagggcattggatcccctagaactggagttgttatagacagtcgtgaaccatcatgtggatgctagaaattgaacctagacctgcaagaacagcgagtgctcttaatcactgagctatctgtccagcctctgttcttttcagtgtcactatcccaacttgtcttatagattagcaatctgttccagcccctcagctgggtcgatgtcggcctcagccctgatttgagagctccttttctttttagagctgtgcccacctgctgcctttcagtgtgccgttcagtgtcccttccttctgacagaattactttctgaagaaattaacccgatttgtgttatttttttttcatactaaatacctctggtggtttttgttttgttttgttttgttttgttttgtttttgtttttcgagacagggtttctctgtatagccctggctgtcctggaactcactttgtagaccaggctggcctcaaactcagaaatctgcctgcctctgcctgccgagtgctgggattaaaggtgtgcgccaccacacccggcctctggtggtttcttgtgtggacattaaaataacaacttccagcagctggcagcctgcagtccaccatgggccccagcagcctcgcctagtatgtagctaacctggccctagcagccccactccctcctggacattgttcactctgcacaggacattctgagagaccccactgccattcctcatgaagtcttctgcaccatcttaggtgtagttcccttacctaccccatgacatcttaagcagaaacttaaatattcaccatgttggagggcctcattttaacatctgtgcaccctgcctccaggaacttgctatgttcctcagaaaaaggggactatgattttttttttttttacagctcagtattttttccacacataaagggttattatgcatataaaacatacagtttagtgagtttggacagaacatacactcacagagccgtcactctccagctctttttgttccaatagtgctaacagatggctcaggtggagtaaatgaacatgtgacaaatggcactgtaaactgaaggtgccaagaaagacttgtgatagagtgtgtgtgtgtgtgtgtgtgtgtgtgtgtggtgctaggattgaacctgaggccttacatgtgcaaggcaagcactctaccactgagctacagccctggtgtgatagaggaccctcgacttcatccaaaccagtaatctaatgtacctttccattgcaaatactgacagtagagctgtgggtgagaatccacctatttctactctataggtgtagtgaagtgtctgggcagggttacacacctaataaccaaaggagtcctggtttcagctccgactggtctggagtctgagctcacgcttgtccaccgtgtcaggatactagctccttgggaggatagtgcttgtgatcatacagcaccagggagcccccgttggaagcctgtgggtttgtaggagactagaactatttcacacctggcttcctgactgcgcccttatcttgtgtggccttactcttgtttgattcacaaagaaaacttgcagaccaggagtgaactggttcaaccttcttgtcctcagcctcctgggtatcctgggggaagagaaggctttaaaccacacctgacccataaacaatgtatcctgaaggtaacagtgttagtattgtagtatgtaaaccttgagctaataaaaatcaaaggagtctaatttggaaagtacacagaaggttaggggaaagcttgtaaatattttcaaagtctctgcatttaattctatcaccagctagcaaaataaatagtccagctgccagctctgaagcagacgcgtgttggaaatgaaatgttaatagtttaaatactttggtcattagaaatcaaaaggaacatggagtacactttctagtttatgagaaacaaggtgaaagttccccaaacccttttgtggtaactgcatttaaaattgcttcctcatcttttattttaatggctaatagtatggtaaacacaccattatggtctggattttttttttttcttttcctccttctttggctatttagatgcaagatttggaagtaagtagagaacagaaatcaggagatgttaacttctgcttttccatgtgtctgagctgcgtgctgtagactgcaagctacacgccagagtttttctgaggaatgggaagttgctttcaataatgtgctaagattgacctgaaatatttagctagcacatctgcttgcaagcactggccttctgcaaggaagtcatactggaattaattaactctgtttggtactctgaaactttgctccacatcttgttttaccataataaaacagaaaatgaacgaggattcctttatttttctttgagaacaacaacaacaacaaagctaagtgaaaaagaaaaaagaatcatcggtaaagtaaatgttgagaataattaacagagttagaacttggtcttcagtgattcctctttaacttgcagttacagtgaagtcggatgtcttgtgcccgttcctacaggagcatttacgaaatctttaactttattgttgaggaatgaagagtttgaatagagaggggactactgcgtgctagggtgcttagagtgttgtgggacattttctgaactcacatgtaatcctgctcggaaaggggaaggaaggcactttctgagacactggagcaaacatggtgtattagttactttcgtactgctgtcatgaagtgtcaaataagaagcataaggaaggctttattgtatttagctcacagtgagagacacagtctgtcatgtgaaaagggcgtggcagccggaacatgagggatctggtcacatattgtgtctgcagccaggataagtgggctcagtctagggccccagaacacgggtgataccacccacattccgggcagatcttcccttctgaagcctctgaaataccttcagaaacagaggtatgattcccacgtgactctaaatccagtcaagttgttagtggagaataacaatcaaaatggcctcagccgatatctggagagagtacagtggcccagcactgggtagtaacaaaacagcccgtgtctggtattatgttgttgtcttgataaattagtcaactttatcactctctcagtcaataagattgggaggaggcctggcttctagggttctatcaaagtgtcagcatcatagttgcttttctccttaaaaacctcaacaactcattacttattgaaacaagagccgtcatgaaatccccatctccattactagatgaacttgccaaaggagcatttcacgtgtctacagtgggacacgactcatctgtcagcggaacgcagctctcatgtgcagtagtggagatgggttctgaagacagggactgacataagccagccacaaaatggcagtgtgaccacgcttgctggggacagctagaagaggcagattgatagagcaagaaccgtgcctcggaggtcagaggctgggagtgacggagcatgagagttagatgtggggagtggggtctctctggagatggaaaggtttggaagcctgttaacagtcatacggcaacatgaatttaatagtgcctctgagttaaagcggcaaattgtattatatatttaccatagctaaaagaattaataatagaccaaaccaatttgattttatacttttggcagactagtagtttatagatgatatccactaaacatacatttttaagaaaatactgaagggttggaaagatggctcagaggttaagagcactggctgctcttccagaggacctgagtttaattcccagcaaccacatggtggctcatgaccatgtatatctataaaggggtctaataccctcttctggcatacaggtgtacatgcagccagagcactcaaattaaaaaaaacaaaaacaataataataaaaaacactgagtatagtcagaaattttaatgctgtggttaactgggagttctggataattgaaggtcagcaggtttgcagtgaaactgaccggtcaaaagtaccatttcatgaatacggttatgaacttggaaacatttttgttctttggcctacatatcctgaatcatgtcattttcaacttaggacactttggtgtctgcagagcctctgactataatgccaggcagtgcagtagccgctggccacttgtagttgctgagtacctgaaatgtggctagtctgaactggcacacactctaactatgcaggaacttcggatttgaaaagcttactgcagaaaaatataaaagatttctaatgtccctcttgatggctgggggtgtagttcagtggtggaacaccgctcacctgtacaagacatgggttcaagtttcagattggattcatgttgcaatgataagatatcacatgttggataaaagaaaagatgccacttggtatacttgtctctcaacatttttatatagctaataacatttttaaaaaattatttatgtagttcacaccactgcctttggactgggctatctagaaatcagacccttgggattaatgtgcttgaagaaagtttagagtgttttctagccaggcagtggtggtacacacctttcatcccagccctcaggaggcagaggcaggcagatctccatgagtttgaggtcagcctggtcaacacagtgagtttcaagacagccaggggctcagaaaacagatcactatgtgatctgccccatggattcttgaaattagttggctcactttcaaatcagggaagttgggggagaccttgatgccagttttctgcaggaaacccaattggttcaactgcagcttgtctctgtcaagaggcctggtagtagaatttcagccttccataagtaaggagggaaccctcacaagcagcagacaccagcccttttgactccctcctaagaaaattaaagagccctgtgcacacagctcactccccagagtcattgcccctatccccggctctgggcagaaagtcccagtcccttgctcacctcggaataccaccttctggctcagaacttaactctgtctgtgagtccgtgttgctcctctgttgtcatttgtacattcagtatctcttatgtggccacgtggcttgcctgggctgactaagtcgcctccctgggtcataattatcttctggttaggactctgcttataacggtccatggagcctgaatagcccacccaactgtgttttctaccacaaactctgctgttttaaagtgtaatttggtaagatgtgaggttttccagggctgtgtgtgtcgtattatagcagaaataccacatgcactttgttctgctttttcagtggacaaatctgaggttgcccagggctttctgttggaaacacaaaaacaatatggtcctgtcatggtgcagtgctggtgcttaggcctgcacacatcctgatgtattataggtcaatgaattgttgctgctaacatgttaacataaagtgtgctagaggagttggagggatggcttacacctctaatactgctcttgcagaggatctgagttcaattcccagcatccatatcatgtagctcaaaaccgtctataattccaatgcctgggttctgtgtctgacctgcagatttggccatctgtggattcaaccagctcacattaaaactagggcagcggtttgaatatgtgctgaatccatgttagctttctcccttcctggcattcggaaagtaacactctgtaacaactcttgacacagcatttgtatcccagcagaggttctaagtaaaggtgactggaggtggaggaggctcagtgcaggttatatgcagatatgagcaacacattttagggggagtttgaacatccttgaatttgaatctgtatggcatcccaggaccagtttccctagacatctggcagatgactgcatacggcatgagttttgtaggaatgtatgttgcatccttgtttttgcccacttttggaatccattctctttggaatttagtaagtgcctataaacctctatatcccaccactcgccagccaggcggcaataggaagtatacgttggaaatgccgagcatagttaacacaagtcacatattaagaggaatttagcagtaaagtaggactgtcaggctgtctgcctccaacctggtggttgcacgcacaccacctgtactttatatggaatgactttgtgttctgacccagaagctctttgcatcttcagagactgagttccctaccctagctcttcctagtctgtgtatacagatggatgggcatggccatgtgcccttatggacacaaaaggaatctctcagaatatcaaaatttggaatttggaggctaggtaggaaattgtgtgggttcccatcaacaagatgccattttagttttgcctgagaagagggagccattcttacaagatgaggggtatgatcttgaagcctgttgtaccttcttgaacacgtgcatgtatgtcaggggatacaggaaagactaagaccattccagctgagaagtctgagtgtgtgcgctgagctccagactctgcagacggccacgggaggactccgtgtctgtacgtgtgcagcaagcctcacaagccgcttccttgactacaagaagggacgagagcctgcgctgcttagtgttgaaggtattacaagataacatcttaatgaggcgaaacactcctaatgggttgtgaagcaagatttttaagtaggttcttttcactgttggatgacggtgcttgaagcccatgaggtaagcaggcacttgagctagcagcaattaccactaagtgtagttattaagtggatgtgccccccaccaccacttcatttcacttttgtttcaaagacaaatggaggagttgtatctcttactatacagctcttaacagaacatataattttaaaatataaggagtatatgaattatatggcttatacaaattgttgaaaacaaacttgaacaaaggtatatgtgataaattagaccctttgaaatgtcatgaagtgtggaatgatggccctctagaagatctctttttcacaatgctgtatgattcaatgttgttccagatagaaggccagctcctcagaaagaacaggaggccgatttgctcatgacttaatatggagggctggaaatatatgcttggtcctactgagtccgcccccttagcagtcctggccatccattgacttggctgcacctgcccctattgacaagttttttcttgtatggttcttttgcagtctcagttgcatggggtagcctgcacttagtagaatttatagatatttctgtgtttttcttttcccaactaagttctagacttctttttgtttgtttggtttggtttgggttttggttttcgagacaggatttctttgtgtagccctggctgtcctggaactcactctgtagagtaggctggcctcaaactcagaaatccgcctgcctctgcctcccaagtgctggaattaaaggtgtgcgccaccaccgcccagctagttctagacttcttaaaggaggggcattcacatttctttgtagtctcacactatatataaagtgctttggacataagcaacaccaagaaaaaaaaagagtatcctcaattttggtttggtctttcagttcattttatttgtaactttaaggaaagtaaaccatatatatactacagaccaaaatgtcctgtccagaatccctctatgaaaaagtcaataatgtatctatggcttaacataatgggtcgaccctgacccatagggaggagctgaaagatcaggaaactggagttgtacaggtgagacaaggagtcagagaggtagagatcctagctataggcaaaagaaagatagccaggtacccctgagcatgtatggaatcagggagactgcagtgctgccctggctgggcgtctgccaaggttgacagtcacagtctgtctgaccatgactgggaacttatagccattttatcccggggagcaggatgagagacatacagacccatcgagaaagtaggcaatgatcttgcagatacaagggatgggctaattcccggcactggggcacgtggggtgagatatggacagatgtgaaaatgtcccaccaccaaactgccctgctgttgtttgcctgtccaggctcaggtctggcacccaactcaaggcacaaacttcaaagcatagaggaccaccagcaagggaatcgctggagttgggggtgaggatccagccttggagccgttcacagcatgtgcaacgtgatagtttacgaggtcagcacatctgtgtgacttgtgtgctgaagcctgacacgctgctccatcaaattctgtggtgtggaagatttgcagtgtcctgtgcttgacaggtgcacacattttacagtgtccagcttaacagatgtggcatgctatgcaataacagggccactaggacagagcccacacagcgcagggaccacatttcaaatcttcctggcaggtaaaaatttaaccttgggcaggcagcttcatttttgtttggaagattctgtggaaggtcctcaagctgcaagaatgaaaataaaattaaaaactgatagctcataaaatgagtaacccacgtcacgtctgagcatagcattgtactgttatatattttgattatcttttctactgtgtgtatgagaggtgtagagtaaggaagagagtggcacacacattttcttatttgaggtggcctcactatgtagcctagactggccttgaactcacaggaggcctcctgcctcggccacccaggttaggattatgggcatgaactgccatgttcacctttctttttcctaaaacaaatttgataagaaggaaagtagattgtaaatcctctcttattgtagttaatgcctgttgacaatgctagttaagagattcagaagcacggggaggggagaggtggagcaacagctgcaggctaatctggggagcagtagttttgggcttctttggcacagcaggattaataacatgagcaataatgtgtcacatactgcagaagggaagaaaagcattcaccatggagaaaggatacagtggaaggtggaggaaggatggactgattatcagctactacatcaccaccccgtgcatacatcaatcaaaacatcactctgggcctcataaatatgcacaaatatgtgccagtcacaaagcaagcattcattagaaagtcatttaaaagctgaaaatagtgtgtaagatctttcatatagtccagaaatatacaaaatcaactgtaaaattttttatgattctagaagttttgtgtatgtaggtatgtgtgtattcttaaatatgggtcattttttctgagaaaaagaatatatacctcatacagtgtattcctttgctttttttttttttctcgcttcatcaaggccagagatcctttgtctgtggatgagatttctccatccaaggacccacttggtaatacttacctgcctaaaatacacaccgatcctccaaaccactactgggagataaagatttgttagcacagtttaggggtcagcaaactctctggctaagggtcagagccaacaggacaggaccagccatatgctctctggcacatctgtggccattgcagttgtgtcaaagtagacatagttgtctataaacagaatgtggttcctccacaccatgaagtatttattcagctgatggaaggaatagctgctggcatattctacaatgtagaagaacatgaaaacattgtacttggtagaagaagccagacactgtctttcacatgttgtataatcccattgacttgaaatatctgtaataggtaaatgcatagctgtaaaactctagattggcgatccccaggaactgaaggaaaaggcagtggatgtgaactggaagaaaggacagtgggtgtgaattgaaagaaaaggcagtgggtataaactagaagaaaggacagtgggtgtgaactggaagaaagggcagtgggtgtgaactggaagaaagggcagtgggtgtgaactggaagaaagggcagtgggtctgaactgctttgggggtaaagagactgaaactagacctagtatttgatcactactatgaatgtactaaatgctcctgaattgtttaaagtactacttctatgtagtattgacttgacttcaataaaagataaaaaagaacaattcacattataaggtgtggcaaagcagccatagttgatatgtaaataagtgaatgcaggtgcattctaatgtagtgtataaagctttatttatagtgagagaagaggggatagacagatttgctctgtaggcagtttaccagccctactacaatgtgaaagataattttgatagtgattggggataggataggtggggatgaagactgagcagatgagaagtcttggagtgggagagcagttagcctggaaactatcccagtaatctaagcaagcctcttcactgtggaggaggcgccgaccctgccttaccctgtaaggtggatgggattgcggtcttttccacctacccctaccgttacttttgtatgtgcatttaaattttccccttaaaaaggattgggcacagttccaaatggagagactctcttaatagaatgagagggcaagctggcggggaagtggccgtgagggagaagagcaccaaggcttctaagcattcacaggcttttcagctgaggttggctcagcactctctgttgactttaggactctcacacttgcttgaataatgacaaagatatttaccttttagactcgtgtgtgtgtgtgtgtgtgtgtgtgtgtgtgtgtgtgtgtgtatgtgtgtgtgtgtattctttcatagataaccttcaccactcttaatgcattagctgccaacttttcctcctcttcctcttccctcccttcttccctctcctgtttcccagtgctgagattagaaactcaggagcttacaattacgaggctcccagatccccttaggatagttaagtcacacatcccattagtaataatcttgagatgtggccaaaggtgtgactcagtgatagtatctgttcgtgccacacacaaggccctgactttaatcaccagcaccaataaaaacaaaagtatttgtgagtgaagttctagatcattctttataattgctcttataaagttatatacactattgctctgtgtattgcatggatcctaaaagaatttagaagaggttttctgtccacattctagtgactcatctcatacatcctcctttgtagactcttcatgtaaattatcctttggcttaaatttccccctttcccagcgaaatggagcctagtaaggaagcggtgctgccgtgtgtattgttttaacattatcctggactatgtgctgttggaactttccgatgtggaaacagctgaattgcttctgaggctctcacacactgagttgacttgagaacttagtgattaataaggcaaaactatttctcttcgggcagagccatgggttcggtttttcttcgggttaaaagaacattagtcttctaaccagggatttctgctgtctttatagtggaacaaatgcttttttcagatctaatcctggcgtgataaataaagctctctgcaaggtgcttgggaaagttgtaagcagctcccgcgtggagaggcctttgttgtggaggaagaggcctaacctcaagggttaatcagtcactgttcgtgtaggtcagagagaaaagttcacatctgagtggtactggccatcaagccctttcttgtggttctttccacagtgatatattcttaaatatcccttgagttcaagcctcccagatagatttattggagcaaaatgttccttgtccatatgataagttgtgtatttatttgcattgaaactgagataagtgacaatcaggaactctgtggtagctgtgatttgagcaaacatgctagtaagtaatactggccaagtgtccaaatgtgcatctaacacgctgcctggcatattgcagatgtttgttgattgcttattggctgaatgagtgtagagttttacgaggctgagtccagtatggtgctgccaagttgggccagcgtgtgatagttgcacagtcttcactttgtaactgttttgttaaactgtatatgtagatcttttgggtttccctttacatgctggatttcaggattaaaatgtttttaagcactttaaggggggttgtaacaaagtatatcctatccatggagcttgtttgctttagaggttcaagagtaatatgctaaaatttcctttgttgaattgaagcataaacagttgagtgtttgcttgtcaacacatagaatttggtaattaatttgtacttgggaaacttgctctgggtttgaacacttaggaaacaaggtttccaagtatgtcttgctcccagccaagagcagctgtgccgtacactgcttttcaggtggcttctctgggacatctgtgaaaacagacgtcagtaactgagcgtggccgagagcatggcactctgtagtgttctgtgatatatggtggctggggtctccactggagtagaacaccatgctgacttgtataaaaatacttatttgacttaaatttcatttctgctcagtaataaattgcaaggataaacctcccaatgttaggagaaagtgtataatacactatgcagttttcattcagataagctcaaggtggagaatcgggaggtgacgcctccttaatggctttggtttgccctgtgatgtatatgtccgtgataaattaagatgactttcctggcacttgtgtgatgattattatcagttacaaataattctggacgatggtagtgcgcgcatttaatcctagctctcaggaggcagagacaggaggatcaaggccagcctagtctacagagtgagttccagatagcacaagactatgcagagagaccctgtcttgaaaaaccaaaaccaaaccaaaccaaaccaaaaataataataagagaaaagaaaaggacttcagagtgtgtgccactacacaagcagaaagcagcactgcagccagccgggggaggggacgacacctgtatgctcccccgtgctgtctatcctctcgccagcccagcgaggttttgggatcttctgctttcattcctcatgccctgcctcccaaccgcagtcctctcttacttcctatgattcataggaaaagacaagatcaggcttttaaaaccagttagctaattagaggtggccatagggcaaatttgaagttcctaggcattcagatgattaactgtggcaatgtagatttctcttactcttgtacagactgtttccgtctttactaataaaagcattcacgagggaggagccgctgacctgcctcccccaacccccgtgcttccaattaggagtctattatctcattccagataattggaaaaggatatcccaaatactgcttcgtgtaaatatggtttttgcctgtgttatattactaggagttctgaacacatctggagcaaaggcagccctcgggacattaaaagtgcactgtttggattggcacagtgacattatagtatatgccaatttgtaatggcttttggaaacaggcagttttaaactctccctgaactattcccctgagaaattattcaattaagtacaactaaaattaatgtttagtatttttgtgtgtgtgtttaaataaaataggcagctatagagggagatctgtgattcatgcttgtgttcttatttgactctggaagttagctcccaggaaatagctaggcttcttggaatcagtgccttttctagaagctacatattgctagactctgcttatgactttcatattatgtaaatgactgtctcgtctaggcagctttagacacctggagttcacccaagtttctatctatacctgcagggaatggggccctagtgcaaaaatccaaacttgtcctgtctctctaagtaagtgattctcaaactttaatgggtgtagagatcacctgggagcttattaaaatgaagattttgatttgttaggctgagtgtaggacctgaggttctacatgtctaacaagctcccaggggctgtggctggccaaggactacatttgcaatagggaggttctaagcagtagggggtgggctggggggtgagacctggactttgatttccagtccgcagcctggccctggtgtaactgatgagtgtgcctctcttctttgtagtgtatgtcctcactgaattctcggaatccccagttcttttttttttttttttttttcccccctgtctgttggaagatggcacacttgccatgctcatgggagaaaatggcatgggtcttttgttgcatgctttcttgagatccagatattgtcctgcttcattttcttagcccatcttttctagctgggttagaaagaagaatcaactaacggatattcctttgaccatgttactaaacacacatgccagagccctggtgaatggaaggattcgtgagtgagtatggctttacacctcccatccaacatctacttccacagtttggatgcttagttcattggtccaggcttcagtgaaatcccttgaaagactggtccataaccctggtagttttttatctacagagagggtgttccacaagaaaatctataatgattccatcttctaactggctgtctcttcctaactatggcaagtgaattgatcatgaaaagattactaaatgggcagaggtgacgatggcttactattgccagcagttcctgcttctgttgttctgcctcaaagagagtccaggacttggagtatagctcagtggtagaaagaacatttgcattgcaagttctagtgccccgcttctgcagaccctgaaaacaaaaacaaacagcctagtatgtgctctgttcaattcaatagtcgccataaagttctagatttttctttctctcccactttgcttttggccttaaagctcttttggtccaacttttaattttttgtatctaaataatactttttaaaatgtagttctggggactgcagagatggcccagagattaaataaagcatttgctcctcttacacaggacccaggttcagttcccagtatccacatggcagctcacagccctccttaactctagttccaggggatctgacgtgttcttctgtgggcacctggtcagctaaaacacacacacacacacacacacacacacacacagctctaattgtctcagttaacttggcattattaattattcttcattattattcttcattgcctaagcagcacttccaaagccagcattctttccttactagcccatagaatttgctatttaatgttattttttgaatttgagctcttaaaattgaattttcattgttatcaaaatattgctgctttgtagaagtagcataagttcattcatcaccttccttgcctcaaagtcccactcctggcaaatagcttgtaattctttaagtttcagcgttcattattacctatatttctttctttcttttttttttttatcattttgttgttgttgctttgctttgttttgtttttgacacagggtctcactcgcatggagctagttagacacaccagactggcctcaaactcatacagctccacctacctctgcttcccatgtgctgaagctaaaggcatgagccaccacgcccagcactatctatttctcactggaatgggctgctatttcatagagttttccatgttggcttgctgatttcttcctaagggagatgtcattgtaactttcagtgagcctgaaagcttccctgtctcccatcccacacacatttccattaaaccgtgttgatggctatgactatggaaatattgtttgtggttgagccacagtgtgtgctatgattagatctttatttcattagtacacgctttccctctaaagccggtaattgctttttggttttggatttgcttagctacctgtgctgacacattcaccactcagacctatccttaagctaggattgtgggattcctgtgtgctggtgcaatatttgtagtttgcctatgaatttcaccttttaattggccagtgcttgctttccccagtcctttaactcccttgttcgacctgaacgactgcctaggctcctgcctgaccctcctgcctcttcctgttccatcatacaggaagtccagtacccctgactgcaatgctcatgcctgcatgctccctgtctgccttctttcttcccgttgctgtcttggtagaacacactctctaagagcatctgaaggaaggttttatggaccgtgaacacctcaaggttgtgtgtttaaagagcaccatgctttccctgcagggtggaaggtttgggggggaaccagttgtctggtttgaattgtgggggtgctccattagacctctgctttctctgtaaagctcctattcagttctccacagtaaaacgctgaaagcttagaaaatttctcttcattctgatgctcttcgttcaatgttcatgtgcctctttttgggggggggggggttcgagacatggtttctctgtgtagcgctgactgtcctggaactcactgtagaccaggctggcctcgaactcagaaattcgcctgcctctgcttcccaagtgccaggagtaaaggcatgtgccaccacgcccggctcatgtgcctcattttaatatgtgaatcagtagaaagataaccttaaaaattttactaaaactaaaaacctagggttggggtggtatgaagagaagaaagtgggagaagaaacaccacagaaatacacacatgcaggcacgcacgcatgcatgcatacacatgggctctctcctcctgtcttgattataatcttactaaaatggagaagaagagaaagaacttatccaagtattgtgctctctctctctttctctctctttgtgtgtgtgtgtgtgtgtgtgtgtgtgtgtgtgcgtgcattgcaaaatccttggcacccaagtcttatccaactacctgggcatctctgagatctgtaagaagaggaaatctggagaagtcaaggtgatgtttctaaggaatgagaaaaatgcagactatgtttagtctgcagttagaccgaaatctgagctgtacatggcatgcacccctgagcaaagcttttgcattaaaatccagaggacacctccccacctccaacatcttgtgctccaccacatgtgagagatctgaagtggacaagccacagagttttcataagcctgttttaacatctgtaagcacaccacagttttccttcactctcagcagtggaggaccaaatgaggtaaggtataattagtcttcctggagccatcgtgtatttttaaactccttgagtatatggaaacaggtgatagaaagttaatttagaagtaatacagttttctttattactgaaaagctagtctgtttcgtgaaggcctaaaagacattaaggtttccagtctctcatgttctcttaggggactaacatattttgtttcaaccatgcattcttgttttcttcctgttgctgtgataaaacacttagatagaaagcagcttagggaaggaaagggttcccttcagcttacaggcagcagtccaccactgggggaagtcagggcaggaatttgaagtagaaaccgtggagaaacactgcttcctggctcgctcactatcctgtgcttggctagcttttttaaaatacatcccaggaccacctgccaggaccacctacagcaggctgggtcctcccacatcagttaacaatgaagataatcctgcacagatatttcccatgccaatctgatctgagcaatcctgtctgagatgactcaaatgtaactagggggccaactaaagcctgagccgcgtgtctttaattccagaggcagagacagaggtccagccaggtctacataaagaggtccagccaggtctacataaagaggtccagccaggtctacataaagaggtccagccaggtctacataaagaggtccagccaggtctacataaagaggtccagccaggtctacataaagaggtccagccaggtctacataaagaggtccagccaggtctacataaagaggtccaggccagcagagggacgtagtgagattctgtctcaagaacaacaacagcagctaactaggacacaccatgtcacacaaatctgaacttgcagcagacactgagatacaggaataaaggctaaggtctgactgggatggactaaccaccgagaaattgaactatctctgatagacagatcctatgaaatttgaggcatagcctctttctcaagaagaacagcgttccagtaggtgggatagaagtggggtacatcagtaagtgtggctatgtggcttctatctaagcatcagtactttcaaggtttggtaggtccagggctttgtggtcagtctggatacttaatgaaatactctctaaaggattaaatgatataatagaggcataaacattatccaaggcttttatcattgtgagtgtagaaatgttagcaaatggtttggactaacagctgggagtgtgttctgaccttcaacttgacatttgtaaatcatggctttcctagcaggagaacagcataacaagagctcacacagttttagaacaagtcatatatgccgaagtttgtaagatttaagcaattctgttcaatatgcaaaagtcgataagtggaatgcttagctttaattgtcaacttgagcaacctcatttgccaatgagggatcgtctacattgggttgactggaaggtctctggaggactgtcttcataaagtggcaagaccaaacgccattgtgccaggaccacattccctaggcagggtgtcctgagctttagaagagtggagaaatctagctgcatacaatcaagcatctgatacatatatgcatccatttcactctgctttgactttgtatgtgataagaccaactgtctcaagttcctgctgcctcaagtcacctgctatcacaggctgtatcatggaaccgtgagctaaaatagagccctttctcccctaagttgctttttgtcaggccattttatcacagcaaacagaagtgaaactagaggaggctagtaaggtaaaatgttcatcttagtaaacagtaatgggcatttcctcccagaagacctttatgaagggaagttgaaaagtctcatctttcaaaggaagcagagcaaacacgaacaaacaaggcatcttgggaggtgtgagctgatgtcttctttttctttctgggtgttacgaaaaagcctctagaattcggcagccccggctccactgaaaaccagctgtgtgacttgggagagatcacatgacctctagcatccttgtggtgcttgcctcacagccctgtcctccagatggatggaaattgaccttgctcgtggcagttgttaaccattctataatgtgttcatgtcattcctcatcttggggaaaaggacttccctaatgtgtcactcttaaagtcagtgttgactataagtttgattttgtttataacatagttttagattagcagagaaattgagaaacaatacccagaactctcacatgccccatgcctgccttcttgtgttagtatgatatggtatttatgaccgttagtgagcctatgtagaagtattaggaatgaagcccatagctttctgagtcttcatttgatgtcatttcttttcttctttctaattatttttttaacttattttatgtttgagtgttctatctgcatgtacaccttcataccagaagagggcaccagatctcattacagatggttgtgagctgacatgtggctgctggaaattgaacttaggccctctggaagagcagccagtgctcttaactgccgagccatctctccagcccctttgatgtcatctctatcctatgacagcttctcatgctgttcttgtttcccatgctgttgacagttttgaggaataccagtccagtatttacattttttattacacttacttcatttacttatttctgtgtgcacacacatttgtgtgtgtgtgtgtgtgtgtgtaggtgtgtcatagcaccacacatgtggaggtcagaggacaatttgttggctctctccttcatttctccttcatgcactgtgtacattttggggatcaaaacggttcatcagacttggcagcaagagcctttacccactgaggcatctcataaaaccccatgctcaggtgtttatggaatcttgcctgtcttggatggccgtgatggtttccttgtggtaacatgggctgtgagttcctgggaagaaaaccagggagaagtaccattcttatcctattgcatcaaggtgacaggctagcgacttgatttgtgactcatttcattttttaggcttcttcactgtaaggtcactaatattcctttttcctctgcttggattctttgaaaggcaggcacagcatgcagcctgtctcccagtggggagttacacccgggtcctgagaagtgcagtgtctgtatgaaccatttgcaaataaacaggagggatgtgattctcccccctcagctataaatttgttcggtcatttttctactttttgaactttttttttaatgtgagctggtgcacacaaagggcaactatgtagagtcgattctctcctgccaccttagcatgagtggagtcgattctctcctgccaccttcccatgagttctgggaatcaaactcaggttgtggcaggtatgcaccacaagcactgtacccagtgagcagtctcacgagccctcctctggatttttcttttttaagatttatttatttattatatgtaaatacactgtagctgtctttagacacaccagaagagggcatcagatctctttatagatggttgtgggccaccatgtggttgctgggatttgaactcaggacctccagaagagcagtcagtgctcttaaccactgagccatctctccagcccccctcctctggattttattcttaaactatttactttgttgtttagatccctcttggcctttgggaatgcctatggtttgcacatctgcgtctgctaccactgggcttcttggccacatcttatctagtctacaagatacttcagggttacatagttcatattttctgtctcggttttaaaagcagttgtttttctaggggttcttggttggctttgctggaggatggttcggagtcaccaagcctgcatgttggtatacttggtgctctagggagtattggtggtcttaagtcttctagatacacaaagcatagaatgaatgatgcatgcatttactagcatagtgcatacataatagtaactcagtgtccatatccatacatagccgcccgtatctgtattaaggtaaccatgagctcacgctgtctgtagtttaattcatcgccgtgggtgttgttctagactcattcccttgctcatctgtaaaccgctcaccagtgagtctctggctctcttcatcagccctccgtgtctttagtgcttcagttccggtgggtgattatagcagtgagaggagagttactgcatctcccaggggaaccagtgtggttacctagaatccgggcttctgtgcttttacctttggtcctgttagataatgcccattctaaaactgtcgctcagcgcttcttcctatactttgataacagtgcgttttatgcatttattagatagacagttgctcttttaacagtctttgttattgttaacctacaacctccaaaatgataaaagttatgtaaaataaggaagtttttgtttataatttattttataatttttgtttttttaaaaaataaattatatttacaaatttataattcataagaaaataaaataaagtaatgtaaatactctgtccagtctatgaattctgacaaatgtataatacctagccaccattacaatattatacagaatattttcactgtcctaaaaaattcctgtgagtcacctctgcagccttctcctcctcttaaactcctggcaaccaggattgttttactctctctgtagctgtgtctttcctgggatgtcatataattgaaatcatacactatatcataacctttcctgcatgcaggttgctaagaaacacatgttggttatctgtaaatcattgcagtctgagccgggcaaggcatcatcagaactgcaggcttctcacacaatggagatgggttttgcttggttgttttctgttgttgttcttgtcagcttggtttaggttggctttgtttgtgcatatgtgtaacacatttagcaaagaattttgattttttacagtaagcatcttgttgaagggccagaaagggctgttcgatgactcagtgagacagctatgcagtgctctgagctcgatgtcttcactctcaggctgatgctatcttctcggagctcggtcattttttttttaaagacttaaaaatgtttctgttttcatatggatttttttttaagtttgaaatttatcttaaaaaaaaaaaaaacgatgtgtgtgcatttgtttgtgtactttagtgcaatgcctgcagaggctaaaggaggcgccatattctgtgcagctggacttagagcagttgtgagccccctgacagaagtgcagggaactgaacctgggtcctctgtgagagcatatgagctctcaccactgagctgactccagccctgcacattcaaaattaaaagagcaccgtagccatgcagtagaagcacatgcctttaatcccagcacttgggaggcagagacaggcggatttctaagtgagttccaggagagccagggctacacagagaaaccctgtctcgaaaaaacaaaaaaacaaaaaaaaaaaaaaaacaaaaaaagaacattgtgttggggagatggtttagtgggtaaaatgtttccacatcagtgtgctgagtttgaatcccagaacccatgtaaagctggttgccatagcacccatgtctataactccagtgcatcctacagggagatgagaagcaaacccccggaagctttcaggccggctaggtgaggaggaccagcacccagggttgtcctcagccttccacacgtatatcacacaagtgtgtatatgtatacagtgcacatgcacacatatgcaaatagttaaaaaaaaacaacaaaacaatatggattgggagctaagaagagagagggaggctccatgcgtcgagagcatgctgtgcaagcgtgaagacttaggtttaggttccagggctcatgaaataaataggtaaataaatagataaaatcgatagaaaagctgggtgtgcttgaacgtgaggctccagccccagcataatggaaggtggagatgggaagatgggtggagcgtgctggccactagcacagctccaggttcaggagggacccaggctcaaaggaataaggcagagaatgatagaggaaggtgtcagatgtgctcctctagcttctgtttgcccctagcacacacatacacacacacactcactctcacacacacacactcgctcacacacacacactctcacacacactcactcccactctctctctctctctctctcacacacacacacacactcactctcacatacacacactcgctcacacacacatactctcatacacactcactctcacacacactcactcccacacccacacttccacactcacactctctctctcacatacacacactcactctcacacacactcactcccacacacacacttccacactcacactctctctctcacacacacacactcactctcacacactcactcctactctttctctctctctctctctctctcacacacacacacacacacacacacacacactgcttacttggatgcttactaatcctaatgacctatattgtatctttctgtgcagtttcagcccacatttgtattactgtataattgttttggatggtgtaagcagaaggtatttttagcatgtaataatttccttccaagagaaaaaccagactgtcaactaagcaaactggaaaggacttcccagggctggatagtatgaaggcctaagaggacctggaccacactctggttatagtcatgtcttttttaaaaaataacataactgtttttttgtttaaagaattnnnnnnnnnnnnnnnnnnnnnnnnnnnnnnnnnnnnnnnnnnnnnnnnnnnnnnnnnnnattcccagcaaccatatggtggctcacaaccatctgttgtgagggcatgagatcatgatgccctcttctggtgtgtctgaatagagcaatggtgtacttagatacataaaataaataaatctttaaaaaaaaaagaattacttattttatgtatatgagtacactcttgctggtgtggttgctgagaattgaactcagtacctctggaagagcagtccatgctcttaaccgctgagccatctctccagcccctatattcgtgtcttcagcagcagtttggtatatgcaaggtaaccgtctgccagtgttgctggtaaggagattcttagttgtcattggcagtgtcaagggtcaaacccagggccacatgtgtgctgtgcaggcattctaccacagaacaccctcagcctttgcttttcatctttactatgaatattttactataataaagatccataagcctaatgaaaaattttgctttcatttgtatttcataccttaaatatgctggctgatcagtagtgcagaatttcttataactttataactaactctgtccacctcacgactgggaaatgatcgcttagcatatggcacattttcagtaaatattagtcgttgttgttatggttttaaatactctgagctttcagtaatgcgctggtctggtctggctgtcttcccttcccacatttggcatgtttactgcttcaagtggagttgattgctccctcctttcctccctcctgtgctctctgagcagctcccagcatggtcaacagcagctgctctggccggtctggtagacagagcacagtctgctcactgtgtgcgtgcatatgtgcacgaatgtggaggtcagaggacaacttcgggtgtccttcctcaggtggctccctcattgtgtttggtcatgagtgctgccaggcaggccagcggatcctccagtctccacctcctatcacacgtgcatgccacactttgtaccaactgattcatctctccgtccctgagcttccttacgctgctgctctctcaagtcttgagatgtgttttattgggttttgagagatagctcagcggttaagcacactgactgatcttctagaagacccaggtttgattcccagcactcacatggcagctcacggcttacacttatgcatgtcaaaaaccctgacaccgtaaggtttgctaccagttgccaacatatgtactttctgcaaactaagctgataagtttctatatagatactgccacttcttagccttcccaatgtctcaggcttcttatgagttttgtttcctttctgtcttgtaactttaattctttttttcaaatcctatttttaattaagttttacaatgtttttttttaattcatttatttattatatgtaagtacactgtagctgtcttcagacactcccagaagagggcatcagatttcgtttcagatggttgtgagccaccatgtggttgctgggatttgaactcgggacctttggaagagcagtcggctctcttaaccactgagacatctcaccagccactcaaatcctatttttaatgatggttcttaaatgctttaacctcccttatagcccaccatctaccagaggtagtggaaaaggaaggatacggggaagtggacctgtttagaaatagttctttggagcaactcccatctgtgctgtctggaaatcggcagttcagttcacaggttagcagcagcagcagctcagcccactcacaagcacttcccagatacaccagcagtctagttcaggagaatcgggatagcgagcaggaatcagcagtggtggcacgacctagcagagacagccatgcctcagcctcggctccagtcagcaggagggaccaggagaacttctctgctgtgcctctgagggaagcaaagatcagtgaagactcgagatccacaagtattgctcagcccccgtcactgtacaatgagttttatttatatcctccaagcatcacgtgtcctccacaggtcttgccccagcatgtgtcttgccttagcatgacacactgccaatcagcctgagtctgtggaagtggcaagaaagcctgggcacaccaccggaagttttgtttctctctgtggagtcccaacaaatgcagctcaactacacaatgtaaggcgaccaatacatgtgtgttgttagcaaagaatccttgatcacgtgtcctttcacgtgcttgctttatcacaacatccttttacctgtgtctgcttcagctaaacgcccttttatgtatttaccccagcaaagcactatccaactgtgtccccaaaaaacccgtaagtttccacttcactgtttgaagaactttcttgaatgattgtttgagggtttgttccactgacagtgtggttggttgattgattgttgtgggttttgaggagtttcgttctgcagtacagtggatagagcccacccttgcatggagagaccagcactctactacagatatctacccatagccctgagtgtctttatttcacctatgttcttaaagatatttttcctgaattcaaaattctgtattgccaagtcttattagcaggttaagaatgcccatggggaaaaaaaaagaatgcccttgcatttctttctggcctctgtgatttctgttgagaaaaccacacctgtgtatctttcctttggctctcttaagttttctttgactttagatttcattacttgttacaattgtctcagtgtggatttcttttatgttgtttagctcctgcttaggttaaaatccaagcttgtagcaattctatagggatctaactataaactgatacaatgaaacttgatctttaaagacgctattccatcaatttttaatgtcagctagtgattcttcctgaattatctgttacatagggggttgcaaagaataaatctttgaccttttacagaagacaaaactaggtgcaaacaggtgagattttttttctttttgtgtgttttttgaaagtcacaataggagttacttttcagagagagataaggaagtagtaattagggggagtgggatggagaggatgatattagggtttctccagcctcctttcttggcctaggtaaaatgtgactgggatagccgcatcctgattattagggttgggcctggagctgagtggcagaacgcttgtcctgtgtgctctaggtcctggggtgcagtcctcagtactacacagacactaaaaaatacacactttgtgataattgactcaactgtggattggagttacttgtatttcacaaccaatatggaaatgttaattagctcctagtttcatggctgtgctgtccctggattcaagctctgtggtatcactgactactgtgatttatagcttctgttattatataatgactcaaccaacttgagtcccctcctccccattcatttcttcattatctgaaaacaatatgaaggacagggtgttcattgtataacccaggccggcctcaaactggtggcaatcctgcccttaagttcttggattatcagcatgagccacaacccctgactgaaaatattgaaaaatattttggtggggaaatggtatgtgtgtggtacataaatgtcctttgtaagtgatattacaatattgtctctgacatgttgttcagacataaatgttgtatgtttgcaaaaaatttagaatatgctttctaacatataaatctatgcatgcatatacagacatagaaacagaaatatttgtatatacacatacacccgtgtaattctttgttatgacatactgttcgtttatcatgttttctgtcactctctctgcaaatggaatccgcaaatggaatctgcaaatggaagctggcccaacagatcccatccacacacggggagcattagtgcagcgtgaggcaaagtctctccgccacatagttctgctaatcggaatgagtttagcatgtggtatttactgtttggtcttgccgacactcactttgtgttctgacacgatgctctagttactaacaaaagcatctgccatggaaaaaaagtagtcaggtgatcttgctggagtttgaaaatgtggcagctcttggtggttttaaatatatggaaattaaagatgggtagtcagctagcgactcagacaatttttttgatgctgccacagaccccacaaacttcactgcaagtgcagcctgggaagaataaaaatccaggagggacggaatggcggctaagaggcacgatggccaaaggctgcctgccacagccagaagatgtgagtgattgcatcctgtgaggcactaagcactttagcaaacctgtgtagtttgatcccgcttcatgccttttctatgacctcattccctgcattccagagatgggcgagtagtctctgactccgtgtgcagttgcctgcggtctctttctttgtgagtacaccatagcccctcaaggatggtttctttgttttggatagaggtccttcctatgtcacccatgtggctccagctcctgggctcaagctgtcacctcacttcagtctccctagtggctggtactgtggttagtgcagatgcaggcttcgagtggctagattctgagtccccccagatcacagtcatttgtccccacatctctttaccccattgtttgctggtatttcctggatgctgtgtgatagatcgtgtccttcctttattggggagtttcctcccttgctgctgtcctaatgcttgcagaattgtatctgtattctgaatgttaggaaccgcaggcgcaatctctgcagatgataaacactgtccacgacggatacctaatgcttacattttggttgttcctacaggaagactcagtgtttaccacatcagagaaaagtcctctttcttttacttgatggttatctcatctgtcttcccagctctttatcccccacctctcagttttatttgctaacatgtttcgtcctttttatgcccttttctgtcttctggggcatatttcctaaagctcgcccctagtgtacagtaactgccttccttgtttctttaacagtcagggttctgtcttagtgttgtcaagggtgtgacattgttgccttttggtaggtctgagcttgtgacactgacttagtgtctaatggcttcgtcttgggagtattccttggatgttcctttatttgagctctttcttgcacctcttggctctttgtacacagagctccctgtccatttgtttggcagttgggaagggtcttagcacaggcctctgttgcacatttcagacccagatgaaaggctctggtttgaggtgcggagaaaacatgacaggggtccttgctttctgcctaacctgcccctgctcactgcctcccctcgccccaccatgtgtaaggtgtgaacaggcaaggggacatccccatggagtggcttccagagtggtggcttccagaagcactgcaggagttcctaccaggtgccctgcaataggaaacccataggtaggaatttaaactaataactttagaatttttatttatttaaatgtgtgtatgggtgtttcactatacatacaaacacacacacacacacacacacgtatgtgcaccacatgcacacctggtgcccatggaggtctaaagaaagcatcagataccctgggcatagaattacaggcagttaggagcctccatgctaaaaattaaacttgggtcctctagaagagcaacaaaggtggttgatcactgagccatctctccagcccctgaactagtagctttaagaaaagttcttgccaggcagtggtggcgcatgcctttaatcccagcacttgggaggcagaggcaggtggatttctgagttcgaggccagcctggtctacaaagtgagttccgggacagccagggctacacagagaaaccctgtctcaaaaaaaaaaaaaaagaaaagaaagaaaagttctttgctcactattaaaaaaaaaaaaaaaaaggctttaagtattattagtaatagtaaagtcataatgattttacagctccagagtccattatgacacaaaaaaaaccataaaattcacctaaaaatatatagtatatgtactgcctttatgtaggatctattgacattaaaataggaaattttatgagaatagaaaacttatgaactctagagtccactagttgacagcacccagtatttctcacggctttcccttgcctcccttgccagtgtactgcctttacgtggtgggcttttgtcttctgatgcaaaagcacttggtgtcacaaatcaacatgtgatagaaatggaaggggcttcttggaaccaaatgcaaatacttcccaggaggtatttctctttggaggctcaactgtcatgaatctagaataatcagctggttgtttcccagcctgtattccaaaacctgtgtttaatttgttcttaatagactgtggttagggaaattcccaccttaagagctgtggtctgcagggtgggaattcccctaggctccctggcttaggaaatatccgtctgaggtcatagtaactgacaagtggaataaattctatcaaaccaaccaacactggcaatatgagccttttaaaatgtaatttggcagataggttcaaagtccataaagccgtcataatcacactttgttaaggaaatgatactagagatgaaatgctaatggaggaaataattcattgactcatgatttaaaagcaaagtattcaaagtattcaacaatgggctactagttaatgaatgcttatttaatggaataactattttgtaactacttgaaattttaactgagccagaggttttggcacaggcctgtaaccccaagactcagacagagactgagtcaggagaatctgagtttgaagccagcctgtgctacatagtgaaacccagtcctagagagaaatgcaggagggaagaggggaagaacccaacacgaggctgtcacttcacagagagtaagagatagtttattcttaaaccaaatgagtgtgccctatagtccagattaccctggataatatgccccagtatggaaatgattttctggaatttagaaagttgtaaatcaaggcacttccaaactgtatctgtaagaacattacttagaccaatcacccaaagcagggagatgtctgccctggtctcaagtgctagctgatggcattcttaccttttgacttggtagaagtttgtgtcttctcagttaatccattcccaaagattttccctcgtagtcaggaaaatgttaagtcagacacagaggtgggcaaagactggctatcgagggggctcaaaagggcccaggatcacctggcttgtgggtctgcagccttctgcctccctacaccgtggaagctttaatgggccaaccagccttgtaggatcaagagcaagtgtagctttctcctgaaacttaattctccctgttggttttatacatgtagaggtgcaatgtcatttctgtccctcagtgctgggatggagtaggcaggagagcgatcttcaggagcgaaaaagagttggcaaagacattaaggggtagggggtgggagtgggagtgggggagatccctgaatcaatttacctagcctgatttttctccaccccctgtgtctggcatatttctagatgacatatagtaggggtatcatacctacaagtaatcagcaccgtagtgtaacggagtaaagtaagaggagagggactggcatttaaaccaatgaaaaaaaacgtgctctttaactagatcagacgcgtgtgtcactccgcctcctgcagtctgcactctgaatattttatttgatacttggagggttggtggtaaccatcttccaattctagttttactttgggccagtctggttccatagctataagctcaccagtgcctggttgtaatgctagacaatattggcctttaatatctatgtttttatattttattgtgactggtaattttgtatgtactatagttttggtatgtgtcagattttagtttgaagaaataagtgaatagtaatatatcagaaattagatatagcaataatagtctcacgttaaggtttttttttttttcaataaaacaccacccccccccatgtcaataacatgcagaattaaaaggtacatttgtgagaatatggattccatgggttctggtgggcaaaatcacatctcattttttatttgatattcagaaagcaaagtagggccacatcaggaagtattttataatgatcttctcattaccaagataccattgtttggtattttattcctagcccggctaacttctctatagggcaccttgataacacatttgatcagaaaacacagattcatgatgtataaaacaccatgagtattatcatgaaatactgattgttttatgtaacagattcatgatgtataaaaacgccacgagtattattatgagatactgattgctttatgtagagtttggatcaagagagttaaccaaagtctttgggtatccataagaaaaatcaatatagtcaaagttgctctaaggtattcaaaaatctgactgtgctgggcggtggtggcgcacgtctttaatcccagcacttgggaggcagagacaggcagatttctgagttcgaggccagccttgtctacaaagtgagttccaggacagccagggttatacagagaaaccctgtctcgaaaaaccaaaaaaaaaaaaaaaaaaaaaatctgactgtgttatagagtctccagacccagactttgctataacttttagtgtttttagtgctagtagcataacagtacagtttcttggccccagtcaatattcttccctctaatgcttattatttttgcctctaagagtctggatttcagaaatggacttttaaaatatacttagaaagtttcctgccaatttaagaaactggattttctcttcttttcctttccttttcttttcttttttttttcttttcttttctcttctttctgtttttttgtttaaggtttattcatttattttatgtatatgagtgttctctatgcatctacacctgcatgccaggaaagagcatcagatcacattatagatggttgtgagccaccatgtgctgggatttgaactcaggacctcaggaatagcagccagtgctcttaactgctgagtcatccctccagccccaaactggattttctttttaaatcaaaattatactgaataatgtaagaattctttttatgacattagtgaaatttttaagtctttttaaacatgaagatttggtttatgtaagatcagggtaaacacgcatttaacaaaaacaagaatctcatttgcagttgcattataaacatgattcttaatatttaagaaaaattgtaaatatcttagacagtgtttaaaatatcaaaatgtaaaaagatttaagtgcagtagagatgactcagcaggtgaaaagtggttgccaccaggcctggtgacctcagggtgaccccagaacccacatggtggatggatggagagaaccagctcctacaagtttctctgcatatgtgacaaggcacacaaataattataaaagcacaaataattataaaaactttaaaaagaaggttaagaaatgcactattaaaaagtgagagttagcagagacagcagaggtatttgcagttctgttttgggggccctcagttgatatggttgaaaacaagtcattcaactttctgaagtctttgtggttgtgaccttaggaagtgataaaagtctgaggtgagaaataggaatctttttgttgttgttgttgttgttgttgttgttgttgttgttgttgtcagtcctgcaacttttatttgcctgagtgttagttctcccacattgaccatctgtaggttttttttgaacgtggtacaggcacataagttaccacagtgcagagcttgtttggggaatcctcatcctcactatgttttctggacaagcgtactcagagtgatgtggagtgttgcttatccctttggcccaggagcttcactgagcctggtatcaatgcgcacttctggagtgtgcacactcttcttcctggcaaattctggcatttctttgagtgcctgagggaaatgcttcttgaagcccactccatggatgcacctgtgaatgttgctggtgtattctcaggtgtattctcaggttaccacctcattaagggcagaacgtccttcttctcactacccttctttgttgtagccattctgccgtgcccaagttggaaagcaagagaagttttgcagcatcagaggtgattgaagtacctggtccacctgcctggcaggagtctgacatggtgtcttttccacctagtccatcacctcattgttctcatttatttagttgttgctcttctgtgggcttcctatggacagacggtgttacagctcagagttcctccttttcatttagaaacgtcccttacgtttggtggctgattatgggatggatccctgggtggggcagtctctggatggcccatcctttcatctcagctccaaactttgtctctgtaactccttccatgggtatttcgttcccaattctaagaaggggcaaagtatccacactttggtcttccttcttcttgagtttcatgtgttttgcaagttgtatcttgggtattctaagtttctgggctaatatccacttatcagtgagtgcatatcatgtgagttcttttgtgattgggttacctcactcaggatgataccctctagaaccatccatttgcctaggaatttcataaattcgccagcaaaattttgctgaaaggaccctgatatagctgtctctcgtgaggctatgccagtgcctggcaagcacagaagtggatattcacagtcagctattggatggaacacatgggcccccagtggaggagctagagaaggtacccaaggagctgaaaaaattggaaaaaaaaaaagaaacatcccttacaatagtacacagtgtctcccttagcagaggcagttcacacagcccttagttcatttttgcggaatgcccagtagttatcttttattaaaagatcattgatgttttccaaaaagagaagctctcagattttgaagacttgatgagagtgtctttaactaggggaaacagatgcttccatctgattaaaccatgtttgtttgtcctgtaatgttatttgttcttataactgcccatctaggggactaaagattgtaggtacaatgaagattcggtaccataagccaaattttatgattatatttaaatatttgtcaagtaaagtttaatggtcatgttacaatttagcaagaatatcccaagtaaaaataattttcttaacagaagttattctcctgcttagacagcaggtgtctggttaggaaggcttaactcaatggcaaaacatacagacttggcatttgaataaaatgtaatcaccctgttgtttaatagccccttcagcaaggatataggacataaagtccttgttctctaagccaggtgttcagtagtattctgtattattaacaatgggtcactattttaggaaaatcttgctagcagaaaatcaaacttgtaccatccccctgcctcagctctgagtgccagagctgcacccttagcctatatctagaacattaatatcttttccttacttgatgattcttttctgtctttttttccccagattttaaaattaagaaataatttttaatgcaataaaataattttatactttaatgaagacccaagaaactatctggaacacaagtagaacatgctgacagcacttgggacattgctgggtcttcttaccaacagtttaacataacaatttgttaaatatttaagtgcttcagtaagcagggagaagccatccttgctaacagcattgcctcctcattaggccctcagggtaacaaaaggcagcatggaaatctatcatttgtctccatcctgtttgtgtctcctttaccgtaagggtctcttctttcatagggttcctaatgatgaggcagtggctgtctgactagggaaggctttaacccactgagaaatgtaagaactatagactgccattatctctattgtaatctctattgctcgtagctgaatgagtgtctaagttattttgtttcccttcaaagaagacacagacttaaattattgttcaaaacgcattataaaagccaagtcttagttacattatgacagaatgaagcagattcagatcacctgtctacctgttgccttttattaacctttacgtagacaacaactggacttcaaatggtcagtttatttcttcttttctcccccaaagtcgctctgtgtgtgtgtgtgtgtgtgtgtgtgtgtgtgtgtgtgtgcctgtgtgtgtgcctatgtgtgtgcctgtgtgtgtgtattaaacatccgcatgcacatgttctgatgtgcaggtagagaccagaagactgctttcagaagtcagttttctccttctattatgggatctgggtgcgaaactcagtttgttaggctcacactgcaagaacttttacccactgagccgtttcactggccctgggttagctcttgaatatctttaatttaggggggcatcacagaggtaaggatcgagaataacctggttttccaaaggaggcagtagcatggaggtaacagagtacacatacataagacaatagccccaaggccagattacaaggttaaagtttattctaatgtacacaatgtaaatataaatgtaccaagaacagcaattccagcatgcaacatattttaaaaaactatcttaatgaagtggccacaggttcattactcggttgttttggggaattgtggggcaaacggaatgttgcctcattcttagacccaaagtgacacatgaaaaccattcattaattcagattgcatgtttaatacaagcaggtagacatttcacccagatggagcttccgtaaatgaaagcaaaaggctttcttctttaacttttacttataaaggttaaagttaaacacaacctccaaaattttcttatcaactctctgttctttaacatttctttttaattttgatagtttctaaaactttgattttttttttgtaaaataccttttcccattatttattttttaatgggtaagagtgcaccatgtgtgtgtctagtgttgaaggaagccagaagagggtgtcaaatcagataaaactggacttacagattgttgtgagctactatgtcagtgttgggaaccaaactgggatcctctgcaagagcagctggtactcagaactactgagccatctctccaggccccagtttcattatttcttaaatgttcgaaaattccaattaatataaactaaccagttattatttcctatgtgttctagttcactgtggaaaaacatgggggagggggtggatatcagacatcccccattttatcaaatgctaacaaagttaaattagccataattgccagtcataaaatcagctggaagataaaagtggaagtttttcttcaaacctttctctgttccttgagtcttgagcctatttcccaattttgttctgaaaaaacaggagcttcttagccagctcgggagatttgattctgcatcagatctgctgctcatgggagtagcactcttggctctcacccttagcttggttgcttctgtttcattttggcttttctttgtgtgggtatgggagttttgcctacataagccaaaagagggtgtcagatcccctgcggctagagttatagccagttgtgatctgccatgcgggtgctagaaattgaatccaggtcctctagaagagcagctggtactctaaagcagtgatctacctctccatgccagggtggagccttgggtttatacttcctgtttacagaacaggtgaataatccaaagacacgaggcaatcagctcttaagtgtcttcctggctgagccagagaagttactgccagtccagaagtgggtcatgtttgaagtcttccttaggagaactttatacatccttgggtgtttcttctgacactttgatccttttaggctagaggcagggaagatacttgtgatagctttataaacagactcacagaatttctacactaaaagggcaagatttcaataagccagagaaaagtgtaaaattagatgttcaaggacaggaaaaaaaggcaaatgctaacaaaggagtattctgaaaacaaaccaagagaatatacagagacataagtactgtaaagacaaagtaatagaatatgcaaatgcaacggaccaggaataaactagagaaccattgaccaaaccaaggggaggtctgtgctccccaaagaactcacatatacctgaggagagatcatgaacagttgttactgggtgctgagccaggtgagtccttcaaagaaagtgaagcatctttgaggcctcacattaggcaccaaaactgtccatacgaagcagctctcacctcacagacagtatttatttttgagccacatatgagtgaccacggcctgtgaccacagattcagtgtaaataaccctattctgttgtgagaatagtttgtaaaatttttatagtaacagaacaaaagaaaatcataatttaaggcactgttgggtgtattaggtcatcagttacagcaaagtatggaaatcactgctggggtttcatgttctgatgacattcttggcttagtttgtggtttatttattcgtttattttaaggtagttttttgttttttcttttttgtttgtttgtttttaatacatttcaaaaggtttcacttgatagtcacaaggatgttaggtcagaaacagagctaggcaatgaatgaccatcaaggaggccaaggagaacccaaggtattttggctctgggtttgccatatttcctttctcaggaatgatgaagttctttctcatcagttaattagccttacagcctcgtacatggttgtagcttttcttctgtttacaaaagaaagaagggaaagaagtgtttgtgaaggctatgcagctacatgagagactacaaatgatatgttgccagatgcttgtgtgttgtatttctattaaagatatatgtgcttgtattaattctgaggcaggaaggcttgtattaattctgaggtccatttgatacaactataacataatgccagattctggataataataaataaagtaaacgtacagttttagagactgagatatccatgattaagaagccacatctggccaagccttcttgtgtcatacataatagagagcatcatatgacaagatagagcgagaacttgcatccttcttcttttctctttgtttgttttggaggcaaggtgtcatggacctcaatccaagcctcaaattcactatgtaagcaaagatggccttaaactcctgatcctcctaactctgtctctagagtgttgggactacaagtacatgacactgtgccccaggcttttctctcctttttcttacaaagccatgaatctccatcatagaaaccccaatctgagggtctcatctaactccagttacctctcaggtatcaatttatgaatttgaggattaagttcccaatgcttgaacttccgggatgcctttttgccactaactctgcctctgtgccagatctctacttgaccctcagtctgcagtgtcatttggaatctgagcccttgtctctcatattgggcacactagtggaggttgagcctccctgactctaggaaggcttccatccccattgtgttggggtcagtccgggcagaagcacagtttggattctcatactgtcagttctcccaggcaggggccattctctagtagatctatagttcttgggtctaaaggttggttcagttcccatgcctcttctcagcatttccctaacaggatgctttctacactaactctgcccctgtgccaagtctcaacttggccctcagatagtctgtaatatcattgggagtctagggggaggcagctatgtacccccagctctttcactgtgcaagcttgcagtcttgacaccatggggatgttgttaaggcttattgcttctaccttccatggcaacagggcactgtgtcaaaatgcaaggggacctggacagtgagcccacagtggagtgttctgggcctggatcctgatacctctttgccgttttagtgctctgggcttgctgtaggaaagtgacctcagaaaatctcagaatagtatttcattgcattatgactagctctgggtccctcctagccctgtgattgctttttgtttttttgttttcaagacagtgtttctctgtgtagccctggctctcctggaactcactctgtagaccaggctggcctcgaactcagaaatccgcctgcctctgcttcctgagtgctgggattaaaggcgtgcgccaccatgcccggctcctgtgatctctttaagaaaggactgttggtattctctccagcgcatgctttctccttcctgctctgcttttcattagaaattctttaagtcctcccattgctgccccatctcacttccatgattgaaagagactacacagcagcccaaatgctttatgcttgggcattgcttttgccagcactcccacagtccccagctctgtggtggctgggccacaaacaacatcaccatgatctttgcttgtccaagttctagtgcccattccctgctttctttggaaatgtccttgaaccaacctattgtggtcatgattatacacacagtctcaaaggagatggggaattctctacagtttcctctctgaaaccttctccagggttgctcacagtgttcaatttacagcagcttaggcttttcataacatcctccaaaaaactcctccttgtctatactcattgtccagtttcagagctgtttcaagttgatcaagtgttcataaatcacttttaacttatttttatgcattaaaaatagaataggtaatttaattgggggcacttgacaccaagcctgacaacctgagcttgatccctgggttccacatcatggtaggacagagctgactctcagagatcatcctcagtgtcagaggcacacatatgttacacaagtataacataccttatacaggtgaagtaattacatacataaaataaatctaaaaacttaaaattaaaaagataaaaaattgcactctgatctccatatgcacactgtgagcatgggtatgccccctcacatcacacacacacacacacacacacacatgcaggcacacgcacatgcacacagtgcacactgataaaacaccaaaccaaaccaaacaaacaaacaaaaaaacaagtagagaatgcttgaggaagctactagtatcaaccgttgcctcccacaagctcatgcacacacataaacatgcacacaccttcttgggcatgtacatatacaacacatacacaaaaaaatgataagtgtacctatttcccattaaaacatgattaacgttcaaggccagcctggtctacaaagtgagttccagaacagccagggctacacagagaaacactgtctcaaaaacaaacaaacaaacaaacaaaaaaacccaaaaaaacatgattaactcttccgtgtaagtcactctttttgttgcactgacctgctacgtgtttgctgatttacctttaagtcatacgtatgaatatttgcaaatttaaaagaagtctacctagaaattcagttaacactaaaaaaatgttaacatagaataatatagaataataagcagctggcacatctattgttagacaaggctacttcccttgacttcctacatgatattaaacccaagttttatactacaaatctgcaatatttgtaagacatgatgaaatcctgattgtatcagctgtatgagagcaaagtatcaattatccctacaaatcagggctgctgccaacggcatgtcccaacagtgtgaagccggatcctagactactcacttttaaatgctgctatatgtcaacttggaaaccgattttctgccatgttttcacgttacccaataatgaaaaggtcagtagaagattgaccaccatccttccagaggcttgataagaaaggggcagagctgcagggtcactacttgacttcttgcaggtctataattttcagtgtaaaaccctcgttccttctgccttttcctctttttgctccctccttcctttcttgtttgttagaaaattttagggatatcatatattatttctattgcttttaaattatttttattttatgtgtctgggtgtttttgcttacttgaatgtctgtgcattactcatgtgcctggtgcccatggaggccagaagagagcatcagataccatggaactggagtcacaaataagttcaagtcaccatttggatactgggactcaaacctaggtcctctggaagagcagctagtgctctaaattactgtgtcatctctcctgtctgatatcatttattgtaaactttaagttttgttctgattcatactttctgtttggttgtaacttacacaatagatacatacgtccttagtgtttaggtgtgtgcattttttagaatgatatgcatatatgcgaccacatcaaacctgttctggtaagttccctcgtgtcctttttagtaactccccggcagcccagttgtgactactctctgattttcctactgtcagttaggtttatctgcccccacctcctccttattttggatggattttaagtaattcaggctggtcttgtagtagctttgtactagctgtacctgaggacaagcttgaaagccctgatccttctgtctgtgctgaaaataaaggtactcactaccaagcccaggttctatgtgtattgtctatgtcaatgggatcataaagcatgctggtttttattttagatgacaaaacttctgagacgtgtatggttgctaatggattcataataatattgtctttctgtatggtgtcaaagatcaaatcaggactggtgaatttgaatgttaggcatagtattcaccactgagctacatcctcagcctggcagatcatcccttttattgctgtgtagtattctattttaaagacagagacacttgagtttggtgggtattttggtcatttttagtttgcggttctaataaatagaggtgctgtgtatatttttgtacaggtctttttgtggggggaaaatcctgcttgataagacacctaggaatgaagacagtaggaacacacatgtacaactggattggagtaaataaactcttccacggggtcttttgtgctctgtctccccagcaattagcattgtcagcctttaattttagcgttctgatgggagggtgaggagcatctcttactgtggtttgaatctgcatttctctaatgactaatgttgtgggctccttcttaagtgcatactggctttttgtgaattttcttctgcaaaacatctgttcatgaatttgggctactgtaagatcatgttagaatcatctctctttattgctctgcgtagcgcaatggatctttattctagatacaaatactgtgtcagttgcatgtcctgaaaacaccgtcctttccaatctgtggcttgcttttctacttttgaaatagtatctttggataagaagcaattttaattttgatgacatctcaccaatttctttacttttttgtttttggtatatatttttaacattcttgtcaaagaaacttgtgcctgaagccagcgtggtggcacacgcctttaatcccagcatttggcagaggcagaggcaggcagatttctgagtttgaggccagcctggtctacagagtgagttccaggacagccagggctacacagagaaaccttgtctcaaaaaaaaaacaaaaaacaaaaaaaaaaaaaaagaaacttgtgtcactcaaattgtccacacttaagaaagcagatacatggttaatttgatgttttatatataatggttaactattaacattttctcctagaagcttttctatcccagggtttacagttaggtctaggaaccatctcaagtatctttgtgtgtatgggggaggaaagtctttctatttatacatacacatatccagatgttccagtgtgacttgttgaaaagactgcttttccctcttgattgactttgttgtcaaagtccatactgagaattgactaacggtatacacatgtgtgcatatgtgtgcacacacacatacaaataaatataattttaaaaatttgttttaatttacttactaattgtcacaggctctaaatagattctgtatacaaaatcatgttaatctgcaaatatatagcattatatgtgcctttcagattcttttccttcccattttcttctcttattacacagtatggggcttgtagtgaaatatctgagttttagagccagcaaggtggctcggcagataaagcacctgctgccaagcttgaggggctgtgttcagcctacatagggagttccaggacagccagagctacaaagcgagaccttatctcaggccctccacccccaaaatccaatctctaccagtggtcttcctccgttcactatcttttttctcttatagcttaatccttccttaattctcagtgagactactgggagaaaggcaagttggggttaggatgaagagtttacttttagaaacttaccttggaagtaagtcaggattctttgttttctaagatgggaggttactctgagcccaggctagcttcagatttgcaacactcctcttgctttacctctcaagcactagggctacaagtgtgggctcccattcccagcacctttcagacttttagtttaaatgttatcacagtaaagggtatataaaatcaccactgcggtattacagagtaagaatacaaaactctgggatgaccggagagaggaacacactctaggtcagtggttctcagcccttctaatgctgtgaccctttaacatagttcctcatcttgtggtgacctccaacgataaagttatttttgctgctacctcataactataattttgctactcttatgaatcataatataaataaccgatatgcagcatatattatatgacccctgtgaaagggttgggtcgtttgaccccccaggttgagaaccactgctgtaggagaagttcatggatgatggaaagaaactccagagagagttgtcactgaacacaggcaagcattatgaatgaattattaaataatagtggataattttcttaggcaggtgttacatatagataattggcaaacttggtttatatccatttacattgtaaagaaacagcacacgacgtaaaattattcagtgctttaatctcaggctccgttcatccattgcctttatgccttgcgtgcactttatcccatgatgtgctgcacactctgctagggagggaagagaaagggataaataagcacaagtttatgtcatgttcattctggaaacgagaggcacacaaacaattagagtagtctgtgagttgagggggagggctctgtcatatgcaggaggctggaggagggaaggcaccgtgtgcttgggcctttctcatgtggttgttattgaatgcctttttctaccttccctggttacctgcactgcttggcctttttagaaactttgaccttatttgtattcgggcttcaagaaaaacagtgactcatgttgaacaattcatttccaaattagccttcaaaacagggaggcaggagaaaagtctccattgcagaaataatatatgtttaacattaatgtgaacaatacaaggaaacatgaggaagaacagtcacaaaagaccctaccacctaagagcaattgtcaggagcgctcgtttccacagctgcatgtatccctataggcatgcaaataccaaaggatagatggaaataatttcatgtaattaagattctaatatatatgctattttaaatgtcatttaaaatacatttaaatgtgctttaatttcaccttttaaagattagcataaaaaagaactttatagaaaggatctttaaagaggcagtaattactaagtggtgagaattactaaatgctcaccaaaatgacataaaacattgaggtcttaatgattttaaaaagttacaagtttctatatatttaactttacagctcacagtgacttgtaataaaccagtctgcctctatcttgggcttgaaagccatcttataataaaaacaagctagattcattcctgtttatgattaaatctgtttctcaaggattgggctgtgccctgcctccaacattaactccaaatggttccgagctatctgttccaggaatcgacaaccatgccgatgtttcaaaaagttgttatggccaccttgctatgaccaccttgttgtgaccactttcttatgaccatcctgctatgcccaccttcttgtgacttcgttgttgtgaccaccttgcatcgatgtctttgtttcaggaggttttatgactcaacttgttacgcttatattctacttctgtaacttcacctttttttttctgccaaatcccccatttggaaactcctactcctgggctataaaaacctttatcttccccatgtccaaggctgatctcttaaaccccagcttagggagagacgacccatatacacgagttaaaaggcctgctttaatgaatttggccatgatttgggttgatggcccttctccctcatctgtgggattcacacttgctggaaaggatgagggttaatgccttcttttcctcctcttcccctctcgagttgctctttagttgaggtcgtattgtcacatgcatgcacctttgcattatctaatccagatatttactcacttttagttcatcacttaaatggattcaattctagtccgtgtctcttatgttagactctctggagtcctggatttgctgagctagtcttgttgacagtttgctcaggaatggctaaggccacccctgaagtcttctctacttgcctaagctgaaatttgtcctgtgcctgtccccattgttgatatttctatttcctgcaataggattgttttaaactaagtttaaaagcagacaaactggtttactcttttttgttgttgttgttaatttttaaaagtgtatatgagtgcatgtgtgtgtacacacaaataatggggtgggtggaagtcaggggacgactttgtatatgttggtctccccccacctttatgtgggttcccgtgattattcatgggtagccaggctcgtgtggcaagtgcccctacctaatgagccactttatccatgcagggttactttttatttttgtttctgcctttctgaatcagaatttcagttttctaagcataatcatgagttcaggccttggcccggcagacgtaccacagcggtggaagtggggagatatagtaaccagccctttctgccctccattctagagatcatcgatgaccttgccaacctcgttgagaacacagatgagaagcttcgaactgaagccaggcgagtgaccctggtggacagaaagtcaacttcctgtggtaagagatggcagctcccgctgcctgtggcttactcttctttgagttttccatgttgtttctaataccatgaagaggaagcctggcactctagtgcggcagtcccatctgatgacacatcagaattactaaaacatgcttaagtcttattcagacaaaatggagctaaagttcggagagtgtaaccatcacccttttaaactctgagttgggaaagctgtctgttttatagaagtgattggtttgagaaattgtctacagtgtacagtttggtggtaagtcttgtgagttttcatggcaattttgtttcctttattttttttaactataagcttaattagtgaactcacagtaaaacagctaagagcagcttccatctccagtatgaccaagataaaaatcctatatttgggaattctgtctttgaatcacttgaattcatgatgcttgtcaaatagggatctgtgtactgatagaagagtctgcctgaacttagaatgctgatttccaggcctccagaggctcccactgaggtagcccagggtagagtttgagagtaatccttcttcattatgcatagcatgtcaggcttggtggatacacttttgatctcagcactcaggagacagagactgaggggtctctgtgagtattagggcatctggggatatagagtaaaaccttgcctagaaaagtaataagccaggcatgttcttgcacgactttaagcccagcactccagaggcagaggcagaggcagaggcagaggcaggtggatctccgtgtgagtttgaggccagcctggtctacacagcaagttccaggacagctttgactttcacacagagaaatcctgtttcaaaacacacacacacacaaataataataataataataataataataataataaaaagaaaaaagaaagaaactagtaatagaacgaataagagagaggccgtgtgcagctgttcagacgcaggcacctgtcactgtgtagcaattctgatacagatctcatcaggatcttcacccaaggagagtgacaaggagccacactgggagccatcggctaggttttgtttggtgctttatctcataaaggtgcgccagatctagtaagctgatttgtttaaaaaagaagaacagtaaatgttgagtgatctggatccatgtgctccatcgtttgtctttcttcttgtaagaagcctagggacaccccagccctgtccccgaactcacaaggtggtccacttcttttgcaaagaaaccaagaccttgcaagttcagacctgtgcagaatcaaaccataagaagtggaggggagaaggaacccatatctttttatcttcacagtttcaggctctaggcttgaaggacaaagtccgtgtggacagaagtttcataagagtggtaaggcagaaaggatgctttgcgaggctggagcagctagtggccaggactgcagcccatgggtgtgagcaagggggccagagaagcaggagctaatgcacacagcaggagcctcagagctccactcctctgagcttgtctacctgacctgtcccattgctcccttccctggaaactgggtgtaacctccatgtgttatggccttttgcattttacatccctgcacagccagcaccactcggacgacgctgaggccaagttctgccggtagcctggcgcctcttggaccacagctgcagtagctgtctctgtacgcctttgtggctgagtctgagaaaatccttccctaagcactttggtttggttgtttttgaacagagaactcctcagtgaactctcatttcaggctttctctttttcaaatgctttgcgttttcataaaccagagccttggtaggtagccttaagaaaaaaaccttaggatagttttcctcttattccaatataagagattagactcatacttgaactcctgatcctcctgcctctaccttccaagtgctgggattgcaggtgtgcaccatgcccagcgtatctgttgctaggtattgaatccagggcttttgtgtgctaggcaggtgttctgccaattgagctatgcccctaaccccatgggctttctctctaatggcaccatctctttaacaattatagctgccttatctgaactttcaactggcccaggccctcctttccaagcctcatctttccacatcattctgctcactgtacatgtgactacaagcagtgagaaatagccgagccacttcctatgtcttgtaattaactccaccagacaagttattctaatctagagccggcagctccaaacccttctgcattcttatcccaaaccagtcctcaaacctgggaaccacttggtccggctgcccacagccacagccctcagcacccctcaacaccagccttctgttttttctcctctcctcaccgccatggtcacacctgacaagaagcagcttagaggagcaaaggtttccttcagctcatggctgtgggaacagtccgtggtcgggtgagggaaagggccatggtgggagcaggtcatcgtttggtggcaggaacatgaggttattcatccatatctggacagagcaggaggcagaaaaagggaacactgtcctctttttatctttttttttcttttccttctttctctccaaactcgctgagtgccagtgtccacctctgcttactcaaccactgatggagaatgggacggagccagtcccgtagccatgccttcctcatgtaggcagtagctcctgaaatgtgagccagataaacctctccctcctgtagttgcagttgtcaggtatttagtcacagcagagagaaagtaactcagaagcccccccacccacccacccaggagagtgcatttgtcctaggcgatgacacagcgtacatgaagaccacaaatgagcaggaaccggcagtggaccgtggaatcaatctgcatagacctgtagtattggaatgatcagatgtgaaataaaaaaagatggctttaaatttttgttttacagtgtgtgtgtgtgtgtgtgtgtgtgtgtgtgtgtgtgtaagggtaggtgcctttgccacaatgcatgtgtggaagtcagaggacagcaacctgtgcaagtaggttctctacctcaaccagctgtgtaggtcctaagaattgaactcaggtcataaggcttggcagcgggcacctttacctactgagccctctcactggccctcaattttgtactttaaagctgtttacttacttttattttatatgtatgagtcttgcctgtatgtgtgtgtgtatatataccatacatatgcctggtgcccatgaaggccaggagaaggcctcagatccactgggattggaattgtagatggttgtaagccatcatatggatgctaggaaccaaaccctggtcctctgcaagagcagccagtgcacttaacaactgagccatctctccagcctctcagttttgctttttaattaaaagacttgaaaggatctagtgggccgggtggtggcacatgcctttaattccagcannnnnnnnnnnnnnnnnnnnnnnnnnnnnnnnnnnnnnnnnnnnnnnntgttgtttgttttttgagatagggtttctctgtgtagcctcggctgtcctggaactcactctgtagaccaggctggcctcgaactcagaaatccgcctgcccctgcctctcaagtgctgggatcaaaggtgtgcgccaccactgcccggctaaaaatgtaacatcagttatttgaaaaggtgtcaaatagaacttctgtaaattaaaaataaatgaaactaaaaattaaatgttcatgtttggtaccagcaaaagagaatcaaccagagaacaaatcaggagaagcaagcaaacccaaacaaatcctattttcataagtgctagtatggaatgctgtggaaattaatattcagccttcggaacagtggcatctgaggggcaaagagatggtccaaaagcctcaggaacagctcctctcaaaggcagggctggcttcccatgtgggtccgagcactcccacaagatatgcagggcttgagaattcatctgttccgctcacccaagtgtcacttgattgcagttcacgtggcactctcaggctgtgtaactaggaagcggtgaacaaggtgtggagagcagccggccaatcgtccttttcctcaaaggagggcaaaacgaggttgtaaaccatgaaatggctttttgtttcccctggcgtgtacacatctctcattccagcctggcatatcagtcatagatgcttgagcagggagcgaaattctacttataaatacaaaccagatcacaaggggccacacaggagaagggcccggtgatgaatttgtttgttaacaaagggtccaagcacttctttgtggtcctttcagtgcagagcctgtgcttgaaaatttttaccaagatctttgtgggtttttctcccttttcctttcccagctcccaccccacccccaccccctgtgataacatggagtagaaaacaatgctgtttttcccccctagattgtaaaggcaaattagactgatagcttcccctggctcctcgatatattttcagatctgtttcttgtatcagagacatttacataaaagtgggatctttgtaattgcagtttaaatattcagtgtggctgatcctcattagatttcaaaatagaaccctgtctgagtctgaggagagagccaattgtgaaagggcagacgaggagttcccagtgactggagcctcacttctctgcctgttgtccatcacgtaatgttgtctacggacacccgttgtgatgttagcattcctgggttgctgcagttgaaaatcagccctgctgaccttgcgcagacactgtccctacctgggaccactgcatctacctgcagctccccctggaggtgcagcgggatcatgggtacaaagcagtgtagtccagcatgggtgacccccacctgcagcctgggtgcacaggagagttgcttgcccctctctctgtatctctctttcatgctctgttttttgttgttttttttttttttttaaatggagctagcaaaggcaatgagcatccattactacactttagactgtgaagtgcctcaaactccaaaccttccagactgcagacatgatggcaccagtggaaaatctcatccctggcctcaggtgataagttggtgtcaaaatgcagtcgtacccaaacagttgtgccacattacctcaggctgtgtgcacacagtgtagatggaccaagtggattttgtgtttagacttgcttcctttcctcacaagatctcattatgtttatgcaaattattttaaaatacaaaaacatagcaaaaatctgaaacactcttggtcccaagcagcttggataaggggtgggatgttcaggccacattaatatgtctggttattctggtgataaaacaaagatagcacctgccacagtggtcagtactagttagttctcgggatcagctatgttaacctgttgaaataagttgattggtgacataggtaagacttggatatatatatataatgtgtgtgtgtattggtttttcgagacagggtttctctgtatagccctggctatcctggaactcactttatagaccnnnnnnnnnnnnnnnnnnnnnnnnnnnnnnnnnnnnnnnnnnnnnnnnnnnnnnnnnnnnnnnnnnnnnnnnnnnnnnnnnnnnnnnnnnnnnnnnnnnnnnnnnnnnnnnnnnnnnnncacatatatttttaagccagcacagaaacgcctttaagaagaacaaattagccaggcagtggtggctcacacctttaagctacttgggaggcagaggcaggtggatttctgagttcaaggccagcctggtctacacagtgagctccagaacagccagaaggacacacagagaaaccctgtctcaaaaaacaaaacaagggctggtgagatggctcagtgggtaagagcacccgactgctcttccaaaggtccagagttcaaatcccagcaaccacatggtggctcacaaccatccgtaatgagatctgatgccctcttctggtgtgtctgaagacagctacagtgtacttacataaaataaataaataaatcttctaaaaaaaaaaaaaaaaaaaaaaaaaaaaaaaaaaaaccaaaccttcaaaaaaaagagagcaaattatacatattgtactatattattaatatatactatattatattattatataggaattttgtaaaatcatgaagtaagcatcttctttgaattaaaaaggtggttttgtttggttggttttttgtttacttatggaattttgaaattttgcaactgaaatcgtcagccctgaaatccattggtgccattatgctgattgtaatgtttggaccacttatattcactcttttgaaacttataaaataataagagaaatggggagatgactcagcagttaggaggctgctcttgcaaaggcctcaggtttgagtcccagcacccacatggcaggtcacaactgtctataactccagttctggggatttgacatcctcttctggcctctgtggcactgcacaaatgtggggctcttgcattcgtgcaagcaaagcattatatacattaaaactaatttatccactaaacaaataagcataagaaagtgaattctctgctctcccgcttttttataggaagcctcaaaactgcttttttttctttttttttttttttcctgctttttttttttcaatgaattgttttccagcccttacctcaaacacaaatgattgatttaaatccaggaggaacagtgtgctttccctggcttatcttaagtgcttagcagaaactgactgatgtctctgctttttcttcctcttatcgtagtttgttgagataagctagtgaaattccacagcctctgtttccttcacagatgtgaggaggtgcccaggccaccaccgaggtctgcctccaaagccaccttgtccccagctttcctgtccactcctcttttttttttttttttttttttaatcccagtgtggctgctgagcatcaccaacgtgccagctaccaaaccagctagaatgaaaagataggacaagaaagggctcctcagaactcactggggaacaccacagaacaggcccatgtctgcctggggggcagaggtcaggaggacgagtaggagatgctgctgagcacactgaagctcctaagcacgtttggtctgtagcccagctcaagttgctggctgctgggaaaggagaagcctgtttacccaggagcttgaggctaggtgtggggaacaaatctataatcacatagtgtgtgtggccaagtcctgagacaggtgacagaaccctgaggatgtttccacacaccccagcagcaacttcacacagccctgcaccactttgtccttgggaaagtagccctgtgcttcatctcttgacacaggtcagtatcctttactaatgcactgccttatagtgaggcgttgcatgtgtaaggtagtcttgtgtagccagggtttgttcttgcttacttctcacctcacccttactcctcatttttcttgattctttttcctcatgctattacatctcccttcagtgggcaaccggcagtgggcaactgtgggaacccaacaattctgccttgcagacccaagtttagctgaatgccctggcctgtatctttagttctcagccagtctttcatgatgtccaacagtgtaagactctgacgagccttagctaccgggactctcccctacccccacccctacccctacccccaccccgaccccgcaagtgaaccacactgagctggagatcaatgtaaaagcaagagaagtttattggaacaaaccccaaaaaaaaaaaaaaaaaaaaaaaaaaggttggttttgtccagcatgctgggggtcatcctgcacccgaaggagaggcaggagaggcggcaacgtggggtggcccattcagcaagtttttatacagtttccagaggcagaatagagcattagcaactaggcacaatatgattggcggaatagtgtgccctttaaactgattggtctttagggaatgaggtagtaggggcttctcatatctgcagatcagtttctcccttccagaggggaggaggacctacattctcctcagcttctcccttctgggaagggaggggtctaggctattctgaggtctggtggaattttccagcaggctttagttagctgacctcttcaacagtaccttgtctctgtccctgacccatggacttgaactcttccctttgactccttttctcttccatcttctttttctgtttctaagtagggtctcctgcagtccgactggcatagggcttcctattgtagaggaggatgggtggaactcccaatcctcctacctcagccactgagccctgagatgataggcatgttccgccatgcccatcttccctgtttgttaggctccaaactcctttcaatccttcatttgccttcaggaaccagagagcagaatcctgcctgaggtaggcagctaagactatagccagcggctggccggtggcgtgtagagagcagagcagactgtttcccagcgggagggaagccagggcctgctgggccatctgggtttgtcattgttgttctgggtttttgtttatttgtttgtttgtttttctttttccagtatagccctggctgtcctggaactcactctgtggaccagactggcctggtctctgaactcaatctacttgccttggcttcctgattgctgggattgagggcatgtgccacccctgcccggctgttgtttttaaagagaaacctgaaatctggatccttaaatgaagtttcctaatattttaatgttgacaagaaaatgacacttaaaaggcaccttgtatcccaagtaaagtgtacacacgtggccctttgggatcttgcccatctgtgtgattagcccctcggcccgctgcgtccagcttgcttgctctctaccactgcctgttctcctgcttctggtattctgtcacatttaagtgaaaataagacactaaagtttcaaatttgatacagaaaaatctgtataattttgatgttgctggtggcccctgccttggggctttagtatattagtttgacatccacccagccattggaattgcaaaataaataagacagattccactccttaaggagttcttttatatttattcccttttcattcactttaaacccatctcacacctttctagaatagtctaggaaaaaaaaatcatttgaaataacaggaagtagtaaacaaatacaaacccaagagccaggtgtggctctgccgtgttcatggctagtcatttcaggagctaaatggccaactcagaagttccctgttcttggccctcacatactctaccctgagcctgtactctggtgtgtataatacacgttgattattatagttggaatgtcctttatatgtaaccgtattgctgttgtctgcctggttttaggaggagcctgtttctttgctcacggcatttatttggggaatgagaacaggaggagcactaagttcaaatgccaatgctgcaactaaatccaggcaaactaagccctggagagaagcgcaaaattgcaaaacctttacctaataggaggtgattgatggaggctgacagcctcagagctgtcaccatgaccgcctcagaaacctccatgtatctcagggtctactggaggaggcactgacttttgctatcatcgaggagtcagactttaccacaaataaaatcatttctagattattgtttttgctcagtgtggcgcagaatgataaggtattcttcctaagagcgatttccattcatactgaatactaatctcacagtccgggcctggatcgtgacgttactgataaatgcatccgtgtgtgttttctggtgacccacgttcagcagttagtccatcggctttccctgagggggcagctcctcctgggtagggggagaactgtccgtagcgctgggacagagtgtgccctctgctgatgcaaagctggtgggaggcaggaggagcaccccaacactggacgctctgctacccaagcctgaccttctttgaggtctttatgctctaatattctccatccacacattgactttcttttatatttgtaaactgaaatggagtggattctagttgtgcctagaattacctaaactggagaaagcttgagggacccgggaccacttccccttttcatatgtaaaattggccttgactaagtggtcattgttccatgcaatccagtgatttttcttttccatatttctccatgatgagactcgagcagcctacttcccagcccccaccccctcccttgctccgtgactaggctcacttgggttagtctttcttgccggttggccactgctatgtttgttgtgcttataaagaaaattcacatgcgttgtgtgataagaaagattgggaaaactttgaatggaagtaaagagaagttttggtgggcttaatatgtgttaggacagggaagcaaagggccggaatatggctgctcccttgggcgctccggtcataaccgtagattcctttgcttagtctctccagttggcacaatggaccttaggtaatgattgttagctacgtatttgaatgtgacctggaagaaattccccaaacagaagcagtggatgcaagtcctcttctctaaaatgggtaactgtacagtgaggcaaaggaggtgtgggtagctctgggtcactaaggcacggttattcaaaaggtgtcaccctctttctgtgttacttagtaggagatgctcatctgcatccgttgttctcttggctgcataatgcttgccactctgtttcccaggcactgagtcccagcctgttcctggtgtgtgctcacagagtgaagtacttgattaactttggctgcagtgcccaccattggttaggaggaacaataagcactgttcagtgacgttaaatagaaacaaaattaaagcgggcataacagcaaacaacaacattatgcttgttatattttagaaagtttaacaatgaattgcatgaccacctcaatttgcagctctgtacagagtatctctgcctgccacttcttgttgtgtcccagcactgtgccttgaagaaagcagatccattgcagatggtgcccacagttcagggacaaggacctgtggctctcgtgtgcccacagtgaaatagatgcccacttgagaccgtctgaataaaataggaagatttgggaagtaccaggaaatttgtacaagttaaaaataaataggaacgggaggtggggctcaatagtagaacacttgcctggcttctgcagagccctaagtgccatctctagcactctaaaagaaatgaagaaagggagaagaaaaagaagagagagggaaggagagaaggagggagagagggagggaagggggatgggaggaagggaaggggggataaaaatcgattcttcccctttacttggcccctttgaaacgcagttttgtaagccctggtattagcttttaaataacttgactccagatgttgttgcattagtgaagatttcgatcagctctggggatccattaattggctccaacagaacgctggcagtgaattggtatttattttttggcttacttttgccttctatttcagagtcaggcagaaatgacaattttcagtcagtgaaccatgttaaattccttggaataactgatttgtggttcatttaaaatcactatcggttttctctgcctgtgagcctgaacactgaggccagtttctccagattagcagcaaattgacctttatgtcagatgtgggtgtcatctgggccatgcccaagcctcccccgacagcagtgccgcgtctcccactccctggaactgacctgcctcggtagggcatgtggcttggtcgtgcttgagaaagcacctggctactgagtgggccccagagattctttgactccaaatagcccatgtttcttttagcccttaaagtagtgattcctttcaaagcaacttttatgcaaagttatatttttttgaaagaacagatagtatttattgcaaaaatggcttctaatatgtttatcattttgttgacttttcatgtgatacaaagaaaatgaaaaaatcattttagacagtgagaagatacggtggtggcagtgacccaccagcgagaatgcacttattgtcacccagctgtgtccttgtggaggatgggatggtaaattttatgccgtatagatttaccacaacaaagtgcttattgaacaatgaataagtagcctgctgttcccgactccatgaaattaccacacagctggaatgcagcatttctggagtgcctggacatctgaaacagtgcagtgagcacgctgctgctcgtacccatgggtttaatgtagcaaacaggatcctaattagagctatatgtatttgcttaaacaaatagaaataggaacaaagagaattttaaatgctcaaaggtcatcttcagtataaatgcaagtaaaagaagaattcttattgttgttctccgtcagccatttagttaggaaacctcgagtgaagtctcatgttgtttggtctgcagtgactttttatcctatggcctctgacattatccttgtctgcctcagtcacattggcccctcttggtgtactctgtattcttgtgaatttaattgaaacaccttttaatcctcgctactccagctgccatctaagcatcagggacgtacatttcattttccttgggtggcagtaagacgtcccacttcctgtggcattgaaccttttgtttcattttaggttttgcaggcagggtctcacctcaaatttgctctgtcgacaaggctgaccttgaatccccgggatcataggtgtgcgttgctgtgttctgctctactctgttgttttatagactctgtttctgaggttaaactcacagttcttctaaaatctactttgcttttttccttcactctcatgtttctagttctgctcatcttactgtaaacctgattccaactatcacccacagttcttctcatatactctttcctaagctgtgcctggcatttttttttttttttttttttttttagtttatgatgactctgatcagcttaatgatcataataaacttcttccttataagattgcctttttgctagaaggtgcataaatagcaagcctttggcaatctttttattggtttttaggagttcataggatgtattgtcatcatatccaccacttcttccccacttccaacccctctcatgcccctcagatccatgtcctcttgctctgtaattatagttttagaatgtctatgaaatctactaactccagctagtggtgcctgtgtgtacttgggtatagatgggatacttgggtttggacaacctatctgtgttcttggtcctgaagaaaacttgttcatcctcactgggccaccatgactggctgtagttctccagctaggggtagggccatgtgaccctttcccttatccatacaggaatatcaactggtgtggtcttgtacaggcaaccacattgctgagtgttcatggatgcactatccgggtcctctggttctaaccatcttctgcgatgttccctgagctgtgggtatagaggtcgtgtcattgatgtcctatctggggataaacattctaccttctcttaccctctacgtgttgatcactttttgatctctgtaatagcccccatctgctagaaagagaagcttctctgatgcagatttgtctgtgggtaataaggataagctctaggaaggcagggagatacaatatcagtttagcagaatgaagtagtatgttcccctctaggattataacctctccagttaatggttcttggttatagtatcaaacctgagttccctccaattgaatgagtcttaagtccaaccaggcagctgttggttatccccagaatattagtgctaccataacacttttggagatgccttgttagtcccatagttatggttttatggctctacagctagctaggactattggtaacttttctcccttggcaacttgctagcgtcttctgatgctatgaagctagccaccagagaggagacttccaggccagtaccaactgatctttccaagccccagaacaaaaatatgtggtttcttcagcaatagggtgaccatgtcggcatattggaggtcagaagacaactataggagccactgtcttcttcctttgtggatatcttctttacgcaggtcatactatgaagcacagaagggtttttgctgagccaataatagctgcaaggagaaagaaaaatgtaaaatcaatctgggagccttcacccttggcttgttttcttttattttcactttttacatatacgtaagtgtgtggcacatacatgctggtgcccagaaaagggtgtcagatcttctggaactggaattacatgcgattaattgtgaggcacacaatcctagtcaggatatcagggattgaactcaggtctcaagattgcaaagccttgttttgcctgctgagccatcttgctagcctggcaaatttttcatgaggaaaacaaagaggggggtgggctctggggctgtaaatactaaaaccaaacaaagcaccaggcagtgggggcacacgcctttattcccagcacttgggaggcagaggcaggtggatctctgagtttgaggccagcctggtctacagagtgagttccaggacagccagggctacacagagaaaccctgtctcgaaacaaacaaacaaacaaacaaacaaaacaaaacaaaaaagccatatttataaacagtttgtaaaacagaaagtgcctataatacaatattctatctggaggataggatagtcaactgcaggagccacttcctctgatccttgtgaacctgagcattacttggttagaacaaacagagtaagcttgttaaagaggtaggtgtgtgtgtgtgtgtgtgtgtgtgtgtgtgtgtgtgtgtatgtgtgtctgaaagaggcagggtaacttactgattttactagtagcatcactcaaaatggatccaatagtttttcaaattctatttctaacatttatgtcaaagaagcccagtcacatatctggctttgttacctgtgggaaacctgtccagctcctgaggacaataggaaataaggagtctttgatgaatttctgcttggagatttgagggtatcagtccaactttccttttcagaaccaacgtgtttacttcaagggtcatgactttcaaaaatggtaatgtcttattttactcatattcatgttgaaaattaggagcccaagttcccgtgtgagcatgctggacacaagcctagccaggtttccctgagccaacagccctgaagcactagtagcccctagggaaccagtttggtgagccctggattagaccacatgagctaacctgatgtaggcagcattgctcatccccagaccacatctccatctctggggggaggagcccttccatggtttctctatgctcccctttcttctcttcctagttccccctccatttcctgtgttttcgctgttctgtcttcaccacctctctttgtccatcaactcggtcaagattacatgtctggaaggcctcacacttgagctccatcccaccctcccagccaacacccataaaacgctactattccctggtttgttttgtctgtcccagacagccaatttctctccctgatgggttgcagaacatggagccatctggaagtataccgtaggatataaccacaggaatagtccccacaagtacacctgaaaagccttcctgtatatctttatggcacactctgtagcttacttttgaaaacgactgtgtgcaagtgtgtctgaaggaaagttttgctatatagcactatctagtcttaaatttgagatcctcctgcctcattgccttttggagatggggcatcatgcccatctttccgtttagttggtgagttaatacctagtaacatagcataactgtgcagttcagcaaaattaatgacctaaagagccaactcagtggtatcttatcagagagagaggtgtgtttttggtaatcctggcagtgtcaaaactgttttctttatttttaattttcaaaattaaaacatgattatatcaatttccccctttcttttcttcctcaacccttttccgtgcacctccccacttgcttgttctctctctctctctctctctcaaattcaaggcctctgttttttaaattgttgttgcatatatatatatatatatatatattcatatatatatatattcatatatatatattcatatatatatattcatatatatatattcctaaatgagagagtgggaggggaaaggtaaagtctcccccatatgagtctcttccgtgaagcggctgccacgttgaggaggaagggcagccatcctgtggtcctccctggaggctgtccagacagaactgcctccgctgcagatgggctcctagacccacgctttacctccgcagctgcactcttgggggcttagccagcctgcagggctacccgatagaaacagacagagaaatgccgaacagtttcctcttcctctgtgccagctgtcagggagcctgcaggggcaagttgcagaatcaagccccagtgtgaggagcagagtgaagggcaggtgctgagcagggaggccctgggcaacacctgacacacagacaccggatgtgagctggtggggacgctctgtagagtattacagaaccccatctgctggctggtcttcgatattcctttcttagttataggttcttcacggagctgttgaacactaggaaaagatgccatgtcatatcctaaaggacccaaatcatgccaaggactattaagtttgagaaaacttcaaggagccggatggtgatggcgcacacctttaatcccagcacttggaggcagaggcaggcggatttctgagttcgaggccagcctggtctacagagtaaattccaggacagccagggctactcagagaaaccctgtcttgaaaaacaaaaacaaaaacaaaaacaaaaaagaaagagagagagagagaaagaaagaaagaaagaaagaaagaaagaacaaaagaaaacttcaagatcagacagtctctaacagagcaagcagtattgtcaccttgaactaatcgtagaaatgacaccatttccactgctgccaaatggacctgccactgaaactttaaataactgcagatcccagcaaggtacaggtgttgaacttagtgacttacaaatagattggcttccatacatcagttatttcctgtctttttgtttgtgggggagaaaaaaaaatgtggaaaaccataaatagaaagagcctccggccaactccctgcaatttcacagattggaacataaacctgaagaaatgctccattgagtaaaattaaaagacaagagaggatatacaaaaattagttggtcaatacaagacccaaacaatcttacaataaaaaaccaggagtgaggaccttgtccaaggaataatcaagaaatgactcaagaactaagggcgggagtgaccgtatatagagagagttcatttagcaactagtttaagaaataaggttaagaggttcttgaaccttgtgctgcaatgaacacccccaatcacaggatcaagagtttgagtccatgtgccagtgagaagaatcattggttaaggtgtctaccaccaagcctgacaaccgccaggacccacgtagtggaaggagagagccagacccacaagctgtcttctgacctacacatgtgcagtgtggcatgcacaagtgcaagggtgaggatatgcacacacacacacacacacacacacacactaaataaagtatagaaaagatttgaggctagcctgggcaatatagtgaaatcctacaaaatagcagcaacaaaaaacttgcaccccgtagcctgatcagttccctacgggcttcccgggtaggtctaggggatcatctcttttttttggttttttgagacagggtttctctgtgtagccctggctgtcctggtactcactttgtagaccaggctggccttgaactcagaaatctgcctgcctctgcctccagagtgctgggattaaaggcgtgcgccaccacacccggcagatcatctcttatcaaaggatctgataccagcatctcagcagaaacactgggcaaccatggaatatttaggaagcaactggcaagtgcattttccctaataaggaagtaaccctagaaagacccggggtgccaggaaactggaggaagaaatagaactaactccaagatgatcacagtgggagactgtacagcagacagaggtgagccaggcaagattagcactggcagagctaggtacagcagctcctgcctgtaagcccagcactcaggagatggaggcaggaagctcgggacttcaaaatcagccagagctaagtgagaccctgtctcagaacagaacaaaacaaaacaacgaaaggatggcgggggagtagatcagtgtgctctcctgtgtgaaacatttcactaaaggctgtgggagactgggagggtaaggaagagtgaatccaaagaaccgcaagagtgaggcaattaataaccctaggaaaacaaaaagcaaaacaaatctacaatcctgaaaacccattggtctttcagagcagttggtggaagaaaaggaatgatgctaggcttggggtagagctctggggcagaatgcctgcctggcttgactgagaccctgcgttaaaaccctagaactgtacactatgtgtattatatttatattgggtttttttttcttgggggggggggggttcaagacagggtggtttatctgtgtagctctggctgtcctggaattcactaggaagaccaggctggcctcgaactcagaaatctgcctgcctctgcctccaagtgctgggattaaaggcgtgcgccaccattgcccagctttatgttgatttttaagaaatgcatccaaaattccatatctccatcaattcattagcctaaggatagggagaaactcccgctgtcagctaagaaactcaaatgaatgatattttaaacgtcaccttttggactgtagaaatggcttagcagttaagagcacttactgcttctctagctgtgctaagttcagtaccccagccttggtgttgggcagctcacagcaacctgtaaccacagttccaggctggtctaatgcctttgcctcccgtggacaccagcactcccttgcatgtacccatacacatgattaaatgtaataaaataaatatatattttttaaaagtaacctttttccagatatggtcacatgcaactctagccctggccactcagtaggttaagtgggagaattatgtgagcctatatgagtttgaaaccaacctagacaaaattgcaagccccccatctcaaaagatggaaagaaaagacagaaagagtaaagtcgcaaataaggggttgtgggaagcaatatactggattattattattatttacaaagaaaaaaaatatattagcaaagttatggcacagcatgtcccgcagggggaactggcagccagaggctctaacctgagcacagtgggaactgatacatcacctctctatattttctttaatgccaaaaatgttaacttgagcaaagagagtctactagagcagttcaaactgaggggcagtccgtgagacatggacagttagtgtcctagaaagaaaagaaggcgtaagggtggccgtagacacagggaagcggaaggctgtggctgctctgggtgcttgtgattttctctggatcctggatttaacaacacacacagtaccgcaatgccaagccagaagcttctaagctaaaggccagtctctgtttcagagaatcctggggtgtagctcaatgctagagcacttacctgccatgtacatggccctgggtttgaaactcgggccctccaataacaataatgccatgtatcattaacaatgacaagtggataaaaattcccaaccaataggaaagagtgtttgaatgtggactgtgttttagacaatgtgtcagtggttggctctgaagaaattgccaggtatgacagaggtgccatgaagggtcagttgacgtcgcctagagtcacctgaggagggaatctctaagcagaggccatgtctaggggccagaggcggaagggggttgacttgattattaattgatgcaggagggctcagcccactgtgggcagcaccatccccaggtaaggtggactgcctaagaaagcttgcagaaggagatccagtgagtgagccagcaagcagcattcctccatggtttctgcttgagtcctgccctgccttcccttggtagtggactgtcctgggagtgtaaacaaaaaacaagtcctttcctcctctacatcgcttgtgatcatggtgcttatagcaacaacaggaagcaaaatagaacggtgtgttgccaaaggtattgtggctttgcattttgctttccaaagtttaagcatactgcacaggcagagaaaatgaatgttaatcattacttattgaatatattaattatttatcaattagcctaggttatcctgtatcatactgtcttttctggaggtttgggatctttcaaaatagaattggaaagaaaaatgcacaaatacagacaatgaaatcccctgtgggttagtgtcttagttttagtgcctttgttaaggaaaggacagtgtctggtgacactcctaggtgtggctctgtaaactctttcctatctggtcttcaaccacaggaagtctttaaagatgggcatagtttcggtaagagcaaggcaaggtaaaagggataaaccccacacacagggatcagcaggcctcaggactgcgggcagcagccctgcctggcatctctgtgggctcttctcagaggtgccttcctcggaaaggtaagaacgtgggccagagagactgcgataaactgctggctgcctagcctgacgacatgacagaatgagaaaaccaacttccacaaattgtcctttggattttacacgtgggatgtggcatgcatgatcttagacccactccccactatacacatataaataaggaataaatcagtgtaaaagttttgttttccattaataggtcactttgtagaccaggcaggctttgaactcatagagatcctgtgtgcctctgcttccttagtgctggggttaaaggtatacgccaccacacctggcttaagaatctttttttaaaaagaagaaagaagccaaaccaaaggcaggcttgcagaagcactttagttgtagttcttgctggccttgaaccttagatttagctttgctttgctcttctctcctctcctctcctctcctnnnnnnnnnnnnnnnnnnnnnnnnnnnnnnnnnnnnnnnnnnnnnnnnnnnnnnnnnnnnnnnnnnnnnnnnnnnnnnnnnnnnnnnnnnnnnnnnnnnnnnnnnnnnnnnnnnnnnnnnnnnnnnnnnnnnnnnnntcccctcccctcccctcccctcccctcttcttttcttttcttttttttttttttttggttttcaagacagagtttctatgtataatagtctgctcactatcttgtgttttggaactcactttgtagaccaggccggccggactcaaactcacagagatccacctgcctctgcctcccaagtgtgtcaaaggcgtgtgacaccaccgcctggctagatttaggttttcatctttgacatcataggtgggaagcttcagatgttcgtcttctagagcaagtgtgccaagagcagagatcatgccttgggattgtgattctgaaaagctggaggaagatagcttggttggatttccttgtaaggccactaaataatgtggaagaaggttttctgtttaagctttaaaaaaaaagacttgtcagccacgaagatgacatctgaatagggatataaagtgtactgtgagtgggatggctacaatgcgcttgcatttgagtccctattcaatactcacatgtctggggacattaatagaaacatcatctgtcaccataaattcctccgtcttggcagctcacagccccttacactgtagccgccagcgttcttttcacaggaggtttaacatgcaccatatgctggaatactattcagccatgaaaaggactgaagtggtaactcctgcactacatacaaacagtccagacttgcacagcttccttggtatgaaatgtccagagaggataatctgttgacacagagagcggatggtagttaccaaggcttgggagggggatgctaagggaaagaccgcttggtgggtgtgagcttcctttgagggcattgaggagaaagttctagaatagaagtgaccactgtaaacattgtaaatcaactcaatgctgatgaattcagactcttagatggtaatgtttgtgacatgttttattacaataaaaagaaaaacagaaatcttccatccatccataactggtcttcaaaaacaaggaccaatttttctaagcagtacctcttccaggctccatggtaccaagcagcataagcagactgaagagactggaaaagggaaattgtcacatagggtggtagtgggctgtcacaggaggcaacagaacagcacaggctgaggtcacaccaatgagacccttggctaattccattacttgtcagtgatataaattaatgttgggggcacaaccaactttgaagctgctagcaagggagagcttccctctgaatgtccccctccataagctgtcagaacccggtcaaggaggcacatcagctctgatgcccttcctagggtgttgctgcctcctgtcagcaagttagaggctctaggtggtttgttcatttcttagactcttgttttcttagtttgacttttttccccaaatgctgtatttgcatgtatgtgaaatcggctgtcaggccttcgtatgttagaagcaccccaccgagcattcaatcacttttcagtcttgccaagaacagtggccagatgaggtcaaggtgagggtggtcctgcttgctcaactttttctttctgtggtcactctcaaaagttcttagtttttccatgacatgtcagttttggagattgaggttaaatgggatggacaggccgacggctgtgttctcctgtggtgatacacagttgacatgggggaggggagggtgggcagtgtgctcctgtggtgatacacagttgacatgggggaggggagggtgggcagtgtgctcctgtggtgatacacagttgacatgggggaggggagggtgggcagtgtgctcctgtggtgatacacaattgacatgggggaggggagggtgggcaaggagacaaggtaaaagaagggtgattcagaagtgagagtaagtgagcacttgcctggcatgcagggagggaggttgaggaggtcggaagtgaggcagggactgagaagcagagaggcttccgggagtccccccatgttcccgcatggaatctgcttttctgtgtaaaccctttctcttgtcttccaactgaggggccactagtgatttgtttctagacgattggtggcatcagccttatgtgtgcgaaggaatggaaaggggctggatctgcagcagaaagctgaggaaatctgttcctcaaaataatggtgtggaagtgttggtggggatgggggcggggagaattgcttgtgcatggtgggaacgcgtgttgtgacacatgctaagtagaagtagggaggctcctcagacaaatgccagcagccccaccactgccctgttgaagagacagaggcaccattagcgggatacagacagggaagcaacctaagtttctatccggggagacatgatttcagccacagtggaatactctccagccttgaaaatgaaagcaattttgtcatttatgaagctggaggttgttatcggtcttaggttagacaaagttaaatatggcttgaagtcacttagcaaggcaatctgaaaaagataaactcacagacatggaaagttaaatggcagttcctggaggccgactgcctaggatggggagatggtcatgtttagcaaaagttccagacagataaaaggataatttttaagatttttttttctgatagcaaagtaaccataggttaaagtgtgtttcacggtgctagaaggatagctgtttgtaagcacatggtatcttattgttaatgatagtcacttcattgcacaacagaacaccagaatttcttcctcctatctctgtgactttgtagtcctttccacacatctccctggccctttgcatcctagggctttctcattcttaatatcaagtctccccaggaatggtatcatatacccttaatccttaggagacagaggcaggagaattcctttgagttctaggccagcctgatctacatatcaagttccaggacagctagaactatagagagagactctgtctcaaaacaacaacaacagcagcaaagatgcttgctagcttaactggtagggcacttgcctcgtatacagaaagacctgggttcaattttcaatactacataaatcccaactatggtgatgaatgcctatcaccccagcacttgggaagaagaaagagggaattagattagattaaattagatcagacaattagggttatccttggctacatgttgaatttgagaacagtcctggtatataagagattctgtcttcactgtagatagttctcctcttccctcatctttccctccttcctcctcttccttctttacttccacaggatttcattgtttagcggaggctggtttggaatttccctgccttggcctcctatctgctgggattgtgggcacgaaccacctcacgcagtcctaatactaaacttagcctgatgcttttcatcaaagaccccaagtcaagctgctctggtggaagcaggggtagaaggaaggcttattcttcaggaggggagggctggccaggaggaaggagctgcggaaatgggacagcaggagcagactgtgaggatcctgggagcagcctttgccagggtgacannnnnnnnnnnnnnnnnnnnattctgacatctttcacttttggattcttcacagaaagagttttgaggggcgtgaatatatatgggggaggggcagaatgttctggttgtttcagattcatggttccacatgagtgtttggtatgtaacgtcagaaggaatagttataacccttatcacctgctttctcttcccctaggtaaacttagtccgtccaccatcccaggactcagacttgagatgttgggggcactcagagtaacagtgctgttgggttcctaagcctgtggactggaggattgcctctctatcctccctccctatcttccttccaatatgcctccccaccccacccccatcccacacacaccctgctctggacttggggttaaataccagcgggcctttcacagacaactgaagcgcaccccagcccctcgatcatctcttgtccagagcacaggctttctgggttttatggtccataacatccgtaggcatctgcatttcttgctcacaaatccccttcttctctccccggccctcagctgtcctgccactcagagcaccttttatctgtccatccatctgtagatcaggctgtcatttcctggcactcggcaagtgtaaactgaattcgtcttctgcaacgtgtcgcccagctaccataaacacatcacacgtgctcgtaaacagagcaaaagccagcctgctgcagtgtttgggttgggcaccaactttcttcctgtggtatttctttccctgagcctttcttccctttccctccagggccccttttgcaccctctgtcatcctcatgtgggttggcttgctgtacctccctgagtcggtcctcagagtcatctttctctttgggtcttacagtcttagatacagtcacccacctgatcacctgaaacacaggtgttattttgacgagattggctggcaacttcccatagctccatcctgcctctagaacaccgcccccccacccccacccccagccctaggctctggatctgaggctccaaccaaaccagttagttctgcttgtccaaacctcacttgcttctttctggtcttcagcatttgcatacaacccctagactgtccttggactccattgaaggattcgtgtagataatcttcctactgttgtctttctgaaataggcttccactctgtagcccaggctgacctagctcctctgtagcccaggctggccttcctgccaagtgctgggattatattggagcacctaacacacctgtttatgaaagacatggaaatgtaaggatctatgggactggaaccacaggggtagctatgcaaaggagaagcatccagcctcgaagcctgcctcctgccacagggctattcgtgggtatcagtgtggacccagcattccaggctcttctggtgttttagacagagacagaaaccttcagctcttcatttttaggttttcacctcacaccaacaaagtcagcccttcctttaccatttcagtttgaaggtcactcatgagtgtcatggatatgaagcagtcagtatccaaaggccaaatggaggacacatctacaatcaggatgagtttgggatatgtaacaactttctgaaaacctagggatggaacacgcatcctgtgacccggagttaggagagtcaggagatgtgtacgagcctcacttccttttaaccggtgaacttggtaatatcccctcgttaattaatgtagccagatatctttaatatactatcttccttttacaaaaaaagttcagcaagacaaaattaaacagaattttgccagactgacattaaagagcaagtgtgttttgtatggctattaaactgtgagaggggctgttgctggggaacatcacaggccttgtgaagaacgagggaaggtcacaggcaggaatgaagcggctgcccctttgaagggctgagaacaggaggaactggccgggcaggtgtgcagcgcactcccacacaggtgcagattccaaatgggcgattatttattacatctgggtttctgtggcagtcatctgtcatccactcatagcatttctgctggctcccttcagtgacgctctgccgcaggggaggatgccagggtgcttcagccaaaggctcccacctcaggttccacagggacacgtgatagaataaagtacttagaatagagtttcttggttccttggggtccggtagggaatgctacctgtggcaacagagccggcagctttgggagggtttacagcatgtctctgggtcctagcatcacctctgtgggacagtttgattccagtcttgtttcatatgtaacatcagaaaagccgaggggtgatccaggatgaatggtctgctttgtgtgttttcttgtttggctttggaggcttattgattagtacgctgatagtgaatgagccggaaagagtgtttagtttttgtttttgttttttatttatttatttattttttttaggcatcatggtctcgtgtagccaaggctagtctagaattcactaggtggccaagctagccttgaactccagatcctcctgcgtctatctcacaagtgctgtcacagacacgcaccacaacatctggcagaaagaagagtttcaaacactgtgtgttgctctagctttgcagtggtgccaaggttgaatgcacttggtgtcaggtgaggactggcgagatggctgcagcctctggagactgtgcgtgtgctcttgtgcaggattttctggttttggtacttgtctggtatgctcgtatctaggatctacatacagagaggctgattcagggagccctgggctgtggagcttgagtctaataaatacccactgatggtccctaggtgggtggatggtctttgagagttcttcctgtatcaaatggaggcttttaaaaaccacatttatttatttgtgtgtgtgtgtgtgtgtgtgtgcgcgcgcgcgtgcgtgcatgcgtgcgtgtgtgttcatggatacacatgtgttatgtggtagacttcctgaggagatacagtatatatacctgcttaccccagaaagagaggtcacagcaaaccaaataactggtacaccaaaatccaccttgatgaactgatgagagttagtggggttactgttacaggagcaggaatgactcaaggcagctacatcagtagtgcccaccacagacagcatgagggatagctcaccagagctggaaacctagagcatactgcacagcctgcagccagctcagagcttaaagagtgccctttccagagggttctcagttgggttgaacctcttccggcagcttgacctgctctgtttcctccaggctgctcagcttctctgagaatgactctcagagatctttattgtttattcttgagagaaggcctttggtcactttcagggtttttctgaagccactgagttgttaacttcctgccttaaggatggttccctgcaggatggaatacctcactctccccctagaaaaggagtttttaacctgtgggtttcagcaaccccttttctgggggtagggtggggtcatcaaatgactctttcacaatggttgcatatcagatagcctacatatccgatattttcattacaatttctaacagtagcaaaattagagatatgaagcagcaatgaaataattttatggttgtgggtcaccacagcactaggaactgtattacagggccccagcattaggaaggttaagaactactgccctagttgtttcacctccttgtaaacaccctgctgtttgactttccctttatgtcctatgacttcagaagtttccctccagaatggaaggctttaacctcagagcaatctgcagcagaacaacatgccacatatggacatatggacagtctgttctctcctcccactgtgggtcctggggagagacagaactcaggtggtcatggcaagcacctttactcactgagccatcttggttagccctttgggaactcctctgtgaagagctgtggttagtagaggaaggagaagataatagacaaaacatgagtgcaggacagagggatgctaggacccttccaagtggtccacacaatgtgatgcaggagctggaagtcaagagagttcctctccagccactgttgcctggaggcttacaagttagtcaagagcaggtgagagtctgaacaattatggcatttcagggtaagggagcaaagcccagaggcagggagggagataacagagttactcccaagcttggaacccttcagtcgatacaggtcaccccaaggccttgagaataaaattcaagctcctaggacgagcaagatggctcagcaagtaaaggctgttgctggacaagcctaaggagctgtgttccattcttctagtgatggaggaagcaatccaatatcccaaagatgtcttcacacacacacaaacacacacacacacacacagagagagagagagagagagagagagagagagagagagagagagagcacaaagcaaagaaacacctcctccccttcttagcagtttccactaataagcaggatctcatcctacatcaggtctcagctttcctccttccctcccctctcctaccacactgcacccttagcccccaggactcttcccctgaggactaggatgggcctgtgaaggtagtctcaagcccaacccatgtctccctacccctatacagaaatccattttctagtcttcatttccctttgctttagcctctgaccagcccagacacagcctctgagcgtcttgtatgagtgcagactctggtccagtaagtgtaggaaaggctcatggacacatggagtgagtggatcctgctggttcatgaaaaggccatgcagcatcagtttcctccttgggccacatacctgaatgacccagagagccaaacaaatgacaaacctggatttcctcatgccataaagattgattgagttgctttggggtatagagacctggggttctcattcaagttgaatcactagtacactagatattcttccttgattccccacttctgcaccatgatagtcagttacaggatctatcctatcatgtactgacttacaggtgcctattctctgtgtccttcactgagacacttcagcatgtctgtgtggttctttcattttatattcattcattcattcattcattcattcattcaagaaaattttaacaaccctttgttatgtgctgtatcctgtcaaagatgctgaagacatgaatcagtcctgaaggcagatagcactacacactacacactagtatttgagagacagagtccagaggatcaggagttcaagaccaactttggctcaatacaagcaaatcagatataaaccccaggtagaagacccatcagctggcacagtgcctggtgtggtaggtccttatcccagagccaagggaactgaaagaaagatggtaggagtggaccaaggttgttaccaaaacactttgaatactggatataaatctgacttgaagctctgaggtaggtgtcagttaattcaaagtcattagatcagacaatggagcgtttgaaaggagggccagccactagaggagagaaagctgcttagcatccatgcctacaagctagcagagtgcctggactaaaaacacagggaagcagcctttggaatcatcccctgagcaggtctgacaggtggaactgacggtgacatctcttgctatctccaatgcttatctccaaagtatccaatgtcctctataggacttatgcagacttctgtccccttttttatttgtatttatgtacttaagcctatcgcttccccataacatttagtttgctaactgaattctctcaacagtgaggactttggaagactttaactctgatattcagagagaaattgccatacttgaatacagtctttgaaaaatgaagagcaagaagctaaagttatgggtcgggggatatggctcagctggcaaaatggttccctaacctcttcaaggccctgagtttagaaggcagaggactaaggagcaagagagaggctcagtggaagtcaaggcagcatgcagaaaggagggagagctgaggtggaaagagagaggctgtgctcccaggattgttagggtggagccttgttggccattctactgactggacgcacaaattcgagtaaatcagtacctttctctgcaatatgaatgaggcctttttctttcataacttaaacagagtttgtatgtaagaaaacagccccagtccctcccccagtcttttttttttaaagattacttttgttttatatgtatgagtgttttatctgtatatatgtcaatacactgtgtgtgtgcctggttcccacagagttacatatgaatcaccatatgtggtgctgggaatcaaacctgggtcctctggaagatgagccagcgctcttagctgctgagccatttctccagtcccttccttggggtttagttgcattttttttttaagttcattttcatgaggggggaggtgtctgtgtccttagatgccagaacaaggttttcgatctcctggagctagagttgcagttgcctgtgagccaccaagggtggatgctggcaccgtagctcaggttgctggaaacacagcacgctctggacatctctccagccttccagccctttagtttaatgtttatactcgaggctttctttttttaaatggctatgttcctatggaattttaaggtggtttttcttgtggcatgtttgtagaaacagcatgccccagaaatctgctttcagccctcctgggcattgcctacagttttcctgatggtaaaattctgtcctctgatgctacttgggccacttgggtcactttctgtttcagttgcactttcaaagggacattttgggttgaacttggcatttatttaaatacactgaaattcatttcttctccacccctttctggctgtaactttgtaagacagagctaaaaccaacaaatgatactgaagatgacaactgttggtgagagacactggaaatgttgctctcactggaaagcctctctccccagcctgtttactacccctgtaaggacctaattaaagatcaaaagcactttatattcctcatttctggcatggtggttttgactttgcacctatggatggacagcattatctttccaaggctggatctctcacattcctggtggcttctgcttcctagccgaaaaggctttcaccctggtaagaattcagcggtgcttttcttttttctttctttcctttattttcttttgcctagctgtgattgtttattaactgaccagattacaaaaataccatgggtgacaccttaacttcatccttctaataagcctgcttatctggtcttctctgttgccagcatatgcagcagtgcttttctgcaaggtactcgtgcctcgtacagaacaagttcataagtcactttagaagggttttgaaatgctaattcacagctgtcgacaggtatgaatacccttcagcctggaatgtcacacctattcaaagtaactgagcatccccgagtataatctcttttaaaactagaagtgtaaaacctggttgcttagagctgagaaaaaattccttaagtgtctcatagaaacgttgtttcagaaatagtcacagccctagccccggtgaatgttcccgtctatccaggagtgtgcttttggcacgtgcacctatgtatgcatgcctcatctacatatgtatgtgagacacaccccgagagcctcttgtattaatgaggttatcgtgtgtgtgtgtgtgtgtgtgtgtgtgtgtgtgtgtgtgtgtgtgtaaaatttttgagatatcctacttgtttaccagtgtattttacttttacagaaagcttattgaaattttttccaattgtgaagaatattattatagccaggtgtggtggcacacacccttagttccagaactgtggaagcagaggcagaaagaaggcttttgtgagttggaggttagcctggtatacatagcaaattccagtgagattctgtctcaataaaaaggctgaagggaatggctcagcagttaagagcactgactgctcttacagaggacctgggttctgttcccagcattgacatgtcaacccacagccatccataactgcagttccaggggatactgtgccctcctctgacctctgtgagcaccaggcacaaacatggttcacagacatatggaacaaaatcctaatattcataaaataaaaataagtaaatctttttttaaaactgtagaaaatggtaaataaaatgtaaacaaactgaaaacctactgtctacaaacagtagctgctaagaacttgtctgtctagttgctttgctatgcagacatacatgacatccctacaaactatctctctcttttgaacatcttgagatgccatctcacatactactggactaagtttttctaccagagcctgagatttttctttatctttattttccaacaaagtgagtgtctaactttaaactttgggaaatgtgtatctagttacaggacctccaacttgaagcaagagtaatcttttccagcatttattacaaggcacattttaacttgctgttgggaactgagaaacagttggccttaaatccattatagaggggacggtcatcaccaggttgggaattggagctggtcctccggccctctggatcatgtcccaggtccgtaggtttaaccaaccacagaagagaactacttgagaagcaaactgcatttacattgaacatgtgcagactatttcccccttggcattgctccctaaacaatgcaatataacattcattctactgcagtataacattcattctactgcatttccatattaggtatcataagtcactcagaggtgattgggtcctgtgttagacccccttgcaccacacagagagatggagtctatgagaggattagcctggtgatacacagacagcgacatccctggagccactcattccctgttgatcgagggactgcctcaacgcgtctcaatttcacttgggtgtagcagctaaagatttttgtgacaggatgcaactttccagagatagccagaaaacatcatcagctccattgggaaatatatcttggattctccatgctgcaccgagagagagggaaggttagcagtggtcagtgcccctcacagaacgtgttacagtggagggagggagcgcagcgaacagacacagaaaaatgtaatctttgacacttgagacacagtctggatagtctggaggcctcctgatcgccacgctctccaaatgattcagctctgcgttgctgatttgtccacattaattaagatcagagtgtcactagggagtggtttggataatgtgaaaacatttaagtaatcacaagagggaaatgacctggtccaccattagctcggtttgaatgcattatcaggccaactcaggaagttcctcggtgtgtaggccccactctctaaggaaagccacagtttcccctgcctcctccttacttgtgggtgatgttggctaagttaaccaagggcagaacattgattcagtgatttgtcagctctgtcttcctcacttggtgaggaatgcagctaaattaaccataggcatatcattaatttgacaatttgtccccgtcctcacgcctcactcctcactggtgtccaggtgggggaggggggtgaaagtgatgtgtttgctctcagtttcttagcccttctccctgactccagcgcaacctcagtcctccttgcccagttcccattatagaacagaaaagactgcttaaggcccggtttatttacctaataaactggctcttgtattgcctgggaaatgctaaaatttttctgtcaagaaatcctagtaacaagcaaacagaggtccagcagtcaggtctgaagaaacaacaagacgaaggtcagctaatatcgtcattcttctccttcctggtggccatgacagcgccagggtttatttgaagatcccagacttggaatcatggcctgcattgttagctgcccaagcattgtcggctgtgccaacagtttgagatattaatgtattctggagatcagtgaatgaagaattcctctgcactttttcccttttaatttttttcccctttccatccactttgtttgcagtgtctttgtctgccgggcgttgctgggcatttctaatgagagagcaaagaattgtagaaggaaaaaggcaaagggggagggagagagaaaacaggcaagagaaacagggcatgtttagcactttaacagtaaggtgacatttttacaagccagtcaggtgcacgggactcttggaaagctcgaagccacgccggcaatgcaaattccaagcggaaagcacattcggggccacgtctaactcattgattagcagctcgcaaggaaaatgcacttttatttcctaacatcattttccccacaggacgcccagcctgggtgctgctttggtattcaatcctgcttcattattgcagccacctcgcaacccaccctgggcagctgctaaaagggggaaaaattaaagcaattcatactcgcagtgacttactgctgcagaataattggtttctgtttgcaaagaacattatcacagcaaagcccagaaaacagaaaggcctgtctgtgagagggtttctgaggctaggttggaaggcggctgcagggggaaggagggagggatgtgaaaaatcacatttcctagaaggcaattagctaataattaattttttagcatgctcccatcgcggacttgtccttgtgtgatatatagacagggatgccggcttcctgctgcatcctttgattcctcgtggaaatgttaatgagactaaagcagttaaggagctctttagacaacacggtgctgtggggaaggccggaatgaaattcagaccctctgaggacttctctgacacacaagaagtccctttgtttcctgttttataaaccagaggcatgtctaaaattgcggggaaagtgagagggggctgaggcctggcgccggggcctggctttctatatttaaaaagaggaaaaattgttcgctagttatccgtgcctgggtttgataggcagtctagggtgtttttgaagttctgagggaagggtctctgaagatgtaagcgggatctgtctttcacttagacttaattaagaaacttgctggctttgtctgtagggggcccattacgcacaagctgcagccccctctgaataggggctcagcctggaaagtgtatacaagccaggccgcctttgtgttgtgttgccaaactggaggcaggagcaagtgggagcctggctctgccagaggccagcctgttgttcatacatgtgaaccaggtcccaaccaacgctgcagcaagtgtctgcccattccctgggggacctagaactaacgaaccttttaggaaagaaacatcaagaggctgaggggagagagggttggccttattctccggtgtccctttttagtcctggtgatgggccacagagctaaacagtatcagcagccagagctaggagtgtaagccagaggtggccagggcctggtagtggtgcggcagtctcagccacccacccccatcacttgatcctccagcccagggcacaattttgcctggtcactgttcttgtaaccctgagaataatttccccctggtgggctactgtggcctgccctatttagaacaaagttgctgaatgccagagaataaagaacagctgggaggctgtgcgcagtggttaatcagctaattcgcatttcaaaaggctctaataagaggtgataaattcacataaagccctgggtatgagtactttattctggaaagctttctcccttctgtttctttccctacccatctctgccttgtgctttgaagctctccgggacctcccagggtatccccacctctgccctctgccacctccggagctgggagctgcaaaccttcaccttcttggcggtgaccagctgcaggcacccccgcgggcacctccacactccttcagcccagccctggccctgtccacctgggagcccctggcctccccctcctaccttgctgagtttgctggattcaacctatctcctgtctgtccactcacctcctgactgctgcagttgccatttgctttgccagccgtgggaccccagcttaacactgagttctgccctatggcgtgcagtgagaaccccagttccgtgtctgtcttggccttctccccatcccttatgccagctatccaaaaccctatgggctgcgtcttgggctttccatgattgagtctttctatgcttcaggctaatgatactactctgtccctagggtccctcacccagttactagaaaccagccagccagccattgtagaaataaaaataggatgccaaaacccaatgatttgtttgtctgtttgtttgtctcagccagtagtccagttcaactggaaagtgagcttgtctggacttacacacacacacacacacacacacacacacacacacaccaatcacacagtccctgaccatatgtagaccgcggttgctgtagttagttcacacctgtaaatgacaaggcaataattgcccagagcatccttgatccagctggaccggggcagccccacacattcagcactttgggtgctcgtcttttcctgtggttgtcatatgtgtgtaggagtctttcctaagtggtccctgggtttcaaaatcccagaacacctcagtcctgtcatgctgtaggatccatgagggactcagacaccatcttaattacataccgtggaggaatgacatctcatattctgctcatgagtgatgtggaatttccggaacttcacaatttgacaatttgatgacagttagggatatccgtacaagccccaagatggccattgaccccaaagtgtatccccgagagctggccagtctcaaggtttgttacccatgattgagagtctgcctagcacattctccagttattagtgtctctgtttcagtattattcaggtctctgattattcttgaaagatctacaatgctcttcagagagcgtgtggaccagctgtctcccagcggcccttgtgtaacagagatgtacatgaagtcacatcccaacaccagggacacagcctccagtcctacctcagttccagagacccatttgctgttagttggctaaagaattactgagttagtaactgtaatggagcccagcactaagtcagaaaagggtcttagctaccagctatacaaactactgagcagctggacataaaagggggtgtattgaaagggaattgaagctgggtgtggtgactcacaggtatatcctagctgggaggttgagacaggaggattgccccaagtttgcactctgtgatactttgtctcagtgtgtgtggagggaggaggtgttgtgcttttaaaggaggagaaaggatattgagtagcttgaaaaataaatcatggagtggcttggtgttcaggcaagagaaatggagagagctccaaggtggccagagtcctaaccacagccctgccatagagcgctcttactgacgtttgaatgtgagtcttctcccacaggctcatgcttaaacaggctcagtcccagtttatggcactgttcgcaaagctgtgaccctttaggatatagagccttgctagtggagggaatcactgcgtcaagccctgaggttttcgagcctggctcactccctgcgctctcgacttcctgttcctctgaggtggagagtcccaggtgtacttctgtcactatggagccatctgaccccacacctctccctcgtgtggcaggctggagcctctcaaactgtaagcctcctttaagttgtggtttgtcagtgatttcatcatgaccccacgaaaaataacaaattcgtacctcacggtcacatgactaactagcacaactactgctggatggacatcagggtccatgggtagagggattggattgccactgcagagttgacttagttgcacactctacatcatgggtcttggctgtctgccccagctggtggggaagcagggctgggtggacctttggcccctttcttaccaggataagaaactgggctttgactctgagcaactggaaaagctacctgtgtgtctactgtagactggcagcaaccttgggagtcatttgtcatgcaaggacatctccttcccagtcccctctcattgaacatagttctgtctatctaggacccagtgcaaagtaaaaatgcctgtggttcaggaaacattggtagtgtcagtatagcagctccatcttgggatcctccttatggtgggaacctgtgtgctttcagaggtcagcacctatgaggttagtccttgatccaggattgtatgagtccacagttggtatccagtgttatatgcccatactaagcaggctggtgcttcaggattatttcattatgtttcctacttacgaccttgggttagttaaagttatcccagggccagcagataagcagcatagaccaaaaagcactggagctatgattccaacctagcgctctcaactctcaagtccccctgtctttgctcatattacactgtacaccaagaacatagattagagaggtctgtggtgtcccctgcatatatacatagccctctctgggaatctacctccagagatgttaaggatgccgaaagcagatgcgactggaaatggagctttaccatttcaagaactagtcgagggcagcggtggtcatgactggaccactgccatgctccggttccccaattagaagggaagcacacggtacttacattttctgcccagggtctcagttttctcttcattgtttggctacaatattatatctatcgcacatgtcccatgaatgccctgtgccccactgagacttgcacactctcccattacgccagacctctttctgctaccctgactctcagtatcccattcacattggatgcccagcctatagcatccacgaccatctaccaccgactccttttcatcagcggaaggaaggcatcatcaaggcttccactcctgtgttgcaggaaggcgagtgcatcctggaggagcttgctctctgcagtttccacttctcttccttcttcagcacccctgagaaccttcctcagaaagcgctctgtgagccccctctcttattagagcctctgcagaccttgtctgaactccccccccatttcttccttccctccctttgatggaactcaatgtgaaattacagcatatttaggaacatttatcatagttattaagtacagggttatttgatgtgtttttaatgtaaaaatcatagctcttgaagaaagtatagctcttctaaaaaactgtaatgaatttaattgttttttattgctccgtagcctttaattgatttttccccctctaaggtttttaattttttttttcctgttttaagcccagggaaggaggaaatttccaagggttattgttcattagctgttagcaggaataattgatctgtcagctcaaaggatttataagggtttggttcacagaattcaggaaagcagtgccacgtttaaattcctcctcctaaggagacttcagaaggggcttccccacaaagtttttataagataaaaattagcatgcctctggggactagaagccccctggattctccagatcttgctaatcttaaggggctacagtgtttgtgcctacacctatcagggcggatctgtgtatttctgccaccaaaagaatgggggcataactattacaaagattgcgggtttccctgatgtccttcccccacgagaggaacggagcacaacctgtttaacagttcttcagcctcaaatgaggggtttgctgcttttttttttttttaagcaaatgcacccaaattgggtttggttcacaaaggcaaggctgactcagagctaacagacccatcattagccatccctgccctctcaaatggcctgtccagtgcactgctcacaatataagactaaggccgtaaacaagggatccaagagaactctggacaagaggcagacaatggagtgggataaatttctttagcataaatagcagtctccaagggtgactggtgtgaatggctccctgctgtgagggcctctgtgcccacagaggagatctgtggctttaagagctctggtcccaccccctgggctggggaagtgctcagtctcccctgctgggcttggtcctcaggccccctgtgggcctcttctctcctttcaagctgtgagtcctaaggaactcaatgacagctcttctttcattccgctgtgcaaatccttgagctgttcctagtgctttcaaaaggaaaatagaagacattttacttattctgtccagcagggccgtggaagtccggtaagacccagggttattccggcagtgagcctgggggagattttccctgagatgacccatagcccatcacttgtacttctcacatcctttacctcgtgccctttggggacactatcttaggactccactagtgcccggtgctgcttgctcatgtctgcgtcacccaaggataataactatactgaagaaaaaaagacacctcacatagaatatatatcatagccacgagcccagaagtccagattcccaaacggaattttagtctttaaaaatctttgaaaatgggctggtgagatggctcagtgggtaagagcacccgactgctcttccaaaggttcggagttcagatcccagcaaccacatggtggctcacaaccatccgtaacaagatctgactccctcttctggattgtctgaagacagctacagtgtacttacatataataaataaatgaatctttaaaaaaaaaaaaaaaaaaaaatctttgaaaataattaacacctgaatgcagctttgaagggtaggggaagccagccagtccactttcccactcctcctgctttatttatagaggcagggtcttactgtgtagcccttgcctgcctggaatttgctgtgtagataagggtggcctcaactcaaagagattcgcctgcctctgcctccttaatcctgggattaaaggcacatgccaccatactaggtggggggaggggggtacttacaggagagacattctatatgtagatttgaacacagtattaatcaaatgttgctgttgacttggaatttatgaggtaaacacagggcagtcaacagggccacaatctgacgtagcttcctcctttttgcttaacccaatccccagtcactttagtttttgactttctactacatatacacacagagagacacacacaaatacaccccacaaatgtgcatacacacacacaccatgtaataagtgtggtgatctgagaacaacttatggaaattgattctctcctttgatcatgtggctcttgagagtccaggacatcagtcttggcagcaagcaccctaccgctgagccatctcactggcccacagttctctttctagggggcacttgaatattactaccagataacatacaatattcactctagggaccctcctccccgcaaatactcagagctgcaaatctcaagcccctttataaggtggcatagtatttgcataaaccctagtgctttaaatcatttctaaattacttataatgccaatgtagatactgtgtaagcagttgttacattgttttgtctaaagaatgctgacaaggaaaaaagtcctgcagaatatgtttatagtatgtccccaaatatttttagcctttgagccctgcatgttgaacccttagatacatacaagaggctgggctgggctgggctttgattgacagtgctcagcttcttacagtacctgctgattggccagcttagcacacgagtgtttcctctcttgctttagcatcctctcctccttctgtcagtctttttattctgtggctatagtagtatccaaactctgcttccagttgccttggttgtgggcagtgcctgcctttctttctgtcatctctctgccatttgcttctgacagctcttggtgggtttgtgttccattttgtccataatcaagatttttgcactgtgttggtaccagaagttgaaagcttattgaagcagcttccatggtgtgtctatatggatatcatactctgaagagccaagaaatgagccatggttgtatttctgcctgacccatcttaaatctgttctctatccatgaaatcatgtcatatagtaacttgttaaagttacatacatacatacatacatatatatatgtatatatatatatacatatacatatatatatatatatatatatatatatatatatatattggaagaaaaattttgtccccgcccctcccccccaagccctttatgttgcccaacttcaaacccattatttggaagtcagtttatcttaaaaacctgcttgttctcaattgctaacttttcataccaaataattacatattgtatttcccagaactttcagttgcctttgttttatcttgcaatttttctgaattgaagagtttctttgtttttgtcttttcctggagacctgggtcttcacaccttcagttctgttctctcttctgggtgggattatggctaaatactgttttctgcagaatcaagcggtgtgttatcattatattttctgtcttacacagttttgacttctcagatatagagaattcatttgttttgttttttatttatattctaatttatttaatttttgttactgggataaagattatgatcaaaagtaacttccggaggaattatgaaggtcacagatttttttttttttttttttttttttaaagaaaatgcttcacagccatgcctacagaccaatctggcctgggcagttcttcactggggtccctcttcccaggtgaccccaggtgagtccattgtcagctgaagctaattcgacagactcagtgcatttcctgtggattcccacaggaaagagatcccctttgcacacctgctgagtgtgtgcctgagtttgtggtccgctgtctgcagttttcctacaggtgttcccttccaaacctctcttccaatctgaaatgcagcccacccctgctcacctttcagagctatgtggtgtttctagccactgttattctctgtctgtgtgctcattctgtttctctgatcccatatctttttgcagtttttcaaaacctcatttaattgaaatatgttctcaaccttgttttgatttttaaagagggtgtgttagagtggtgaaccttccgaatgcttacatactagaaaaaaaaaccttccatcctcttatcagacattctcctaatatttcttttctgctttagtttaatttgggaagacggagctaggacttcatatatactaagcacgttgtctaccaaggacctatacccccagctataagagatctttttttttagtaaaatcattgttttataggcatagtatttttgtacatatattttcaagatactaattggctgtgggctacagagatggttcagcagctaagagcatttactgatcttgcaaaggacctgggttgggttgccagcaccctaaacacacatatagtacacatacatattaaacactaaataaataaatcccaaagaatactaactagcgattgttgtctggtttacaaggtttcatcctgttgttagaataatttctgtatccctagaactagtcttctctgctcctttgggtttcattccatgccatagactctgctggagtgccgggtatgtctctgggcaagttctgtggaagtagaaaggcttacagagaagttctttagctgaacagatctgggtggcaggtgggccttccatccttggagtcctccccatggaggactgtgccctgggacaatagctgatgcctgtctcagcagctctgaggcccagagccacttgctcagtctcttcagagactgtgcagcactttgtagaagggaaatatgggatgcctggtgttcaacatgtggagtgtagatctgtggagatcttcagtgactcttgatctcagcctcgctcctgctgtccgctgtcttgtgctccaccgacttgtgctcccatcaggctcctctcctgtgctccaggtctcagcttctgccttagtgttagcattcagccgtaccctgttcaccctctggaaatgtgtggagtgctttctcttactgattcctcttgggttttccccatggttacagagctctggagcttccatgccctctttctgtttatcgccccttaaacgtttccagactccatatgacctaatgtctgctctccctgctcatcttataggaagagacaaatgtgcagaaaccctagaccacatcctttgagtttgagattaggaaagaaaccactcgttctctcctgatgcagtctccttatgctcaatagttcacttctgcccccagacatatttggggtttctccacaaatcaggtctctgtttgagaccaattgtgtatcatataatttaatttacttctgatgccattcacctggtatgagagtcacagccccatataaggctttggtccacaagatcacttcatttctgacgctgctatggccccgcatgtctgtgctcttctatgccctctttggccagccacctccagcacttctgagagtcagaacccacagcccaaagctccccaagacttgtcctttggatttttatggaaccttgattgtgtaagcacaattaaagcattgaccatggatgatcaactcaattttcagcttctatttgttcttgaagttgtgggtaggcctgaaagttctgtcctgctaaccaaggtgctcagtgaccctggcaaacatcccagggatgtccaagatgtccagctaccagtcatcataagcatgtaaaagacatcactgtggagattccaggggggtcaggaacaactgccaacagactggatgaagtccaaatagtatatttcctgttattagtcacagagtcaataacacagcacagagcctgcccacatgtcccaaataacatctggacttcagcaacaagcattttctgagtatgttcttcaacaggcattacagagcttatacatctacaaaaggtatattcttagtatcataatctactggaaagctcatatataagaaggcaggcctcaaaacagtgagtttagaggttttgtttgtatgttaaagaaactgcaaagagattggctaaccacttgtcaatccttttctcacaaaaatgacagaaatcaccaaatgggccagtgggagaataatttgttcttcattcttcatcagagttcaagatgctttctggcttctaggaaagacacagaagtcattcagatacgtgtcctgcctcaagcttgggtcaactgagaaattattcaggtatataaatagtttctgcaagacagagatcagatcagtggtgcaaggggatgctgaaggcccatctctatagggctctcctgcttccccatcgcaccccatgtatgctactgtttccagcacctgatctgattggcccctcactactcactccaactcccccagtttccttcctgaactatggaagttagaacactgagagaaaggtccatttctcttgactcttcagtagagttccactggtgacctggtttctagctgtgagcaaagtatgagctgtttttatcccttcccctataagatttacatttagtaagctagagtggacactgtcatctttaggttaaaaaaaaaaaaaccctaagtgatgagtgttttggttttctgattctgtctttcttgcggatttttagcactcattcatggtgaccatttcttcctgttttcctcctgccaatctggacttgcacaatctgagatggacgatctacccaacccaggaggctgtagtttctccatcaccacagctccatccaacctgcattacaacttctggaattattccacttgcagctaaaacctcctcccttgggcctacctgtcatctcactttcccacttcagtcatatctgctcattaactcggggtgactataactgtcagagcagcggggtgtgcctgccttccacatgatcccacccagtgagtgctcacgtcagccccattttgtgagctcccagctctccatccttctgacctacttggttgtctcatgtcttttggaatgcctcccaatgtcctctactggtacaggttgctctccataattaaagaatatactattggctaacatttataaaacaaccaatatgtatagggcactagattaacccagctaacccttgcaacactccagtgagatttggaaggtctacattttagagatgaaaaaaactgaagcacaaacaagctgtcatttacccaaagtcacacagtaagtgctagagctgatattcaaatcatctgtgttttttggttgcttttaattagaattaaaataggcatgccaaaacatttgtgcactaattacatagatattaagactatttccctattaactgaaaattgaattcatatctcattattaatactatattttttagcttcttaaagctatattccattaagatagccaccaaatattttttaagtaaagttgtttttctctctctctcccatattatcctgacttgcatctccatactattgtaaagtatactgcagtattattaactgttaaagaaatagtccaaatagctaaggagtcagattgatagcttttctgcttttccatggattcctcttcttttaaaatataaattcttggtctgggagataggatagggcagagtgctttcctggaaggccccgggctcaagtcccagcaccaccaatcagagcataaattctcatatatctagcaacttacacactcacaaagtagaacaatttgagatgtaatattttcctttgctgtactctgagaccaatgtagaataattttaatacatttcaatgatttacttttattttatgtattttttgtgcattggtgttttacctacatgtgtatctgttggatcccctggaactggaattacagctagctgtgagctgccatgtggttgctgggaattgaactcaggttctctagaaaagcagccagtgctcttaaccatctctccagccctttagaataaagtttagatgttggttttctgtagaagagcccccaactctggtactgagacattgggtgagttccttagccagtctaagctttacccacttatctgcagaccccaccttgtcaaccgaatataaagaagccatgactcaccctgatagctctcttcctattcatctctggaagtcacaccatagcacactctccttccaaaccagatgcatgttctgtacgtaatatagccagccgaaagaattctaatgtcatagcctttactgaagtttcataaagaagtgggggagcaggttacattataaccccaaggcaatttttccaagggaaaaaaaacctaattttttaaagcttcttgttgaggcatgatggcacaaacctctaatcactgctcctaggaatatatggcaggtagattaccaatttgactagtctagtctagtgagcaccatgagatctcatctcagaaagaaacaggttgggtaagggaaggattggagacaagagacacacagagacagagagatattaagaggttgaggtcagtctcccccagtcagaaaaagggatatgtatgtatgtatgtatgtgtatatatatatatgctggagtggtccagggctgagaggggaaggagagagaaaagacagtccagtgcccttgctccagagactgcctcatcctctgtgttggccactctcatcaggcaggaagtgaaccaaccaaccacgccagggaatagtccatggagaagataggcaggactttactcaggcgcaagagtcccaagagtggggacgcactccttggacatccatcagcttggacatcagtcagtgctcatctgtagttactgatgcctaaggagctattgggtccttgggatgcccggtgatgctggcgtggctgttcacagtctagcagacagttagacagtcggctttggcgctaacaaacagccttcaccatgacatcatgatgcgctctgcttgtcagaattcctgttttgttggtggaggttgtgtgttgttttgcttatttttccttcttgctagaggatgtgggtttatttctgactccaattcatggttgcatatctgcatatctggatattattttaaaagataatttcaggctgcttatcaagttaactctattaattgtcaatttgagaaaagctttttttttttttttttttaaagacagagtctcactatgtagctctggttggcctagaattctctgtgtagcccaagctgacctcagactgagaggtcagcctgcctctgcccaaagagtgctgagattaaaggtgtggaagacatattttggtgtagttgaagtttcagatgtgaaattgttgctgttggaatttatgaaacaaatgcaaagaagaccacattctagtggttactattttcctatttcagaaaaaatttagaaatttacaggtctggtagctgatccctgtcctttaatctgccctcatagatgatgactctcacccaataaatgaaagaattccctgtttggaaagttaaatgaaaatcagccgagcgggcgtgcttgctagtcttaaagaaggtgctccattgtagatcagccgggtctggcagtgaatgtgtgcactatcagagtccggggacttagggggatggatttcccagggtttaatcatttcataaggcctctgagtgtgactttttccccaataatctacttatctcagtaatttacccctcctactgcattgcgaggaaaatgagtctcccaggttgtttgcatgataagtagctggggattgtatgagcctccaagaagccctgagtccattgtagcagtctgagctaatggtctcccatgggagctggcaggttaagtgcaggagggggctggagaacaccctttatcacaagtaccacacatttgaaaagctgaaatctgaaagatgcttgctccgtgcaggatattttccctgccacagaaagggtgagaaaagcgaccttcttgatgggcctttcagtccagtacatagctgggggtgttgtggaaatgttcaggaggcttttgtttgtgtgtttccagtgcatcgagctactgtgctacttttctccccagttaactcagaacttaaagaattaactgcttgtttcagacagctgcaagaatcacttctggggaaaaattacataggtcataatttttttctctgcttcgttctttctaattccttttacacatgcccttggagattttcatctgacagtgtatcagccaacagagttgttgttctttaagatttatttttatttttagctgcatgtgtgtgtatgttgtgtccatttgagtatgtgcacgtggatgcagttatccaaggaagccagaagagggcatcagatcccctgaagctggagttataggtgctgtaagccccctgacatcaatggtggcaactgtacgtgggtcctctgcaaaagcagcaagcactcttaaccatctctccagcccctccagcccctccagcccctccagcccctccagcccctctgttttcattttcattgggactgaacacagtgtttcacacttgtaatcccagtaccccggaggctgagacaagaagttcacctcaagttcaaggcccgcctgcactatagaatgagttcaaagacagcctggactacagaatgagactctgatatatccataccagcacgcacacatgcgcacttgcgtgtgcaggcatataattcattctctctctcctgtgtgtgtgaaattatgaggccttgtgttataagaatgagaaaaggatgaaaaaacttggagtggtttctctaaagactgagaagagtaagcaactccaggtttcagcagcaaacaggaggtgtaacgtacacatccacatatagaactgggatttacagaggtattagcaggaaagagggaatccataaaggacattgggacatgtaggtctgaaaaggtttgacttccctcctgcccagatacaactgccactctaataacacacagtttatcaaaagaaaagcataacaattgtgtttaatcaaaattcagtgtgaccaaggaggaaatgcaggcaggcttgggtatcagcgccatcctattctccccatgtagcattccctctgcccagagatgaggtaggactctctggaataaggatcttaaggggttccagagggttcatgcctggtttgcaggcacaagagttctagttccatggcttgcttcaaggagcacaaggggtcagaggcaggaagatgggagaagaccagaaaggccttccaatctccagtccaagtacacagcagatcaaagtgctgtacttaggggtatcatgttctgagctccagcaggcaccaagggttcagcaatagtggaaaacagacccattgccttcttctcgagccctaaggacgcgaagtcagggtcaccagagcgcactaaaagtacaaagcagagacatgacagcaagaagagtcagtggtaaaggagcacgtagcctttgctagaactcctgcaggggttcgttcagttagaagcagtatcctgaccgaaggcaagacaacagcacagccaaaaggttagaatagcaggagggccaccgtcatgtgaggctctagtgacatgcggctgtgtggcttcagcactgtatgaacttcatcagcgctcaccatagacattagtgtgtatgtggctctgtgtagatgaagtccctagaagtgaacacttgggtgtgtgttgcgagattgccctctctgggctcacattgtctgtggcccatctgcatgatatgagatggattctccacagctggccaagaatatggtgctcattctttgaaatctcgccaacgagatagatgaagattattttcttgttttaggttaatcacatgatatttaaatttatataggtcaaaaatggtaagaaatatataattttatgtgactcaatagtgtttttgtattaaaataaaagacctttagaaaaacaaaattgcaaaacaaaaacaaaatccccaaatcaaaacaaaacaaaaaacccaggcagactctcgccatgcccccagctcttggcgtgccccaggcagacctgggatgcagtcttcctttgcagcctctcagtgccggactgtaggctgcactaccccgtctaaaactgcctttctgctttaagtagcttctctgaagtgaaacatctaagtgggaaggaaaggtctcttctctgtggaattatttatttttctgtttttgttgttgttaaagctgaatatattaagttgaatttgcacatagtatgagtaatcacttttaggtgaccaaggaaactgaacgtttccgcttctcggagtacatcctaacacatccttgtacctagtgccacctcctccccttcccccacttccagcccccaaaaccgtgcatctagtctctggccttgtgattttactaccctgtgacacccttcccagcctactgtttcctgggcttgcttccccaccgtactctcggcattcttcaccaagttgtcaaaggtgggtcctgggcccctgcatttcaggaagttgagaggtgcactcagcctgtgccggctggtatgttcacccccacggcatctgcatctttccattcttgagaatctagctacttgcgctcctgactgggaaatttattctctttctctatacttagaacacattctctcactcagatgctgcccgaaaggtcatgattcacaggtgaaggaaagtcctctccaacctagctccctgtggtcctgtgacttctgaactaaacacaggctgtttgtacttgtgcctccattgttttttcacatgagatttcttggcccatggagatggctcagcaggtgacccttgggacccacgtaatggaaagagagaaccgactcctataagttgtctgccccaataaattaatgtcattagaaaaaaataaataaatgtgaaatgttccagacttctctatagcgtgccggtaggtacccacagccagcctgtttctgtggagtagcctagccttttctctctgctgcctacgcggataaggtcgtctacagtttagcagtagcagtcgatgtagaaggggcctgcccgagcctcttcttctggcttcccaggaggctttcgggaaggctgtgagcctcctggtctctttggctacttttggagggacggtagtggtttgttttcccagtccagccaggctatggttccctggcttttcctgctacctctgctcacaaatgttccaggtcccgggtgaatgcgcctctccctggatgacttgctggaggctgacaaactcccctgtatgctgactttgaagaccgacacacctctaaatgagttataattgtctctaagtgagttgtaattatttttacacttatctttgcatttattttgtgtgtgcacatgtcgtgcaatgcatgtggaagtcagagaataatctctaggaatccgttcttcccttgcagcacgaggtcccaggcgtgggacaccaggtcaccaggcttgctgtcagtacctttactcattgagccacctcacaggccccaatcttgttttatttttttagtaatgaggattgaacaaaaggaaatcccagttgctaggcaagcactccaacattgaggccccccacccccaatcttctcccattccctatgacagtttgtttgtttgttttttttaatagaaaactctttgttaagtaatctcctagcaccagattttcaggatcaagttaggtagctaagaataaactccttaaagcagccatataaattcaaacatctcaacagatgccattgaagcacagaaagtacccttgccagctctattaatgagggccaagtggtgcagaggaccagcagggaggtagaaggtgctgccgctgaagaccgagcccaccactccctgtttttgttgtttggagattgctgtcagagcaaatgagactttacaacaaagcaaatgtaaatgttactgtccgcagtctgggaggctcttcaaggaggatgacctttaagcacagttatgaattcaaaccatgcaaggaacagaaaaacagaagccaccaagactgtggtagatgacctgagggctccattgaaagggtcagatgagaccgacttcaggagcagaggagggggctttttcacatatacaaagctatatgcaagacctaaaaagatattaaatgaattctgttacataccattaagaaaaatagtgctgtgttaaaaataaaggaggtgagcttaaaacaaagcgagccaggggtgggggcagggcagcaggatggctcagcatatgctcttttgcatgtgtgagtctatcctcaggacagccaagacatgggcagggagtactgtttgtagctctgttgtaattgagcaaatgctcactcaagatgacgctctagaagatgatgaatttccaaagtagtttaatgagtcgctataaaacagtaactgagaactgaaaggcgcagacaaagaatggtcccccaacaatgtgctgctgagcagtttttttttttttttttttttttttttttaaagattttatttatttatttattatatgtaagtacactgtagctgtcttcagacactccagaagagggcgtcagatctcgtcacggatggttgtgagccaccatgtggttgctgggatttgaacttccgaccttcggaagagcagtcgggtgctcttacccactgagccatctcaccagccctgctgagcagttttataggtaatttttagactttccaggaaaaaatactttccatactgtataaaatgtttcagaacacagaaagcaagcttctcgttttacttcatgaagctaaaataaccctgatatcaaaacccaaccaaggtaacataaacacccaaagccataggccagactcaccacgaactttattatcctcccaagaaaaatcctatatcaagtatgagcaaattgaatccagtttcctattaaaagaataaagcacagtgcccagagccaaattaattttaagaatgaaaaaaaagttagcatttggaaatgtattagcataattcagtccattaataaggggataaaagccctgtgatcgccttaatgggtgctcagaggcatttaacagagcgcagtgtctgcgcaagaaaaaagaaaagttctttagaaactagaaattaaagggcattaattatcatactaaataataattatcacaaactaaatgcttccactttgtttaatgatgaaaaattagaagattagatcatggacaaagtttggactgtcccctgtcatcactaatacatatcattaacttggcaagccaagtttctcccatatgcagaatattaaataatagaaaaaaagagaccaaaatggttattagtagatatttgccttgctggaaatgtcaagggaaacaactgaaaaaggaaaaaggcaggctggccttttgcctgatgtaaagtaaattcgtggaaattatgttcttatacagcatccataactgcttggaaagagtgtcaccaagagtgggtcacattaatgataaccataaaacctcaagaagtagtttccctgtgacagaaacccagacatacctatggttcatagattggctcatactaactgaagcaaaatatagggagtagctatcatcagcataaatagggagagaatgggtcgggttcagggcatgaatgtaagcaccagtgctagaggatccagctgctgagagaatgcacggaggcagggggacatgtgggagtgccatgcattgctgcggtaatcctctgtgtgtgtgtgtgtgtgtgtgtgtgtgtgtgtgtgttgtgtgttcttatgacttgtttctaattcccacaaagacacagtcatgtgggatagtgagggtttttctgccccagctgggatcttgtgtctgactctggaataagtgagatgttctgctgtgtttggcttcacccatggccagatttaataaggcagcttggttggggtgacagttactaggcagaaaaatgaattttctaaacagatatttgagtgatgtagggctttccatgcatacagtgttcccagataagctggctcaaactgtagtgtcctggttggtctttttgtcaatgggacacacactagcgtcatttgagaagaggacacctcaactgagagaatgccctcatcaggttggtggggcatttttctagtcaaagattgatgtgggagagcccagctcaccatgagcagtgccaccctgggtgctcctgagatataaaacagcaggccgagcaatctagtaagcagcattccccggtgacccgtccttcagttcctgccatcacattcctgccctgactaatgatggagttgtaagatgaagtaaactctttcctccccaagctgcttctggtcaaggtgttttatcacaatagaaacacaaccaagacatgtagagagagttttccttctcattcaggagggcagttgaggactattcggcaccacggttcccaaggtcatctggaagactcatggaatgagactatctcagaaaactgcccagcaatcaggaaccgttgtatttgtatattttatctcggagtgattttatcatttatcccaggcttaaattgtgggttcttttttctctccaatctcagatcttaatgtttcagacttctctcactgagttattgtttttagaacccagagaacttcctgaatgagatgttcagagatctagtgtctgacccctccatcgctcatagtatctgagcactcactgcatacaagagtgcatgaggtttccacaggcatagaagacaacccagcctcccccagtgcttattatattggctttccaccaaaaggtgggtgttaaacattgtaagcttgtcattctttcctagaattgagggattaaggtttccaaagtgaaaagagcagaaagaaagtgtagaaaagatctgtctgatctgcagttagaagcatactgaaggatgaggaggtgaatagcttccaccaactgtagctcattttcagaggatgacttgggctttcagtgtgtgggtatttatggagtagtagagaatgctgagtctatgcaacagttttgaatggcagagatgacttgggcacagggtgtctgctatagacactaaagaggaatctgcagcgagacaggagctgtcagttgaaaggagaaaaagattctcccaggaagaaaaggtagtattcctgattttattttttgtttgcaaatgatacattcttgggaaaatcattgtgtgcttgtaacggaacgagagtgtgggaggcagggcagtgactttgaagtatgtgtgacatcgaaattctttggcatttaaaacagttggggttttttcttcaatgtggaaatttctaaaagaaaaaaaaataggtgagagaaaagtgtatcttgtatgttctgtgtttactccatgcatggctttagagactccgacagttgctcaaagccaccttcttcatctgcaggagcagggaaagttggttgatagaggcaaacccaaagtgaacatagccaagtttacattgcactcagagtggagggggtggtatctagggttagagtaattctgctccattgaccagagccaagaactagtgtgaccagccttaaatgaaggaagaaaaaggcaacagagttaggcaccttcccttcctcccacacaggggggattctctctatagattgctttacagatgcggtagactcatcattccagatagggaatgtttagaattcctcccgaccacatttacaccagttacagttggaactcgtgtgtgtggaaaaccatggtaagataaggctgtaagagaagtggccatggtacctgtgcacactggagagggagggtcctcatcaccagtgccttgtgaggacagaagcatatgtgaacccaagatggcctcagactgtgatcctgcccccagggcaaaggaaaaagaccttcttcaaggaaaggagaatgaatgctaggggtggggatgggagcactgcacaggataccattatgagaagagccaggtggtaaagttagcacgtccggctaatcggtcatggaccgtaaatctcaagcatccgtccttccagccacatctgccctcagagcttagagggacctggaccttcagaggagtgtctacagggctgcatgcgctccaggtctctaaagtttatctgcttaaagatacttgaaagaagttgaggcaagagtggctggcaggaggaagtggctggaagggcactccagaaaatcctgggctcatttttttgcactgctaggaactctctcctgtgccaaatgccaggcctctgggtaagaagtgcacaggtgagaaagctttgtctcctccactttaccggcctgcacttgcacttgtttggacaggaactaaggacaaggataacctggactcaaatagtaaggcacctgtggacgggcacactggcctaggctgggcagagccatggaagcagaaagagcttctttgtattgtcaggttagcatcacctaagcgactgccccatctggcctttttaaccacacagaggtagctttgttccacctctctctctgtctctctctcctctctctctctctctctctctctctcacacacacacacacacacacacacacatacacacacacacacacacactttttttttttttttttgaggccaactcttgctatgtagctctagctggactgggactctctgtatagatcaggctggccttgcctaaatacatggattacaagtaatatgctgtcatgcccagcctcagcttttttaataaagtgcctctaactctgtccctagctagcaggtaaactgtattgagtgcatgctggtgcccagtcctatagctgtggcctctactcagcttgtatgggcagttacaatcctgaacttgaaaatattcacgtgcattctctcaaaaatatgtctcaccctcgccctctcctgccctgtctctctccttcagtctgctgcctcctgtaggtttctattgttaagcttacttggcatttgaagtagatgaagagtcattccattaagcagaaatcagatttccatgttctgttctcagggtgaatttccatagccatgtaactgtgttaggagcagtattcactttctgttggtaaaagttggtgcatacactaccaggctctatgcataaagacagaaagtacgaatatggctcagagttgcagtcaggtgaggttagtataaggcactgtcaatcatggaggtgcagtgagtgttgggcaccttgctgcaggcttcaggaaggaccatttgaggcccagaaaactaagttatcttctttcatggagtacaaaggtcaaccgagcagacagacctggtctttaaattatgtcaggaaaatgttatgggttcccagatgacctcttcctctatagagtcatgtaccaaatggtcatggtacgtgagggaagcatcataggagaggtggctgaaggactagagggagactgtgtgtctcctggataccacaggaaggcagcactcatgaactcccagcggctgcacttgccagcaaacaaacaaacaaacaaaatattgcacaggatcaagcaggtcaacattctagtgcagacaaatcttagaggagttaggaggaagaatgggggatgaagataataaaaatacaatatgatatttttaaaaataaaaaacaagtcgatggataaaggccagatattagtctgtttgagtgcctataaaacgccagagagagtggcttagaaacaatagaaatgggggctggcatcctaactccaccagagtatggacttagcacacccatggccctgagcttagcctcggcatcaaaccaaaccaaactcagttgtcttctcctacagattcagaaactggaactccaagcccaggatgccagcagggttggtttctggtgaggttctctctccttgagttgcacatggatgtcttcttgctatgttcctagaacatctcctttctatgttccaaagaaagagtctcttcttacaaagacacctgtcctgttgcattagtgccccaacctatgacttcattaacctttccctccctaagcacccttgtctttaaatacagctccacaggcagcactccattgtgtgcatgttggtagagctatgtgcataggtgcccttcctcctgaatcctcaccactgagtttaccctattcccgactcagagtttccagtcggccttctgatgcctgttctaacgtgtatgaggctgctaatgaccttaaagcacttggcttcagatgctgtagtgccaactaaggtggtcgtgatggaaaagattcttccttccattgcgggggtcttctcttcctgtgattctgctctgtttcaaggcctcctgagctggtaggtccagcatagaattctacacgcagtcacgcaagcatgcacgcatacatgggctcagaaggaggcatttctccgttatccagtgtaccctaggcttttcagcccagcactcctgagtgatagcaccctgccctgggaaccaaaatagcagaatgtggtactggaggaggtatcagaagacccaaccccaagtccacttatgggcccagacatgtaatattcatcatttactttatctgcaagatggaaaacaaatatggttgtgactgcaaattacaacctgctaaaaaggctaaacatgtcactgtgggtaccccgaagcacagagtaaataccgcatgtggagacagtctgcagacggttcagttataataataaagtacacactgcatgtgaaggtggtctacagaaggtccagttatgatgcatctttattccagtgtttttattagatcaccggaccatcttgcatcccctcccccccgtcttgtacatatgtacctgaaggaccttaatcaggtcccggagaattcttcagaagtgtctcatgaaactaagccattctttccccatactctcactataataatttttttagaaagaaagaaaagcataatctgtagcattctagaccttccctgagccttcccaaacagtggaggtgcaaatggctcgggaagggcttgttggtggcttacagtttgaggggatacagtgcagtgtggccgggaaggcccaggcacctgagcgtgaagcccctgttcacatttcatctgcactcaggaagcagagagacaaatgcgggatcactggcttcctcccctatacacagaccccctttcattgagtcttggatcctagcccgtgggataatggctgcccactttcagggtgggcttatctcttgtcagttaaacctctctggaagcacttgcacagatacccccgaaggtgattccaaatcctgtcactctgacaatgaaaatgaagccttgtaagtccacctcttgtcaacctgacattcaaacacatcaacttcatgcaatgactttctatccttggctctcaaaggctcatggacatctcaggatgtaaaatggatttaagataatccgtaagagtctccagagttttaaaaggcccacaccatcaaaaaactctccctaaaatatccagcctttcttgtgagatccaagacactttcctgacttagcccctgtaaaacaacaaacaaatgacatattttcagcatacagtggagtatttacccattccaaaagggaggaatgaaggcatggcaaagaaagatcataccagagcaagaccagaaccacagagggaaaccactagaccttgcagttctttgtatctggggcatctgaggcatgtagtgtcatcatctgggttccaacagatgcgtacagcctcccctttccaattctgccccctgcaatccatgctgcctctctcttgggcctgttctgctccatgcctggcatctctaacatgccaggctccccgcctcaccttcacagcttcatgcagtgaccttgcagggcttgcagggagtctcacagttctgccatctattgcctggcttcagtgactttctaaaacattgtgcaaacatccatgaccctataactcacatgcctgcaaaaccaacactttgtggtcgacattgccaagttctgttgccagcttgaaacattctctggcccctttctgccgcgcctctcatggcctctgtgcacttgggctgctgaacctggccagttgttttcagcaagggacctgccagcgtagctttcaggttgaattttcacaaagtagacctttcactcggtagaatctttagggcaccaggcttctttaacagaactaagttatcttttaaatgatttttaaagttaattttgtttgtatgcatatgcttatgggcacaggcatatatgtgggaggtccaagggcaactttcaagggtcacttctcagctttcaccatgctcaaggaagggctccctgttcctgtcactgtgctgcatacttcaggcatagtatgcctgtgcgtgcgtgggctttctgccagttcttctgtccctgcctcctacctgtcataggagtgaggggtggaaggtgcctgccagtgtaacgtgggttccagggcttgcactcaggccatcaggctggtcagacaggcacttnnnnnnnnnnnnnnnnnnnnnnnnnnnnnnnnnnnnnnnnnnnnnnnnnnnnnnnnnnnnnnnnnnnnnnnnnnnnnnnnnnnnnnnnnnnnnnnnnnnnnnnnnnnnnnnnnnnnnnnnnnnnnnnnnnnnnnnnnnnnnnnnnnnnnnnnnnnnnnnnnnnnnnnnnnnnnnnnnnnnnnnnnnnnnnnnnnnnnnnnnnnnnnnnnnnnnnnnnnnnnnnnnnnnnnnnnnnnnnnnnnnnnnnnnnnnnnnnnnnnnnnnnnnnnnnnnnnnnnnnnnnnnnataacacaccacagctcagatgttagttacactgtcttgacatttcctccaccaaacaatttagtcgtttacttttgaattcagtgttactcagatttttagcacacagccagattctttgccagaatgaagtatgaacggcccgagtccctctgggctctgaaacctcatgggctctgctgtgtgcatttctctcagcattttggccttccagtctcccaccagaacagccatcaagctctgctgatgacaacattctcgggcttctctagccgcagctccaaacccacacacaggttttcacataaacctactgtaaaagcctaggagacatggggcagctttatcacaaggacagcccacttctggatcccgattcggcactagttacctttctcactgccacaacacaacggctaagaaaagcaaggaccaaggaaggggttcttttagttctggtttgtggggatagggctgagcgtggcagggaaggcgtgtctactggaggaggaggaggccactggtcatgtggcatctgcagtcagggagcagagagatggatgctgctgctcaagttcatcctttttatgcagcctgggaccctagcccatgggatggcgcattcacatttagggtaagcctattttctgtcaaatctggtaacaccctcatagcaacatagagttatgtctcgttgttaatgcaaatgcaatcaagttgacaatgaagattgactgtcacacaagccaatctcataatttagtaaattgagtttaaatttgcttaaccaagcactcttccaacgaaagcctttatatacactctaccttctctctcggctacatgaattcatctttgcaagtgacctccaatgaatctgctttctggccagatgtgagtctgtggatttggagaaagcgaattgacaggtcgtgacatcggtgtagctgtttctgacagttaggacacagaaactaagcaataagttctaaaactagcccaagggtagtcagggaggggaaagtctgtcatttctagactaggttagaggtagttgagaaagatgattctacaaggactggagagccagcgctaagagctggattgtggaaggggtccgtgctcaagtgcagaaggggctttctcacttggaggtgagaacaggaaccatgttggaggcctcaaaataaagccaggagctagggaagtgcatgactgtgctcccttattttgactgctagaaacccacctttgtaaagtctttttctgttatggaaaagtcaagtttaataaacagattgtaatttcatcccatgatccatctcagcaaagcattctaagtgtataaacccaggcccagttgattctgtgtgcctgttgctttctcttccaccacagcctccaggggtggcatcctcaaagctgcaggagtagctctccacaaccagcaaatgctgaagctgcagtggctggccccgggaaggttcgcatcactctctttaacgtgccttagagagttcctgcattctgtggcccttctttgactgaataaagggtttacaaaatggggagagacagctgccatccacttgcgggccagttctggacctcctggattcactgcctctgcactcagcttggaggccttattcctgaattctagttctgttctgtttagttggcactaccacatccaacacccagaaacacacagacacatgagaaaaacaccactgcttcccctcagttcaactaaggcaaggctggagggattcaaaacgtactgttccttggaaacagcagcaaaatatacacaaaagcataaataaatggataagttcattgaggttagcctgcagaactagacttagcaatgaagactgggcagcagggcttgcagggccagccaaagcctacattcccccacctcagtctctcagaatcctgtaaagacagaattcttactcaaagacagcccaacttttagcccaagatagatttgatttataattgtaacctatgtattacaaagaagactcgagggagcgtataataaaagacgtgtgtatacatataaaatctcaaagctgtgagagacagacagaagatatttaaatgtgggcgagaacataaatagaatggatcaaatcctttagctggtgtcgtcttggagaattaactctagtgccaagaatagagacctgggaaaccagggcaaaagagcaaaatatgacttacacacagcgatagtatctgataggagagcggggggcagggggcatagcaagctttttcaggaaaggtgagcggtttttttttttttttattgaatatttagcaaagtgagtgaagcatgtatgtaattgtttgaggactgtacagaatgcacaggaattcttcccggtttggttagtggccatatttgctggagttgaccctagttgcttattattatcattattattattacagtgtcacatgtagctcaggctgaccttatatttacatgtgtggccctgaactttccatcctcctgcactgacttcccgagtgttggggtataggtgtgtgtcactatccgaggtctacgagcctactttagatttaacgggatcctcatcccttcccactgttagtttttatgtgccttagagctgtgccaaattcatttctttgaagctggccataaagctaggagcctgctccctgactccaatagaggaccgtcctaatcaccggaggacactgagcaggagcgtgtcccagggaacagcatgtcacagcctagttagaacactcttgattggttagttttgtctgccattcccagtttcccagatttgtggagattttcatggacaggcattgtgatcatttgaatgagaaatgtctgccttaggcctcaggcatttaagcatgtggtcttggttcatgtgctgttttatggaggtttaggaggtgaagccctgatggaggaagtgtgccactgaaggcagcctctgagtagtatagccttgccccgcttcctgatagtgccaccatgcctgcctgaccctctagaacctacaccaaggtaagctccctcttccttaagttacctttggtcatggcgcttatcatggcagccgaggagtaactagacaagtacatattaggtactttggaggaaacaaaactgtgtgttcataatgtgacccatatgtccactaatcagaaatatgtacaacagagccatgttgagctggaggaaattgtcctaaaccagccaaacagtgggtttggcccttaaaggggttgtaacatacagcagactcactgtaacctagcttgataagcaagcaggttgagcctaacccagatgtgctcctgtagctaagcaactggatttacccaatcccaggagttgagcccagcctttcagatcatgcccaaataaggtaaaagcccagccacacggagccagtaatctttgtatatctttgtatgtcatttcctgtgtttctggttataaaccattggcagggcgggagcattcagcgtcgtctttagtctagagtactctccagttctagaacctttctcttgctcaagttaactaagcttaactaacttagttaactaagttaactaagctgagttagtctcagatttttcttaacagacttccttacttttctttctatacatagtagtagtttgtagtttgagatctacccctaataagaagtggaagtcattttgattgcctctgagagagttgtagtatgataaagttactgttaagttattgagggtttttgttattgttgttgttggcatattttttattttatttttatttttgctcacatgtgaaattcagagtgcatagggtagttggttctttagactgtattatttaacctaaccttcagtttttaacccaaccatcgtcctgtccctgggccttccctggggacttgtgtcctagtcccaaaccttaccctcagtcagttactgaggtctcggtgtctcccatgggtcactgactacgcctccttttactcttggtttttccacagttcattgctgtatctggtttgttatacttttcgttctgtttccgtttgtggattatgctatttctcctcctcacctgtaggttgggtttgaggaagagacaaggtaactgtaggtagaggtaggcaggctgccacgtgtgagaacatcaccatatgacatccgttcccctccccactataacccaatggatagataatgttattgtgctatcccagataagaatggaggctcagggaggcgaagcctgtccccatgtcacatgactgaggagtggaagagcagcagtttgagcctcagcctctttctaagttagattctccaggacttccttcttgccatgccagacactggtgatcatgaatacagaaataccacacaccgccccaaggggcctcatcattcgggtaacagggccttttcttcttgtctttgttccctgaagcaatcctttcttatttcatttaaagactccccctctacagctgctgtgggcagcttagtgttgtctgaagtctgaagatgagaacgggagccacgagcttacaagttaccaaatctggaagatgtgttggggtgaaacactcttgccaacctcctgcctcctaaatctttttgtgagcacgttttcttacccaaatgacaaagaactgcttgtactgcgcatgcctaaaactcatgggtctgatgcattaaagatggcgttcttgtctgactgcccatcccaccagagcagacaggataggcttccaaagccaaaatagctatgtgctgtgcagtggtgtttagaagtaggggatcatgggggaagaacaaaaagtgttctccctctcttttggagaagatgcctgtgctaaccgtttaacagctttgtttttgcactgcatatgtaagttgcaaatgtgagccacatgggcaggggttcctgatcaagtcagccaagggccaaggtgctttgagagttcaactgtttgggtgaagcctacactgacatcacggggaagaatccaagtgcaaattttcatccccgtttatgaccttgccacatgcatatgtatatgtgtgtctatgtgtgtgtgtgtgtgtgtgtttgtgtgtgtgtgtgtgtgtgtgtgtgtacatacatacatgagtcctcaccagtgtggtttttcctcttggaggtccatacagtccttggcaagtgtgatgtgcttagtgtgaacgcttccagaagtctatgacagcttttcagaagtatttaaattcgtcactttggaaggggaaaaaaaaggaaggtattgtttgtctttaaagtgtttgttttcctaagcacaagcgccttagcaactgtgtgtgaagacaggtttatttcagtagaatttctcacaaacagtatattcatttacgaccagcagtagaccggtgcatgcaatggtatcatatgcagtttgcttaactaaggtaactatgatcgctgcatagccactctgagtctgcctgccctggtgcctgtgtgggtaccttgttcctggcaatgcactagactggccataactgaggttccagagaaatggctgctttacctcagctcagaacctactacatcaaaaagacagtgtgctggccagggacatggggtctattgaattgccttagatatttctccctttttaaaatcaggacttcagatctctctgttgctttccctgtgttctctgcagtttatatttaacacatgcaaaatggaatttagtggtttatcagcaccaaacagcatgtttcgggaaacttctaagtactgctaagatctttgtttaaaatgcagattcctggcttgtacctgattctccagcctcgtagcctggggatgcttttccttgctccccaggctccaccctaactcatgactagtaggcatgcgtatgtcctagttggggttactgttgctacagtgaagcaacttggggaaaaagtgtttatttggcttctacttccacactgtggtccatcactgaagaaagtcaggacaggaactcaaacagagcaggaaactggaggcaggaactgatgtggaggccatggagggtcctgcttactggcttgctcatgacggcttgctcagcctgcttatttataggatccaagaccaccagcccaggcatgggtcccacccacaatgggctgggcccttccccatcaatcactaattaataaaatactctacagctggatcttaaggagacattttctcaattgaggttttctcctttagataagtcttgcttgtatcaagttgacataaaactagtcaacacccggtattatccaggtagtctaaaactttccctgatgataaagcacatggtgttcctgctaaaaattcctgggccgcatcctggaccaacgaagaggatgctctaagccaggggcctgggaagctggtgaacagaacctagaaaatgcaagattctaaggccaaacccactgctggaaaccaagcctaacccataaccatgaaagacggagttgctaattaaagggggtggggcgaggctgagaaggctgactttttatgtcctacaaagtcaaatgagaaatagtttgatgttctttttccctgcttacctgcacctctccagctctcaaagcttcctcattctggtatgttaaagtgtaggtctggagccagccattattcttttgatgagaagattcttcatttattttctcctcgacaactattgcagagagtcgttttctagctggatgtgatggcacatgccatctcagctcagggatgcagaggtggatcatctctgtgagtttgagactagacagtgacttccaggccagccatggccacatagtggggccatgtctgaaaaatcacaacaaagtacttctcagcagctgggagtgcaaacagtcaggcttcagcctcgcacgggtcaggtccggggttcgatgcccaacccggctttttaaacacatatttttcatctgtctgggctgtttaaattcaagaatagctttatatgcttttaaagaaagaattccttaaacaactgtcatctcagatgtcctctgatgcttcctacttcatatatatactacatctatatgtaaactacaaacttctgaggccaaatgtatgcattgttcatctgcccctccccagaggccgcccagcgcctggcctatgaaactgctgttgctgtgtgcatcaggagggaagtgttttcatctggcctctgggtctgttttctttaactacggttatcagaattgagcttgaccttattgtctgtttgtactggtaagcttttcactacatggttgagtattggtttattaattaagatttattagggcaaaatgttggtttttataaaaagcataaacttgagagacaacccctatgattgtgacccctaaaaagagctgtccaagtctcctcaccctactgaggaaataccactgcacaaatgggtcgctgttagttgatggaaaaattacattaactggaatccccggttccctgaacatgccagttaactggggtattagtgtcctgcctaaactctcagagctattaaattaaacggtcatgacacgaaaccccagaaaagtcttattgttgtctcaaaagattgtgtacaggtgttgctcgtctgcgttagaataaagaaggcttcagtattctcaaaaatcatttcctctcccgaggaagtacactgcagtaaaatagcctttcccggtactatagctggtagctcctagctgcagagaaaactctcaagtactatctggctgtggtctccaccagacttttctgaagagattgtgataaatttgtgtttaggtaacaaaataattctctttttgggtttttttggttttttggttttgttttgttttgtttggtttggtttggtttggtttggttttgttttttgtttattttcgagacagtttctctgtgtagccctggctgtcctggaactcactttgtagacaaggctgaccttgaactcagaaatccacctgcctctgtctcccaagtgctgggattaaaggcgtgcgccaccaccgcccggctacaaaataattcttaaggaaaaaaaaaaaaaggactatgctccatagatacccaaagcatcagaaacagtcattcttttttttttttttaagaattatctatttattatatatatatgagtacactgttgctgtcttcaggcacaccagaagagggcatctgatcaaactacaggtggttgtgagccaccatgtggttgctgggaattgaactcaggacctctggaagagcagtcagtgctcttaactgctgagccgtctccccagtctagaaacagtcattcttaaactcacttttttttttaaagatttatttattgattgtatgtaagtacacactgtagctgtcttcagacacaccagaagagggcgtcagatctcgttacggatggttgtgagccaccatgtggttgctgggatttgaactccggacctttggaagaacagtcgggtgttcttacccactaagccatctcaccagccccttaaactcacttttatcctaagcctaggaaaacaatgtttgcatccactgcggagctacacagtccaggttgtcaccgggaacatttgtcctgagtttctgttttaatctagtgacatgagaactctgacaagtctactttaaataaagaagatggtagaatactcatagacagaaaagactcggttgagaaaagtgatttctttctgtacatcagggcagagtgctgagatggaccccaggtccagtgcattctggatgtgtgaattctgccccttgtccaagaaaaagcagtttctaattatctcataacatgtgatatttcttgatgtcacaaggtttggacacttctgtgaatggtactgagagctttgtatggtggattcctttggcctctagtaagctgggatcacctttgccctgggtctatagctgtgagtagtccattttttcttcttgaggacacctgttgggcttcctggaatctgtcatcccaaagcccactgtctagcttctgcctcagctgcgtaactccctttatcttactacatcgtgctccgcctgtactggtagagtcttgagtgtctggaggatagatacacaaagttcttcagttgggtaaaggaagagaagaaccaagatttatctccataatcctattctcacgtgtgttcaggttgcaaggtgatatgatagttacaagtgacgaatgcaacggggcctggggccatgttagctctctgcctcttgacaaaactcactgagaaaattgatttggatgcaaaaaggatttgctgtggttcctgcaagggtttcaatctatcattggttggttccctatttgggggctcatggtgagacagaagatcgttgtggggagcctatggtagatcagaactgcttgccttgtgacagagaggagaggggtcctggtatcctgttcaagggcacttcctctggtgacgtaatccaccaggtccacgtcctaaaggttccaccccttctcagcagtgccctgggctggcaccagggttcaacactcaagcctcttggggatatctaagacccagtccatgccgccaacgtcccatgagtggagaggatgtacttttctgttgaaaacttcatatgatgctctgaagcctgaagtttgaaagactgggtagtgaaggaatgcatcccaagatgtcaaaggaagaagagtcacagtaagaagatatcagaccactaagaaaatggtagctgtatcaaaaatatgtctaagaatcccagggcggagaacaagaacagcgtctgcctcagtgagcaggaggtctcagtagggcgttcccaggagtcatctgccagctgtcactgccagacccatacctgaggcctttcaacacctttgtgatgactcaggactgagcaggctctgcattagggtgctcacagtagctgtagatctacacacaaccccaactgagacatgaacacttcccccagttactcactgtctaacatctagttctctgtaacgctagtggaggaagagcaaattgtgtgctgtcagagcctgcttgcagcaattctgagaggcccaggacctggcttctgtcatctccagcccttgcttctttttctcatggcctgtgttgatgagcgagacctccagccactcactcttaagccattctcgccccgctcagcctccacatcctacctaatgctggttcttgttgatccctcatcccttgcgcctgtggggtttgtgcactgccttcctccctgctccttaccttcacccgactcttgctctccactggattgctcctgtcctgccctaacttgtctcctggatcactttgctctgtcccatctttttttgcattaaaacctgtggaatgggggctttgggaagtacagatttgcttctgtctgctctttacctctactgtcactcttcctaagacctctcagaggctctccattgctcatgttcatcttgacgacactcaggcttctggtttatctagctccgtgtagagacgtatacctctgaatctcacacctgtggtgctgtcgctatgttgtaccttactctgctccaccagagtcttttagaagttccacacacttaacttccccaagccacagtttttctaaaggtttatgtagcttacacttctgaaggctgaacagtgcaccactaaggaactgcacagactgagagccttcttgctagtagggatgcaatagagacctaggcagtacagggcattgcatgaaaacagaaatatgtctaagagagaatgccaaactggcttctatgacctatccaatctccagataacctactaatgcattctttgctttgttttgtttttaattttttttgttttgttttgttttttgagacagggtttctctgtatagtcctggctgtcctggaactcactctgtagaccaggctggcctcaaactcagaaatccgcttgcttctgcctcccaagtgctgggactaaaggcatgtgccaccactgcccagctaacacattcttaaaggcagagcccacaagtcctaatcccctcttaaaggtcccacttgaccccaccatgatcatcttcttagttccttatctgtagtgtgtacattttcataaactccttgtagctaatcaaacttggcttcaaatctcaaacccaactctaaagagaaaatgcatttgaacttcaggcagcatagtggtgaccctggtgatagtgccagcattgccaggctgtggtgtgctaaaagatgaagagcttggtgcttgatgtacagcagtacctgctgctgctgctgccgccgccaccaccaccgctggcatggccaccgctgccactgctggtatccttcccagggggacaaagccataggcttctttcagtcccctttgccaaccttggtaaagcttggtgtcctcacaaaaccccctcccctcctcactttctccacagttccggcctgctcactcctgctgctcctctcacacccctactactctttgctgcctcctcctctgttctttgtcacctctcctctgagttccactggactgtgtatctgatatccatatctgcagcataccagatccatcacagcacgtccctagtaagtagcatgccgttgacccagttactaaaacagagctcacatctctcttttccagcctggtcccctgccttatttatccaaaaggaagccctgtattcaattctcacatatgcatctctcctgctgccagtccactgccacacatcagcttgcctggattctgtggtcagactctcgagcagtcctttgaagtgcttagctcaggcaggtcttacagacttgaatggttcctcctgtccagtttccatacagataaccacgtaaatggtactgccattcctgcctactctccagtggcttcccagttacttagagccaaatggagcttctgatcatggcctccaggtactgcaggaattagtcttgactttccagatttgccttgacgtctctctttgtcacagcctgttccagccacaaggctctttcagttctgtgaatctctggatatttaactgctccctcctgctgggatggtctctggtctgacagcctcactgccttagttcttttcaggaatccttgtttcctattaccttttacccaattgcttctctgtgtgattatttgaatgtctgtctccctggctaccttgcaaattctttggggacaggtgtctgtcttgtgcctgcctgggacagagtggcttagtaggggatggagcctggtaggcatctctttactttgccttgtccccacccacagtcctcaccaactttgtcatgcattgccagctccttctattctcagcctgtctccacagagcctcagatctttatgtgagaaattgtgggaggtcccccagcagttcagagcccttaactagaagagagggtgctctgcagttggctgaagtcatggagacgctcatcctaattcctgcttagcgcagggcatgtgccggggataggtggggaaggtgaccctggctgcaaggaagtttattctccagtgacctaaaagttctcatttcaagtgttgggaagattcccatcccctgctcatggccaaaaatcttgccccaagaaatttattctttagtcacaatttatgctataagatataggtctataattaaaggtgttatttgataatctttggtggtagggcctcagagaatcacatttccacacacacccatacaaatgataggtttctcagagaggtcatgttcactgtgaggaggcatatggggtcggcctgccagacgctgtatttcccatgagcactcgatgctcagcctcatgctaggctacaggtgggcaagcttcactgtgtatgcccaagtcaccatggcttgatgtataagccaagagtcctacatcctacaccttggctggcccttctgccagcatttggatcagaacagctccgttgggaggtctatgggtactatgggtatgccatgacacacaaatggcaaagcttttctcagtatgaaagtgttcactgagcagactcctagtgattgtatacatgctacgtatacatacttacacactgccgtcccgttgtttggaaaaagtcacagcttgatggtgtcttactgtccgagcagagagatggcagatgtaaattctaagagggaaaagtagattgccattgtcgggaagagggcactaatggtggggtcatagggtggcaatggcgtccctccaacagctggacgagttctctgagtagaggtgatgagaagtgagaacggaagagccccatggctgaggggaaagtgtcctcacagaccgagggaaagtgggaagcccagggaaggggtccatgaggcctggggaaagggctcagccttgcaggctgaaggccggaagatgtggcattctcagaacaacagaaatggcatttccacgcagacaggcttcaattttaaggctgagtaatgaagacgtgggtgctttctgagtcctgctagacgttgcagagaagctgctgtggtcctgacagccttgtttaaacagatgtgtgtatcacattagctgctttaaacattcattggtagagtgatgggggaaagcaaagccagtaccaaatcgtatctaaaggttgcttgactctagccagcaagcaggtggaggttcgtggccaaggactagtcaccgtcatttccccaaaccagccttagaccgtttgttaagtgtgtgggctgtaaccggatgactctaatcttacattcggcacatccaaagaaatggaagagaagcagcatcccatatccaggaaactgacaagaggacccccgtggagtggtcccagaatgcagactatacacccctgcagctgccaagctgaggtctagccatgtaaacacaggcccgctccacgaggcttggatttcctatgtccatgtcccacccaagcaggaccagattcctcggcagtgagccctctgtctgtgtgtggcctggcacagtcctccctggcagtgggagaagagtcccctctccagggtgggggctggagcagacctggggaccaggttgtcctaaacttgctgcttgcctcctcattgtctccctcaaccttactgaacgtcgaagggacattaatgagcagtgacagcagctccaggagaggagggggtccttggtccccctctctttggagaagatgacctttgggactcagcaaggagaattgggttcagttgctttcctttgaggcgttcagagtgcttcccacgtatctcatttaccctcacgacacccctgagaggtgagctcgtttgaggcctctacaaagttatgattatgcctgtggattctaattcccgactccatgtcatcctaaaccccaggctcctccccatctcactttcctgaacataacgaaacccttggggtaatgaacatctcaggttcaagccccaccaagggcgatcccctcctttctccccccccttttttttttggttgttattattgttaagtttgatttattgctcagttttctagccaggctcaatggatgtccagaatattataaataatgtggattgaaaagatcgtgctgaaatgtttattacattcttagaaagagaactcggaatggcccgcagagcgtggcagtaggaaggaggggagagaggagaggaaaggccaaggttgctcctaggatatctcagtgtgcccataaagagtgcccagaggggacagaacttacattgcaatcttgctatcaagaatgcagacctgttcgggggcgcaggcaataggcgtgaagaatgcagggaccatgaggaagtaatcactgggcactccctctcccgtttcctcaaccacagtgctccagaatgcctcagctcactgggaggggggcttggggggctgcctgagccttccaactgcccctcatgggaggctagctgtgggcgtcctctggagtggcaggcaatggtgagaagggccctcctcccctgactagtagacagttagaatcttccatgtgttctctcagggcttgaaaatgcaaatgttatcaagaagaggaatctgatatgagaaatgactgtcaccctggcccagccatcatgttgggaactacaggcatcctgttctcttctgcttggtagatcctattctgtccttcctcgtttaggccctccctctgtgaagacggagagtaggaactccaagcaggctccctgatgccggatggaaagtctggcaatccggtggacatgtttcctggaatctctttgttgtgaacaggaacagtcctttggccctgccagctgctgctctcggcccgcagacctcctcaggaggaaatgaggctgaggggatgttgcctgggggttggtttgtgacagtctgtgtgtcggacacattctgggatagcctgtttttcatgaggctttatcatcagccaatagagactggtcttgcctcgcccctggcacagtgacctgcctcctagttagggctcctggcgaggcctcctggctggttcctgtctggtgccctgaggaaggagagtgtcctttctttcatgcgagtgtgcatctgttgtcaggaccaggagaaacctttcacacagactcctaggcgtgaccggaagttgcatttctcacaaggtcttgggtgagccgctgagcctggccctgttccctggggtaaaagctcctcagagctccacagcaccaactctcccactgcaagtagttttcagtgactttttctcaagactgtcttcaaagaaaggatgataaaaaaaaaaaaggttcagggaaccgggtggtggtggcgcacgcctttaagcccagcacttgggaggcagaggcaggcagatttctgagttcaaggacagccagggctacacagggaaaccctgtctcgaaaaaaaccaaaaaaaacaaaacaaaaaaaggtccagggaacaagtgagctatgaagcggggctgccggttcatacagaacagggtgtgagttcacatcatcccagcaggaaacctgtgagcggctgctgcagccctccgctgtacggaaagctggacacggtcattgatttgaaaggaggaacagactctgtctccctagaagttcacgcctgggtcgctagccacaaatgtggaatatgctgattttgcatttggaaagtgttttagcctctttgtagttcatcacgacaagaacctcttaattaagttaataacttctctgtccacagttccactgcttatccagtcactcagtcagcacgcgtctattgagcagctactctgttccgggttctgtttgttaactgccactgagtcagaaagtcacttgaagtctgttctgactcctaatattccagagagcgagtctaagttatgcacttctgcccattcagccaaagcagaaataaatgttgactgtatgtagccctgtactatataatgacatctagtcaatgaaagatcaaatgtatgacctggtccccaaagatttaatcatgcagtgatatagccatgtttagtctgtacaaatacactctataatgttgacccagtgacctagtgataaagtcacacaatgataaaattctcactagggtcacagcatgggttcagaggacctctgtgcacaagtgttgtggtaacaggcagaaaaacagtcacagccaagcacggcctgctgtcttaaagaattcaactgtgacaactagtaattcactagctcaattaattgttaacttaatgaagtaatactttgcattgtacatgatctgtatacagaggcataggaaaagcagatctaagatgcagtgagcttacggagaagagtctgtttggggtccgtgggggtggggtgttcttgagccaagactctgagcagtgtgagctcagaagacccatgcgaagcccagaggtgcaggaaagcatagcatattgagagtgggaggccacctgggaaacctgattgttctgctggggatgtcctatgaagtgacatctgacataactcacaggtcatgtgtaacaaagccagcaaacatttctaaaccagatctgacattccagatcatctactgcacctttctttccagaagagcagacaggcaggagctgatggtagcaccttaattattagtctcaaatcccttttattttagcacagagagcgtgcccttggaaggcagatatttgtatttgccccatgtcacatgacaggcacatccctggtattggcataccacttaatcatgtgtcctttaccagtgtgacctttgttgtaaccatacatttctgacctattttggtcccttacataccaaatatcttcatttattaatttgtttaaccagctttggggatcaaacccagggcctcacacacgctaagcacatgtgctaccaggaactgcagccctccacactgcagagagaaaaagacttcccccgtgtttgccaggtcctctgagaagactcaagctctacttcttgcttagggaacacagctgttcccagccttccagctctgacgcagtgtgccctcccaccttacatcctccttgctggcagagtctctgtgtaagtgtttcagccgaccatagctttgcacttaggatctggtatcttgtctgtgtttctagaagattcagtagaagcactgtctggtcccctccagatgcttacctgaggtatatatctcaggccacgaaggtgattggaggtccctagttctagccctgaagtgtcacttggcatatgctgctgcaacatcattagaagctaccctgtgtgaagaacaaattttagggatcccagatgacatgctgttcataggagggcatctttagaaggagtgaagagtgtttgaggatagtagtgaatggaggtgcatcattgcaagtcccccatgctgatggcacaggttcctttgctcggtagtgtgaaaagcctgtattcgtaccacatactcattggagagccctgcagcctggctggcctatccctcctgtggtttcctagactggcttgtaagctctaatgctgctctaagtaaaggaccctttccccatgagctgatgtggaacccagctggaatgtcttttcttgttcttgttgtaccaaccatgctgggtcccacggagctcacaaagctgatagctttcatcctgccaatgagaagctatccaggtgtgctcttcattccatttctgccgccaagcttctcattgtatagctttagcattaaagttgtgaaccgaatcttagggagacaagcacttgggcacagtgagatgtgtgccctttctttattagttatttttctggttgatgcaatagattgactaacagaaagcagcttgaggaagaaggatgcattgtggctcacagtttgagagtctgcagtccatcctggtggtgaaggcttggtggcagaggctgctcgatcacttctggacatttcaggagacagagatgggctgccaacactcacctgtctttctcttcttgctttagcctgagaccacggcccataggatgctgccacccacttcagagtgggtcttcccctgtttatgccccaacagttaatcatctctggaaatgttgtcaaagatgaagattaaaccatcatacttcccacagaccacatatgaattctcctgtatctataggctctttatttagtcatttttacacacatgcagtgttggaggatttcgtgaaccttttgaaatccgttttcatgatacagctggggaagagtaagggagagaaagtttcctagaaaagcctggcggccagctccagctttgctgagaatggtcaggcccaaggatgggaggctgcccagcactgaccagaggcctctcccatgctgccttggtgcacagcaggagacctcgcattcattcgcatgtgcatatgtcatggacctcccattgctgtacaggtggaaggtgacatactatgacatatcacgaagatgatgggtaagagagctcagactacctcacggtgtccacttaaaagctaatgacctttgaacttttctcatgtgatgggaacaagcttcatgaccacaacaaataggttccaggtatctgaaaggagactgggcttttcacagaagaggtatctggctatccttttgctggcctttttcttttcttttctcccatagcccttaacagttgcctttcttgccactgtatccttgccactgtggcccttggctccaaatgtaattcatgtcatcttagggtccaaaggaatgctgaggctagctggggcaggcctgcagggtgacagagccatggaaatggtctagaaaccccaccatcaccctcatgaatttaccccaggtctttcaagcatagggtgacatcttgcatctattaattgcatcttacttctacaacctcaacctggcttcctctcaatttcagagaccagctggtggccaggtctctgcagctctctgccagtgccgtgatgaagtgaaacggcccctaataaaagcagccatcaacttaagaagtatagttttcatttaggcatagaacagtcaaagtgggccacttgatgaatagcagctatccaaggaacagcaagtacactacttcccactccatatgagaccccatgtcccccacagactaggcaggaaccagatccctgcctgacctctcccatcctgcaaagtgctggactccatggctgaggccttcctctccagccttctataataagttccctgtctgcttccagttgtcattacatcacccttcattccaagaaactctcgtaatgtgttatttctaagcttccatgctattaacatctaaaattggaagtttcctaatgccacatgggaagacaccctcctcttacctgcagcgtgcttccctaccccattgttggatgattcatttccagaaagtattggcatctcctccctgtgtggccctcaaacctgaagaaaggggacagctttgagctgccacctagattcccaccaggaagaaagaagctctcctttcttcctggctggtaacagcttccactacattgagttatctacttgtctctgcaacttctctgcctcttccagcatcaagtcaagagggcagcggcttgccggctggctctgttcattgctgtaggtgcagaaggcagatttccagagactagctacgcagtgctcacctaccaagccatgtcggcagtgaggacctgtcattcgcttaggtgtttattgagcagccccttggatggtgtatatagcacatacagggtgcacataaagttcccagcactaacgaagtcagtggatgtggccttcactaaaggcacagaagtggcagggccctcatgcagttgcctgggacctgcctgaaccaggcactcagagtgggtacatgggtgtcctggagaaggagggacctaagcaactggtctgtccatccagcattttcttgttggctgagtttacagaggtcgagctgtaatgccctgatatttactcccaagtgcctgttgcccccaaactggagccatctttttttttgcatcttgacttttcaaacagcattgatttagagagcacttgcagcattgaaggctatgtgaccgtgcaggaaaaggagttgttgtggggaaggtgccactgtacttgagagtgatttctatttggagctggactccttcagagtcaggagctgcagcccaaggccacgtgctccagggagcagcacctcccagctgccttcttgagactaaactgatagcaagcaaacactcacaagctgcactcagactcttccagagaagtattcctgttgctgatctgtctgctgaaggggtgcggttgcaaacaggacaaaattgtccatttaggctcaaagcaaaacaagaaaaaccatgaaatgtattcgggggattagggttacttaagggatggcttgtccaaccaagtctaagggaccttcagggctaagtctagggtctgttgttgcctgaatgtggccagggctatcacctgagccctggctgtgctccattaggtacacagaatcctggcaaaagctacctggtgacctcttctggacagcattgtatgtcagctgtgcgtacagaggcagggtcagggtgacgagccagagccactaggccacctctcacatgccgccctggcgtctggaactcatgcactcacctcagagctcataaccctgtccaggtgcttcacttttctccactgatgggtgacaatgggtcaccttgccaggtgtccctaattagtgccaggtggcacagcctggtctaagcaggatgaatgaaggagtttgttatagtgaatccatagcctggctggaaccatccagagatctttgacatgcggtccagagggaattgtcaaaacaagatatccgtaacagtgctcctgcctggcttttccaagacagttgaattcctgccagatagagtcacattcccaggggtaacctacagcacggccaggggatgtttcttagcaagtattgatgcaccggagagctgactttaaattattgccttgacaactcctaatgtgctgcttttgattgccgatgcgaaggattatctatttgcacttggtttctgctgttgaccggtggtgagtgctgagaggagcttccttcagagccggggaatgagcaacactttaggaacacagataggacctagaagcttcagcactctctgtacaggaagcagccatcatagaattgctcacccccttcagggaacatgagcatttcagagtttgcattcttttgggaggtgagtccacttgcacgtggtttcctgctgccctcatgaggctgacagatccgtgaagagcaagctgtgcacagagtccacactcagtgaacattatggatacacgtcacactcctgagtaaatcctccctagggtagcaccggaagaatacataatgaagtctcccatataacccaggataacctcaaattcataatccccctgcctcagcctccccaatgcaggacgagcactatgagcactctcaacagtgctcttgttccacgttagaacctcttgaccgagtctcacctctcattttgacccaacatctggccagtgagatgagtactcacacagggtctctgttgctggccagtccagggcctggggcctagtcctccgctccacagctccctgatgctgagcgactgctgggccctgggtccagagcctgccttccgttattaggctgccctccagctcctctgctccacctccttcactgtcttaattccttttaatttcctgtttctaggccagttctccttccccctcccccacttcaggtggcctcattgcttcccatttcctgctgagagctgctgctccctctggcccccagatgtgtctctggaactgctgtcacctccccttctatttctatttccatgttgccagggttttccctaccgttgccagcagtgctgcctggtctctgtggtgacagcactcggagcttcgctccaggtggggctgggcctccagaagagagggcaaggtgcctcagtgctctcagagtcaccccagcacaaatgtagcgtgcgcaggcgcgcctgggtagcactggcctttctgaagcctggtctgagggaggagcgcgccgagtgccttcaggaggctgatgctcttctgcaagtaaagtcaccagccatcagcagcaacagcaggacagatcccagatcctggcaaaaccacgtgctgccctgggaaacgtgcacatgtcccacattatcctgaggaagcggcatgcagagggtgatctagataggctgccttctttcctctgcatggtctgcagaccatggtgctgtctaaaggcaaggccctgattgttacccagcctgacacaacaaggagacaaagtgaagacactgtttatcccagcatttctgttttcagtcagaacccaaactagcacaggcgctatatgttagccagatttttgccttgctgtgtggtcctttgaggggccacattgtcacttgcatgtcccacaccatgctgtgctaccttcattctccagggacctgaatgaccagtccagcccgccctctcccgtagggactccccagcttgctgagcccagctccaagacactcccacccagagacgtgggccttctgcccaaagccagctctgccgctggccagctaccatcacggggctcctttagggagtacaagtctttgttcttcccaccagtggttgccctgtggtgtgagtagcaggatttgggcactgtaaacattttttcatttatttttagacaagtttggctacataaccctagctcacctggaactcactatgtagaccaggctggctttgaacttttggagatccacctgtttctgccactcctaagtgctgcgattaaaggcatgggtatattagtgtatttatttattattcttacatgtgacttctgttctccttgtgtgcctgttgtcattctcagtatccccggtattagtaatattcccctttatgcccaaatagccacaacttccaggctccctagtccataacttcctccctatatgcctccccaactgcccagggtctagcagtaagttcccttttggctttttttaaccttctcttgctacacctctgggctcagcctgtgccctggctctgacctccacttcctccaagacttttccagttcagcttctcacagcctctctcacctggcgtccacttggctgggctcttcctgccttttgactccagtcggcatcaactagcacagctgcccttcctgtagctaataaccaaggtggatgctgccagatattccactgtgaacttccaacctttcctggactccatcatcatggcccggcccagttagaattggtctctgtttctactgaatgccaccctagcgttcctcagcctttactcctcatgttctttggaataagtgacatgactctgccgttaccctgacgcacgctgtctagtgggacattcacagacatgggcatctcctctagactgttcttggcagtaggtagacactgagagccagtgacgttccggaaactccatgtccttggtcatatcaaataacgtgcctgctgtgctggtgctaggtaggctcatcttacaaacggaagaaccaaactcaagagttgagaacattccccaggagtcttagctactcggtggtgaagtcccgtgtccctgattataaagctagttccctctaagacatcagattatgtgtgatctctttttttttgtttttggttttgtttttttttgttttgttttgttttttgagacagggtttctctgtatagccctggctgtcctggagctcactttgtagaccaggctggcctcgaactcagaaatccgcctgcctctgcctcccgagtgctgggattaaaggcatgcgccaccacgcccggctgtgtgatctctttttttagagatcctatgccgtgggtagtgggccagtggatccataagaaaagagcttaaagataaaggaccatccttcctaaggatggccttgcatagacgtgcccttgaaaatgttttcttggtctccaggagaggcaggatacatgggactgagcagccttgatgtaagacaccatgtgtaagctgagcattgagcctatggctctggagttagctgagaatggaagaaggtagtgaaagaaggaagaagtgaaagaaggaagaaagaacagccggagaaggtggcctccatatagactgagggtgggctgaggggatagctcagctgataaaaccttgcaaccagcctagtggatctgataagtcccatgcctgtgagaaaccctgtctcgagaaataaaggtggatacctcctgtggaatgacatctaaagttgtcctctgacctgcacacatgtacatatatgcatataaacatgcatacatgctgaagatggagaaggatgccgccccacctcagccgagaaagagaaagaaaagctcggagtgatggtttgcatgtcagacaagaacaaaaccaaactcatgggaggctcttcttgccttttgcctggtgttttaatgaaaactttactaaaggcaattaacacgtacacccgtgaggtaaagtaccctcaggaaggatgagaccaggggcgggaagtgctgtcctgcccaccagtgtctggctgtctggcctgctgagctgtgaggtcgcttggtggaaagctgtgatgtccacaccacgagcaggcaagtagcatcgactgcgtcagagtaggctgcattttccagctgtcaattaattcaaacgagcaaaaagcaaacacattcatcttcgcccacggtcctcttctttcttggcttatttacctagtactgggattcaaggggacatttacatgaacttttgaaaataaatatcccagttctgtcttttgtcctgctcaatccccacctttggctccagagcctgctgcaaaactaaaataaaatatttctaaaatctatgtttgatctgcaagaaccaactggctgatgcttaagcaaatgtcacctttgacagcacaactgtgagaggaaactcatccgccgcaggcgttagtcacacgtgtctcatcctcacaggtggtggctgcgtggggctggcctggtggccacgactctgcacagtgtgacacacaaggcaagcgatgagaacgtgcattttggttcaaaacaagtagcagggagtcaggatggcttgtcttatgacaaaccctgcatataaagaacttctggacaaggatgcccttgtgaaaatggctaccattccctagaaaagctggcctccaaattttcctttttttttcccccacctagccagtgaacagtgagggcggttacctgctctctgctgcagtgggggtgttggcagcacatgctgtcactcagtggtttccagtgtttcactgggggggggggggggagcatgggccattaatccagatgaacaatcttcagaaaacacgtccctgttccaaagccacagtgttaattaatgtcccttcctaatctgaaagggagtttgttttcttacatctctttaagttgccatatgctagacttgtaaatatcccaagtgttggatactcatctggtaaactgaccaaaggaaacggacatttccccgacccttgtaacctgacccttggcacctcgtgcctgcccctcaaagggacgcttgagtcttgggagcaaacatctgcctggccaggtgccggcagtgccatggcaggagctgagtgaaatgcagaggaagtgacccaaagccgagccttgcaggtgttctgagctagggctgggcccagagcgctcattgtttagaagctggcaggctcccaggagttcaactgtcagtttcattctgaaatgtcaaacatttccttagctggggatggatggcgagagccccggaggctgcagccctgttaggaggaaaaagaaaacaccccaatttctgtctttgagagttgattcagtatgcatggctcaggttgtttcaggggccattctgcaaacttagacccactgtccatgtcagaaagatgagggctcaagcctgccatggttatatgacagtgactgacttctgtcagtgactcttactgtaagccttcgggtgatatacaccagagacccatttctggccacaggggcaagtgaaggtgcacatggaagcagactggccaagaaccagttcagttcatgacagtaagtgttcctggctgcttttactttgtgtgtgtgtgtgcctggtatttccaccataaaaagtagaggcacaaagagaaggagataaagaaaaggaattgtatcttagtttttcagccccaaagggtctggccctttatccctggtgaaccctgtcttctgttggttgtcaggagccctgggtgggcccccatggtttaggaaggggttaaaagcacaggtgagagcagagctagctggctccccatgcagccctccagaacctctgcttccttgtatacggaacagagagtggccaattacggatcagtgagccaggtaatacacctcttgtcctgagccccggaccttgttactagctttgacctcaaactgggctgagctttagtgcctttgaaaggatccatacttccaggacatttccagaagggtgccgaagctgtcatcacagatcaaacactgttgctgtgatcaggccactaagtcaggtcttcgtggcccaaaggatcccgaagccacagctggcttttacttaccgctttcttctcccctacaaatgacttcctcagtgcacccagcactaagtttacttaacactgttgaaaatgacctctcaatggacttgtgtttgcctgaaagcatttaaaatataaaagtcttatttgtttttgctgttgaagttccctttttgtctttggataagcccctactttatagcatgcaatcaacttactgtctaaggtgtcaagagggaagtatgcatcccttcggggatgtgtgtgtgtgtgtgtgtgtgtgtgtgtcccaacatgctgctactgaagtgccatgtgtctgacacagtttctgtggtagacacattatcacctttaaaggcaacactgtatttctttctcataggccccaccccttcagctgaaacttcctgtcctctttgaacttctagaacctaagacacttggctccatgtacctgtgatatttgttggttgatttggaccatttttgaatttcctacttgacatattttcccagtttcttcctctctactcagtactcttcctgtctcttcttgcccttccagatattcagtgtgcttcttcatgtgttacatctgtatggcgtctctgtgtgcaggctctgcattaggtccgagatacagtagcaaatgggaaggcaccgttccttctgtggacacagaccttccaggggaggggacacgtgagagctagcccctcaacagtcacgttgctaagtcctacctggagatgtgaagctatagaaagcaccagtgaccgcaagtcaccaaggaggtctccgggaagtgacccgagagagaaccaccaggcagaaagttcagtgtgtgcaaaagcagaggtgtgccatgttggagaagtgacggaagccaggtggctagagctcagagggtctgcaggacagtgagtcagattgtgccaggccttgtaggctacaggagagtctggacctcagttggagtcactgcagacctctgagcaaagaggcaacctgatcaaattcacaatccaaaagccagctctgccagctttgtgggtaacgggccaagtcaggagcaaggcagcttcaggctggtgttgcaatgttccacatcagctgaggctcaagacctctccccgtagagcgtataaactgaaatccatgggcgctcttgcctagagaatcagctcttcctgtgtctcctccactgcttattccaccatctccatcatcactatgacttgaaacctcaagacctgtggcgtctctaccactggccaccccggcctctggcaaagcctttgctgtacacagccgagctagagcttgtcactcagagcccgcctaagctgcagtggccatgctcccttctggcttgtctgcatagttcccaaacaagcagcccctcttcccaggagaattccaggccactgtggccccctcagcctggccactggctcctgcctgttgttgttctccttctcccgatactgcatggtgtaaagctctcaaggcagccaggagcagctttccagtcaggagctgcagaactactgcatagcagggactcctgctgagagggagcaggcaggcaggagcatttcccaaggcagaagtgaatgaaaagataacaatctcctgaatctccaagatctgataatgtcacccaagcgcacacaccttctcactgcagacacaccgaagtagtagctgaaaaactattctaggagcctaggtcgtgcccaaggaagaaaggaaggcactccctagacgaaagaactggaggctgaaagccagaatccagtaacaaccagtaacgcaacaggggctcccttctacgagggaacagataaatagtgtaagctttagagacggaggacaggctgtcacggctccttccttcactttggtggtgactaaaaatgtcaaagtggcctgagggtgtggctcggctggtacaatggtcgctgagtatgtacaagaccctggattagttggccatggtggcttacacctttaatcccaatactcaggaggcggaggcaggcagagctctgtgagcctacagagtgagtccagggctctgttgcacagggaaatctgtcttgaaaaacaaaaacaaaaacaaaacaaaacaaaacaaacaaaggaccctggattacactctccagcaccacacaaaccagatgtggtgacacacgtctggaatgccaacacttgggaagttggaggcataaagatcagaagttcaaagttatccttggctacaaagtgagttcaagatcagcctgggacacacgagatcctgtctcaaaaaataaaataaataatccaaacttcgttgcacaaaaaatagaccgcaggcagcaatgacctgttaacattaggcattttgctctgtcagtgtttcagagttgtaaaccctgtaaccaagctgagcgccatctatagcatccatgcttgtcacttaggaggcactggaaagctagagcggggagcttggtgtgcacatgagagccagatgcgcaggcctgaccctggccctcccaggattctgtcttgcaatccaggagtattggcacagctctcaaggtggcaatggctgcttataggctccgtggagtcccatctgctgtgcccaccggcctgcaaagcctggcctgtgttcactgccctctcctctctccacatacttctagagtgtgacgctttcttctggtgcggctcattaaaagaggcgtgttctgcttctcttttgcagggatgatcatggtgattttattgctgctcgtggctattgtggtcgttgcagtgtggccaaccaactgatagcaataaagggaccacccgctgtgacacctgccaactacgaatgaaagcccagcatccttttggtacataacacctgctctcaataaattttccaccgctctggg

SEQ ID NO: 2804 - DNA, 889 bp, Mus musculus
atgagccgcacgggccgccgtagtcagctgctacgagcaggaagtgtcccagctgcgggcggagactgcaccatggccccggacccctggttctccacatacgattctacgtgtcagatagcccaagaaatcgctgagaagattcaagaacgaaatcagtgtgaaagaagaggtgaaaagacaccgaagcttaccttgacaatcagaacgttgttgaagaatctgaaggtaaagatcgaccttttgaaggacttactgctaagagctgtgtcgacacgccagataacacaactggagggggatcgaagacagaacctgctggatgaccttgtcacccgagagagactgctcctggcatcgtttaagaatgagggtgcagagccggatctgatcaggtccagcctgatgagcgaagaagcaaagcgaggaactcccaacccttggctctgtgaggagccggaggagaccagaggtttgggttttgatgagatccgacaacagcagcagaaaattattcaagaacaggacgcgggtcttgatgccctttcctctatcataagtcgccaaaaacaaatgggccaggaaattgggaacgaactggatgaacagaatgagatcatcgatgaccttgccaacctcgttgagaacacagatgagaagcttcgaactgaagccaggcgagtgaccctggtggacagaaagtcaacttcctgtgggatgatcatggtgattttattgctgctcgtggctattgtggtcgttgcagtgtggccaaccaactgatagcaataaagggaccacccgctgtgacacctgccaactacgaatgaaagcccagcatccttttggtacataacacctgctctcaataaattttccaccgctctgg

SEQ ID NO: 2805 - protein, 236 aa, Mus musculus
MAPDPWFSTYDSTCQIAQEIAEKIQERNQCERRGEKTPKLTLTIRTLLKNLKVKIDLLKDLLLRAVSTRQITQLEGDRRQNLLDDLVTRERLLLASFKNEGAEPDLIRSSLMSEEAKRGTPNPWLCEEPEETRGLGFDEIRQQQQKIIQEQDAGLDALSSIISRQKQMGQEIGNELDEQNEIIDDLANLVENTDEKLRTEARRVTLVDRKSTSCGMIMVILLLLVAIVVVAVWPTN

SEQ ID NO: 2806 - DNA, 664 bp, Mus musculus
cggagactgcaccatggccccggacccctggttctccacatacgattctacgtgtcagatagcccaagaaatcgctgagaagattcaagaacgaaatcagtgtgaaagaagaggtgaaaagacaccgaagcttaccttgacaatcagaacgttgttgaagaatctgaaggtccagcctgatgagcgaagaagcaaagcgaggaactcccaacccttggctctgtgaggagccggaggagaccagaggtttgggttttgatgagatccgacaacagcagcagaaaattattcaagaacaggacgcgggtcttgatgccctttcctctatcataagtcgccaaaaacaaatgggccaggaaattgggaacgaactggatgaacagaatgagatcatcgatgaccttgccaacctcgttgagaacacagatgagaagcttcgaactgaagccaggcgagtgaccctggtggacagaaagtcaacttcctgtgggatgatcatggtgattttattgctgctcgtggctattgtggtcgttgcagtgtggccaaccaactgatagcaataaagggaccacccgctgtgacacctgccaactacgaatgaaagcccagcatccttttggtacataacacctgctctcaataaattttccaccgctctggg

SEQ ID NO: 2807 - protein, 70 aa, Mus musculus
MAPDPWFSTYDSTCQIAQEIAEKIQERNQCERRGEKTPKLTLTIRTLLKNLKVQPDERRSKARNSQPLAL

SEQ ID NO: 2808 - DNA, 218613 bp, Homo sapiens
  misc_feature (1)...(218613): n = A, C, G or T/U
gtccggaggcgatgtactctccagacctggagatggccaagcaggagacgttgttgccatgaccctgtaggaagttctgctctttagtatttattgcctgaatgaggactgtgcaaccaagaggataaatcatatgctcctggtcaggatggcatttgagaccagtgggcacatgtcctaaaagagagagattcacagtaataataatcaggtgcagaagtggccaggaattttctacttgagtacaaaacacaacactttgtgtgtgtgtgtgtgtgtgacagagtcttgcacttgtcacccagcctggggtgcaatggtgcagtcttggctcactgcaaccttcacctcctgggttcaagtgattctcctgcttcagcctcccgagtagctgggattacaggcacccgccaccacacctggctaatttttttttgtatttttagtagagacggggtttcaccatgttggtcaggctggtcttgaactgctgacctcgtgatccgcccaccttagcctcccaaagtgctgggattacaggtgtgagccaccgcgcccggccaacactttaaaaataagccttagttcagctaaaagaagttggggaaataggtaattttatttcactgacaaaaacgttcatctagtaatcacatcttaaactttgatgtttataaaaatccctgagggatcctgttaaaatgcagattctgatttcaggtctgagaaggggttgagattctgtatttctcataagctcctaagtgatgctgatgctggtccagcaagtcctacggccaattctcgtaatcctaaaaagcacgaatgcatggagtgtgagcagcctgcttgggtgagtgcacaggcatagggagaatgggagtcaactacctcaggcaaaggttgggtaaatataaaaatttggcctattttacttcacaaagcataatattctccaggttaatccatgtctttacaaatggcatgatttccttctttttaaaggctaagtaatattacattgtgtggccaggcacggttgctcacccttgtaatcccagcacttgggaggccgaggcaggcggatcacctgaggtcaggagttcaagaccagcctggccaacatggtgaaacccggtctctactaaaaatacaaaaaattagctgggcttggtggtgggcacctgtaatcccagctactcgggaggctgaggcaggagaatcactggaacccacgaggcggaggttgcagtgagccgagatcacactattgcactccagcctggttgacaagagcaaaattccatctcaaaaaatgaacaaataaattaaaaaaaaatactgcattgtatatttgaaatctgctaaaagagttgatcttaagtgttttcatcacacacaaaaagtaactatgtgaagtgaatatgttaattagtttgatcgtagacatcatttcacaatgtatatgtctatcaacacattgtgttatacactttaaattgatacaaccttaatatgtcaagtatgcctcaatataaccaggaaaataatttttttaactttcggtttcagttctgagtgcccaccaggtgctctgaagagcctgggacctttcatggtgacacctctttccacaggcaactcccgtactccaaatatctgccaaggtaacactactgcttccatgttagagaaaagtttgtatgcttgaatgtaattattgttttgcttgagttggtagtttattcactaaaaacagtttcaggagaacaggaccttcagcaaaaataaaagaaaatacaatgaccaacaactctgggaatgggctgaccagcctggtaagaacagggcagatggcatctgcagaaggccccaacatattgactaactgcctacctgagactgcacatgtttcacaaaaatgctttgatcattattcctctaatttccctgattcagagactcaactcggtgaggtggtctttgaacgctagtttattgtctcccctgggttgctggcttctccaataaagctaaccttcctttcaccaaagctcatctcttgagtttttagctttcaagtgacaagtggcccaaacttgattttggttataccaagaaccatctcaacaattataaacccttgtaatatgttttaatatgaaacagacccaggtcctccattattgctcacctatggtcagaatttttttgattgctcttcgtgtttattttacaatacaaacttgcatgtcaccttggctatttaaaattcatgattgtgtttttagtgagatagtattaaatgtatagattaacttaagggaaaatgatttttataataatataaaatacctctattttaaaaacaggatgtgtttcttcataagtctccttttatgccttctagtagcattttccatttttttcataaagatctcactcatttcttattacatttattcttgggtttttaaaaaacttttttgttgctatctccttctccatcgaaagactcataaatatttattaatataatcttcttgttcttaaatgaatgcttcttttatatttaactccctctggaatttattttggtgctttatgtgattcctgtagctaaatggattatttttgctcaaatggccaaatgtaattattgaataaatgattttttttcattttaattgagtgttccttttttatgcagtatgttcttataataccaaggtttatgtctttagggtgatctattcctactaaaaattttttatatttttctaattgcaggttctttataaacaatcatatggctatccatatggaaaaattaaacttagattcataattcacaccttacacaaacaatatcttccaggtagatcaaagacctaaatgtgaaaaacaagacagtgtgtacaaaagtaagaaatgactttccaactatgacacaaaaagagcaaatcataaaagaaaaggctgaaatatttacccagttatgtgaaaaatgaaaaacatctaggctgggctgggtggctcatgcctgtaatcccagcactttgggaggccgaggcaggcagatcactcgaggctgggagtttgagaccagcctggccaatatggcgaaaccctgtctctactaaaaatacaaaaattagctgggcgtagtggtggacacctataatcccagctacttgagaggctgaggcaggagaatcgcttaaacctgggaggtggatgttgcagtgagctgagattgtgccactgcactccagcctgggtgacagagtgagactctttctcaaaaaatcaaaaaatttaattactaaagacattgttattggaaggatgaagagaaaaacacaaacaagaagatattttcaatgtatacaatagacaaaggatcatctccataatatacgaagaactcctacaaggcaataaggaaaacatatgcttctcaatagaaaaatgagcaaaggatatggatagccagtttatgctgaaggaaattcaaaacccaataaacctacaaaaagagatgcaacctcataagtaaccaggaaaatgtaaattatgtccgaaatgagataccatgtcatatccaccaaaatggctaaaattaagatggctgacagtaccaggcatctgtgttgatgtggaacaaagccaacactcataaaatgcttggtgggagagtaaatcggtctaatcgttttggaaaacaatgtgtctttattgatgatgcttgaatgcgcacatgccccaggacccagctactctattcttaggtgtgcaacctgcccagagataaccttgtaacatgcaggtgtgtatttcttcagatttatttttgtttttgcatttaaaaattatggttcttggttgcaaactagaagagtcaactctggctaaatgtagcagaaaaagaattatatggaaggaatacatattgctcacacaactggcaggaagtttgggtcacacttgaaaaatgggcagaactaatagcaaggcgagaccaagtgacacgaactaaagacctctcatggccacactgctcaacgctcaatgctcctttgcatcactcctataagagtggaactgcggagtgggaatgtctgattggctgagccaattatgttacatctctcaattggctgccaaggaattaggagagaaaatatgtgcctcttttaggctctcactaaagcaatagaaccagctcctacctatcttgggatacttctcaaatagaatagtattcagatatgagtaaccaaaactacgcatgtccactacaattcatattctttgctctcttctccagacatactcacacacactccattttctctctctctcgccttctttccctccctctctgtctccctctgtccctccctccctctcctctctctctatcccctctctctctctcaaacatatgtacactttaaactgtaataggctcatatcatatacactgtatggcaaattgcattttatacttaatatatctttgacatctttcctcattagtttatatacatctattccatttttcttaaggattgtacagtatcaaattgcacaaaaggaatataattttaaaaattattggagtgaaattcacataacataaaattaactgttttaacgtgaacaattcagtggcatttagtgcattcacaatgctgtgcaaccagcacttccgggttcacgccattctcctgcctcagcctcccgagtagctgggactacaggtgcccgccaccgcgcccggctaattttttggtatttttagtagagacggggtttcaccgtgttagccaggatggtttccatctcctgacctcgtgatccacccgcctgggccttccaaagtgctgggattacaggcgtgagccaccacgcctggccacgtagttttttaaaacttcttaccaatggatatttgggttgtttcttccaatgtttcagctattatagacaatatcacagtgaacttcattgcacgtaaattttttgaaaacttgaataagtgattcaagttcttaaaagctcaaagattatcctcattaagaattgtaatagatactataaaactggccttcaacaaggttgtaaaattaataccggcagtagtaattgagaaccatttcttattctcaccttattatattacccttttttttttctttttttgcctttgccagtttgagaagcaaaaaccatcactgctttaacagcatttttttttttttttgagaccaggtctcactctgttgcccaggcaggagtgcagtggtacagtgatggctcactgcagcctctacctcccgggctcaggtgatcctcccacctcagcctctcgaatagctgggactacaggcatgcatcgccatgcctggctattttttggtattttttatagagatagggtttcaccatgttgcccaggctggtctcaaactcctggcctcaaggaatcttcctgcctcaacctcccaaagtgctgggattacaggtgtgagccaccgcacatgaactttaatagcatttttaagctttttgagctaatagccatttatatttatttacctatttacagggtctggcttttttttttttttttttaagaaaggtccagagagtaaatattttaggctttgtgggcaatatggtctcttgagactactcatctctgctagtgtggtataaaagcagccatagacaatacataaacaaatgggcatagctacattccaataaaactttatttacaaaaacaggcagtgggccagatttggcccatgggctatagtttgtagactcctgatctattttgttgttgttgctgtttttagtttacaagaactctttgtataccataataggaaaatcatgggctacctactccagtcaatggatgaatgtgaccaaacccttaataactataactttattaaatgtttttaacacaagtatatttggtttgcttaaataattaattcctgccaaaatgcaatacctacaagtgtcaagtacagttacatattgataccataaagttaaaattcaagtttaaggccagtcgcagtggctcacgcctgtaatcccagcactttgggaggccgaggcgggtggatcacctgaggtcaggagttcaagaccagcctggccaacgtggcgaaacaccgtgtctattaaaaatacaaaaattagccaggcgtggtggtggatacctgtaatcccagctacttgggaggctgaggcaggagaatcacttgaacccatgaggcagaggttgcagtgagctgagatcgcaccactgcactccagcctgggagacagggtgagactccatctcaaaaacaaaattcaagttgaataatgtaacactatagtgagtttcagtgttgcagtgaaaaaaggggccttgcttttgtttctaatttgtttccatctgaaatctaaactcaatcacttggcatttaaggcctctgaaatctaattccagcttctctttcctgtgttatcctgccagtccctgatactgaagccaccccaagctatttgccgttctgcaaccaggccctgcactctccacttttcctcctctgccccccgctattgctgtaacccgaaatattctgccttcaatctttacccgctgactcctagtcaaaatcttctctcccgagccttatgaaagttctgtcttttctctctctccctcttttttttagagctagtatagctttttaaaataaacatttttcagtgaagacaaaatacagaaaactcaatcacttttgtaaactaaaaataaaatcataagctccccaatccccacgctgccccaccccagccactgactgaacagatccccttttggacaaagggacccccaaaacaccttaaagcagagttcccagccttgacggaatgggaggtcagacatgcctcattataccccctctcttttgtggtttagacacaactgatcagcattaatgttaaaatagagatcataagattgacagactgtgtggcaataagatatcaaattataaacaggacctaaggccatgcacccctccaccctgtggctgggtgtggtggctcaagcctgtaatcccagcactttgggaggccaaggcgggtggatcacctgaggtcaggaattggagactagtctggccaacttggtgaaaccccgtctctactaagaatacaaaaattagccaggcgtggtggtgggtgcttataatcccagctactctggaggctgaggcaggagaatagcttgaatccaggaggtggaggttgcagtgagccgagattgtgccattacacaacagagcgagactccaccgtctcaaaataaataaataaaataaactatacactgccacaaggtttttctttttctctggcagctaaacaagcacttatcttgagataagcaatatgaaaacaactgcaacctgtccagttcataggcacttactaactgaagccctgttcaacccgccataagaacaattttgattggacaacagagtgatttcagtaatgttctcctggcaagaagaccactcaccacggactacctctggccagtttactgaggcttcccacttaacgtgccgtcatgtcctgaaaaggccttttgacatataggacctaattgtaatacatttaaatgttaggtctccatcccaaggtgaatatgagtgatatattacatcaatgtttgttcaatacacatgtgttgggaccaccttcatgagtattcatagctcctcctataacctgttgaatatgtatgtttgtttgtttatttatttatttattttttgagacggagtctcgctctgtcccccaggctggagtgcagtggcgtgaccttggctcactgcaacctctgcctcccaagttcaagtgattctcctccctcagcctctcaagtagctgggattacaggcacctaccaccacgcccggataatttttgtatttttagtatagatgggatttcaccatgttggacaggatggtctcgaactcctgacctcaggtgatctacctgccttggcctcccaaagcgctgggattacaggcatgagccactgcccccggcctcagttgcagagttctatgtgtgtggttctacattggctcaacaagtgacattatgcaacccactgtaggctgctcaattgtttctcaatgatcttgtaaccaactctcaagatatctgatatccgaaatgtataaagcactcactttctattggagactgttaaagttaaaccaagagtcaagagctaagtcctagagtatgcttaaaactttagacagtgattgttctgcatccacattcttaaagctttcaggcatcacaacacacatttttgaaaagttttgcttctcctaaaatctaattcattgttttctcatccctcaaaaaaccaaaacccctcaaaacgaacaataaaaccccacagctttttcttcccagaatcttcaaaacaataggcagtcacaaataagatttcagcggagcggcccagtccctttttctctccgctttagctccccctggcgtccccttccccttctgtcctggtctgaaatcctcatcatttagaaaccttccttaggattagaggaccaacaacatcccctcagggggttgctcaaacacacgttccctcccagccctttctcactggtacgccagttgggattttagcagatttcctagctggtcccaggggccgacacagacagcatccttctgtgtggttacgaaggagcctagggctttgcgagcggcgtggggttcagagccaggaagggctgacctagtgggagaagggttacaaccacccgtactcatccggcccgcctggggaagaggcatttggtcccttttaggtgctggcgcttgtccgagctggtaaaaaccatctcactccctgaggcttggatcgaggaagtgactctccaaggccttggggcaggtcaggctgtgcgggtcctcctgtgcgtgtccctggccagggctcctgccgttgtcccacactgcctttcaggtgtccccggtgtctcactattcctgtttgcactacacgtcctccgaattcctaaaccagccagcccaaagatgctggaggcctcaccattgaagccgatcacggcgtcaagttccagctccgccacttgggcctccggcgaaattttgttatccatccttgggaggttctgattactttgctctcctccctagtggctgcagcgtcttctggtcgttatggtaacggacgagcgcatgcgctccagctccacgcccgcgcagaaacccagcctgccgagttcgagttcattagcattcttggaaatgaaggggtatggggactggaagagagatggggtgggactcctcttctttttttttgtgctatttctctggaaatttaggggatggcactaactgcgcagaactaattcctccatccccttgtgtagagtctgtgacttcttagtaactctaaaatcaagcaccgaatgaatggcatttaaaaaataggtaatcaggcgtacaggactgataggaaggctgctataaaaaatatatataattgatacttctttgggcccctgtttggagcagtgtgaaaaaaattttaaagattttttaaaaagcgttgaggtataatttacatatcataaagttaacttaaagtaggttgtagtgagtttacgcagcgtgcaagtctcaccgcaatctagtgttttgtttattgttttgtttttgaagcaggataaatttttaagtaactgctacagagaggtcttgcagcgctcccaccttcctgggaaaatgctttgtttctatttgacaattttaactgagcttagcagttcgcgtctcttggtgggagtagattgctccagtgtactgtccgcaggggagcgctttgctttctctgattatagttctgaggccctagctactcactttgcaaactccaggctccggtcgcgcacgggacgaactgcggggagtgagccgcgcgggccgccgtagtcagctgctaagagcaggaagagtccgagcggcgggcggagtctgcaggatggcaccggacccctggtgagtcccgtgtgagggcggcggtgcgtggagggaccttcggggaggccgggcttccggagagcaggcaatcacttcgcattgccgctggtggcctttcgggatgaggggaggggcagcgagacctttcctttactgagggggctcagccacatcccgccacacttggtccttgcaagggtggcccgggaaggagaccaggtggtccgctggagagctgaggacttacgccaaatctctgaatattcctttagcttttctgggctgcatctcgttgcggggatttcccgcccatcctggttttggagctagctggctggtgcaggcttccctggactcctataaaagtgaagtcgaaataacgtttttgtagcatgtcagtccatcccggtaaacccccttatttcacaggtggagaaaccgaggttcagaatccatggccaccagccagttagtaaccagctggggctaagacctagatcttgggggcccttccagatacaggaacctgggagggaaattgtgcacttgtttataaggcattttgcactttcttgagttaatatcatgaagtcttttcctttagcagtagcttctgcagtaaaacaatagctgataagggtgatttatttagcagttaatcccaaggactgcatgatgaaagatgcaacttttgatcccaaggaacatattgtttgatcccaaggaacgtattgttattgaacatagacttgacctttctgcttaataattaaaaacatattacagctctataacgttcttgttggaatatgtgtcttatgttgttatttctaatatagtttataattgtttaagttgcccacatcctggatattagaagaatggattccaagaacaaagttgagttacctggaatctaggttatttgggccaattatttaatttagcatttacttttttaaacctaattttaggccggacgcggtggtggctcacgcctgtaatcccagtactttgggaggccgaggcaggcagatcacctgaggtcgggaggtcgagaccagcctgaccaacatggagaaaccccgtctctactaaaaatacaaaattagccgggcatggtagtacatgcctgtaatcccagctactcgggagactgaggcaggagaatcgcttgaacccgggaggtgtaggttgtggtgagctgagatcgtgccattgcactccagcctgggcaacacgagcgaaactccgcctcaaaaaaaaaataaaaaaccccaaaatccctaattttaacagttatatacaccccttgatagagaatattcaatttagagaatattgaaaatttgcaaaaaggaaaataaatagcatctttaactctataatttggaaatagccattaatgatttttttacaatgaatttgttattttaatctatatttttatatatatatataatataaacagcatttctctatgtcattggacattctttgaaagcataactttcttttcttcttttttttttttttgagacggagtcttgctctgtctgtcacccaggctggagtgcaatggcgcgatcatggctcactgcaacctccacctcctgggcttaagcaactctcctgcctcagcctctggagtagctgggactacaggcgcacgcagccacgcccagctaattttttgtattttagtagagacagggttttaccgtgttgcctaggctgatcttgaactcctgagctcaggcaatctgcccgccttggcctcccaaagtgctgggattacaggtgtgagccaccgcacctggcctcataattgtcttatgttgcaaaataatgcatcacatgaatgaccataatttatttttctcctattagttttttgtttttctgatgttttgttttgttttatcattgcaaagggagtccctttgttctatctcttatttccttgggctccctgtctagaagtagcaattagaactgttgaaagtgaagcatttatactttttttgttattctcaatcagtttgactaagtggctttctcattagactgttgaaagtgaaatagaactgttgggctcaagggtataaacatttttaaggcccttgatactgtgaaccccaaagtatctgagacaggtctcagtcaatttagaaagtttattttgccaaggttaagaatgcacccatgacacagcctcaggaggttctgaagacctgtgcccaaggtggttggggaacagcttgcttttatacaatttagggagaataatacatgaattaatacatgtaagatttatgatggctcaatccagaagggagggacacctcgaagggcgtggggggcttccaggtcataagtagattgaaaaattttctgattggcaattggttgagttattatcaatagaaacgaatgtctgggttatgataaggggtagtggagaccaagattttattatgcaaatgaagcctctgggtagcaggctttagagagaatacattgtaagtgtttcttatcagacttaaggtctgtattgacgttaatgctggttggcttttcctgaattccaaaaaggaggagaggatatataatgaggcatgtctgatcccctcttcccatcatggcctgaaccagtgtttcaggttaactttggaatgcccttgccttagagtaggggtccgttcagatggttgcgggggtgggggggggtgttgggggtgggcttagaattttattttggtttacaatacatattcctaagttgccctccaccttctggaacctaaatccctcagtttacaaatcaagtaggaaataaaggtcaaagataagggacaggcccccagttatctatttagattggtggaagctatcactggaccccaagcttcttccgcagttaatgttgataaagcattgagactttttctgttatacttcattagtttgatgaagtggctttctcattggactattgagagtgaaacagtgagacactcagctgtgctcccaaagcacaaaatgggtcgctgattaggggggtagaaaggagtatgggaagggacttgaaaaacctataaaaggccaggtgtggtggctcacacctgtaatcttagcactttgggaggctgaggcaggcggatcataaggtcaggagttcgagaccagcctgaccaacatggtgaaaccccgtctctactaaaaacacaaaaattagctgggcatgttggtgcgtacctgtaatcccagctactcaggaggctgaggcaggagaatcacttgaacccaggaggtggaggttgcagtgagccgagattgcgccactgcacttcagcctgggcgacagagcgagactccatgtcaaaacaaaacaaaacaaacaaacaaaaacaacctataaaaacagattcaactacagctttacctttgtgttgctaaaatcataggtcattggcacctccctcagtgtctagcaatggaatatagcagttactattttaatggcctatcaaagcaagtggtaagctcgctgtttaacagaaggagcccatgatcactgtctctgaactggctctttgctaatgttaattagctttacctccagggtaactaatttgttgatgatgtaccatttccagaaaaattacagttaaaccttaatagttttatatcctgattggactttttatgttggtagcatggtcttctttgtgttgaattgctttttaaaaactttattttggaaggtaaaagatacacaaactagaatagtataatgggcccctttcatactcaccacccaatttctgtgattatcaatattctgccattcttgtttcatctctaccctccacaccttttttttttttaattttgagatggagtcttgctccgtcgcccaggctggagtgcagtggcatgatcttggctcactgcaacctctgcctcctgagttcaagtgattctcctatctcagcctcccgagtagctgggattacaagcacccgccaccatgcccggctaatttttgtatttttagtagagatggggttttgccatgttggccaggctggtcttgaactcctgacctcaggtgatcacccgtcttggcctcccaaagtgctgggattacaggtgtgagccactacgcctatgcccggcccagattacttttttttttttttttttgagacaaagtcttgctcttgtcccccaggctggagtgcgatggcacgatctcggcaaactgcaacctctgcctcccgggttccagcgattctcctgcctcagccaccccccccacccaattactttttctaaactagtacttcaggcacctgtgtgcttgatagtgtaatgaggttgtctattgccccaggccaagggttcccgcccggactttaccgcagattggaatcacttggagagcttttaaagctccccacgcacgcccaggacaaaccccataccagttgagtcagaatgctgaggttgggaccaggcattgttatttttttaaagattccccagtgattccaacttgtttcagaactattgctctttagggctaaaataacaacacaaggactggagtcaggacacctgggagtttgtgctagctgtgtgcatttctcataacctctttagggccactctctgtgtgtaaaagtgttctctatggctctgaaattctcctttaagtctaaccttgttagactggtgttcaaggctctgcagaaactagcttctactcatctctaccattttatacttaacaggcttccagggccaccacgcagccaaatgtgccgggcacgtttccttccattcatctttgctcgccctgtctttcactaagtctagaatgtgctcctccctcctgtctgaataagagacctgctttaacttcgtggtcatccagatgtaacctcatggaccctctccatctgagtgccttggtcagcagtaatctcttccacctctgaactccagacgtacttaccacttagatcccacatttggcaggaggcaaaacttaccatatgtggatgatttttatatgtatggtctggaccccagagccagacctaggctcctcttttcatgataatatggaggaaaaaaaagtgaaatgtggcaaagtttggaccaggacccaattttccttattagcctcctgttttcttaattctgtgttttcttgtatcactgctatttttccctacacacacaaatacatgaatatatatatatgaatgatatacatgtgacatatacgaatatatagtatatatgatataaacgataggtatgtgatatatatgaatatatgtatcagtgatatatatgatatatgtgaatgtgtgtgatatatatatgatatatacatgaatggtgctgctttacagtatagtggttagtggttcaggatcctctctcaggatccttatgaagtttacagtgtaaagctcttagtataggacctggctcaggtcaggtactcagctgttactattgctataattattctagtaagattcctaagggaattgatgggcgcattttccttcatttaaaaaaaaacacttatcaagttccctcagtgttcaaatgatatgtgggaattgaaaggttttaaaaaatatattgtttactcaagcaaaaattaggacattaggggcaacaggagtttctgatattttgtgatggactggtcctggaagataatgctggtcatgttagtccacagagtctctgctttttaggagcagactgtctgataggagaaatgaaatgtgtatgcatgcttaagtattttcgtttttttgttcgtttgtttttttgagatggagtctcacagtgtcgccgggctggagtgcaatggtgtgatctcagctcactgcaaccttcgcctcctgggttcaagcgattctcctgcctcagcctcccaagtagctgggattacaggcacccgccaccatgcctggctaattttttgtatttttagttgagacggggtttcactatgttggccaggctggtctcgaacttctgacctcatgatctgcccgcctcggcctcccaaagtgctgggattacaagcgtgagccaccgcgtccggtctgcttaagtattttctatatgatagaaagtaaaaatgctctgagagaagcaaaacataaggggctattgggagttcaccgtgaacccttcaaagcctccaacgctgctgaatgacaactagaagcttattaaatgttttgagagaattctggcaagctcagatgtcaggtgggtgtgtggcctttgtccccggagcatttggttttaggctagacaatacttgctgttcctgcaccctagagccgcccccaggcatctgcaagcccagcttcttcaccttgcctcggtgtcacctgatcctaagtagcagctccttatcactctctgtccctttatcctgctgcgtttttcttcttagcacctatcaacacctgacatactatgtatttaattgttttatgactttctttccttaaaatatgagctccttgaaagagggactgtgttcattctgtttactgccgtcttctccagtgcccagaacagtgcccagtgcagcggagaccccccacatgctttctcattggcagaacagcacagttgttaagagccccggctctggggccagacggccttggtttgcagcaggcagaaccacttgggcaagtcactctaactctttgtgcctccttttctcatgtgtgagttggagatggtaatggtacccacttcatagcgttcctgttttgattaagtgagttattactaacgaagccttcaaaatagtgcctggcacatggtaaataacgctcagtccatgttgcttttactggtcatgttattattcttcccctctgtttgaattctttggctagaatgaaaatgtcaaacttagacaatgcaaaaatttcttttaaagaaccttaaggccaggtgcaggggctcacgcctgtaatcccagcactttgggaggccgagggggcggatcacgaggtcaggagatcgagaccatcttggctaacacggtgaaacctcatctctactaaaaatacaaaaaattagccaggcatgatagcgggcgcctgtagtcccagctactggggaggctgaggcaggagaatggtgcgaacccaggaggcagagcttgcagtgagctgagatcgtgccactgcactccagcctgggcgacagagcgagactccgtctcaaaaaaaaagaaccttaaacattttctctttttacgactttggtgcaggttctccacatacgattctacttgtcaaattgcccaagaaattgctgagaaaattcaacaacgaaatcaatatgaaagaaaaggtgaaaaggcaccaaaggtaataccatgaaggaattagtacccaatgatttgtttgagttttgaggcctgaaaaccctcctatctttctttgaggctgtctgtgcacatgtgtgtatgatgatctatctgcttacatatgttgaattgacataacacccaaccagttagtagtgatgtaatcattgagactaaatgaggcataacacatttaagttctcctgttttactttaaatatttctaacaattttatagtctagttcaggggttagtaaacttcctacagataataaatcttttagtctttgcaggccaagagataatgtcttcaagtctttgagtttccattctcaccacaagaatagttatagtttttacattttacattaaaaatgtaaaaacaggccaggcatagtggctcacacctgtaatcccagcactttgggaggctgaggcgggcagattgcttgaggtcaagaattcgagaccagcctgggcaacatggggaaaccccatctctactaaaaatataaaacctagccaggcgtggtggcacacacctgtagtccagctactcaggaggctgaggcaggagaattgcttgaacctgggaggtggaggctgcagtgagctaagatcgtgccactgcactcccgcctgggcaacagagtgagaccctgtctcaaaaaagaaaaaaatgtaaaaaccatctttagttttgggctgtataaaaacagtggtgggatttggctaagaaatagatttttgtgaaatcacaagtttatacttgtgactatgattgaaaatagaagcctctgattcaaatctaacaccacacctttcttccttattttccacattccaaatttgtattttctttctctcacactgagaatcctagtttccaaaagcatcagtatgtttttactcatttggtctattttacagtttacagaaaatggtttcaaaattactataaggtaccacgacaaacactgagttcaaaatttgagtctttttaagtgtagactaatctactaagaatgctgaggttattatgttccaaagttattagaattattttttaactttcaagttcaggggtacatatgtgggtttgttgtataggtaagcttgtgttatggggatttgttgtacacgttattttgtcacccaggtatgaagcctagcacttactatttttcctaatcctcttcctccttccagcttcctccctctgctaggccccagtgtgtgtcatgtccccctatgtatccatatgttctcaccagttagctctctcttatatcaacagagtgaacaaacaacctacagaatgtgagaacatgcggtatttggttttctgttcctgcattagtttgctaaggataatggccttcagctccattcatgttcctgcaaaggacatgatctcgatcttttttatggcggcataatattccatagtgtatatgtaccacattttctctgtctggtctaccattggtgggcattaggttgattctatgtcttttgttattgtgaatagtgctgcagtgaacatacacatgcatgtgtctctttttttctctttttttttcgagacggagttttgctcttgttgcccaggctggagtgcagtggtgcaatctcggctcactgcatcctctgcctcccaggttcaagccattctcctgccccagcctccagagtagctgggattacaagtgcctgccaccatgcctggctaatttttgtatttttagtagagatggggtttcgccatgttggccaggcttgtctcgaacacctgacctcaggtgatccacccacctcggcctcccgaagtgctgagattacaggtgtgagccaccccacctggccacatgcatgtgtctttatggaagaatgatttctattccttcggggatatacccaataacgggattgctgaatcaaatagtatttctgtttttagtacgttgaggaattgccacaccgtcttccacaatgactgaactgatttacactcccactaacagtgtataagtgttccttttgctccgcaacctcccgagcatctgttattttttgactttttagtaataaccatgctgagtggtgtgagatggtatctcattgtggtttcgatttgcacctctctaatgatcagtgatgttgagctttttttcctgttttttttggcagcatgcctgtcttcctttgaaaagtgtctattcgtgtcctttgtctgctttttaatggggtggatttttcttgtaaatttgcttaagttccttatacatacgggctattagatctttgtcagatggatagcttgcacatattttctcacaatgtgtaggttgtttgttcactctgtggatagtttccttttctgtgcagaagctctttagttgattagatcctatttgtcaatttttgcttttgttgcaattgcttttggtgtctttgtcctgaaatctttgcctgttcttatgtccagaatagtattgcctaggttgtcttccagggtttttatagatttaggttttacagttaagtctttaatccatctgaagttaatttttgcatgtggtgtaaggaaggagttcaatttctatcttctgcacgtggtagccagttatcccagcaccacttattgaatagggaatccttcccccattgcttgtttttgtcagctttgtcaaagctcggatagttgtacgtgtggccttatttctgggtactctatttttttttttttttttttttgagacggtgtttcttcatcacctaggctggagtgcagtgacatgatctcagctcactgcaacctctcccttctggcttcaagtgattcttgcatctcagctacccgagtagctgggattacaggtgtgtgccaccatgcccagctaatttttgtatttttattagagagagggtttcgccatgttggccaggctggtctcgaaatcctgacctcaagtgatctgcccgccttggcctcccaaagtgctgggattataggcgtgagccactgtgcctggtcaactgagttctctattctgttccattggtctatgtctgttttggttactgtagccctgtagtatagtttgaagttgggtagcatgatgtttccagctatgttatttttattttattatttctttttgagacagagtcttgctctgtcgcccatgctggagtgcggtggcacgatcctggctcactgcaacctctgcctctcgggttcaagtgattcccgtgcctcagcctcccaggtagctgggattacaggcatgagccaccacttccagctaatttttgtagttttagtagagatgggctcttgtcatgttggccaggttgatctcgaactcctgacctcagatgatcctcctgccttggcttcccaaagtcctgggattacaggcatgagccactgcgcccggcccagctttgttctttttgcttaggattgccttggctatttgggctcttttttggttccatatgaattttaaaatacttttttctagttctgtgaagaatgtcaatggtagtttaataggaatggcattgaatctataaattgctttgggcagtatggccattttaacgatattgcttcttgctgtccatgagcatggaatgtttttccatttgtttgtgtcatctctgatttctttgagcagtgttttgtagttcttcttgtagagatctttacctcatggttagctgtcttcctaggtattttattttctgttggcaattgtaaataggagtgcattcctgatttggcccttggcttgactgttggtgtacaggaatgttagtgatgttttgcactttgattttgtatcctgagactttgctgaagttgtttataagcttaatgagcttttggactgggagtatgagatttcctagatataggatcatgttgtctgcaaacaggaatagtttgatttcctctcttcctatttggatgccttttcttttccttccttccttcctctctctctttcttttctttcttttccttcctttctctctttctctcccttccctttcctttttcctttcctttctcacctcttttctcctctcctctcctctttttctcctgcctaactgccctggtcaggacttccaatactatgttgaataggagtggtagcagagggcatccttgtcttgtgccagttttcaagtggaatgctgccagattttgcccattcagtatgatgttggctgtgggtttgtcatagatggctcttattattttgaggtatgttccttgaatacctagtttattgagtgtttttaacgtgaagtggtgttgaattttatcaaaagcctttcctgcttctattgagataatcatgtaagttttgtcttatttcagtttgtgtgatgaaacacattttttgatttgcatatgttgaaccaaccttgcatcccagggataaagcctacttgatcgtggtggataagctttttgatgtgctgctggattcggtttgccagtatttttttgaggacttttgcaataattgattctttttttttctgtcttatgttatcctttgtttctgtttttattcattttcaggagttgctttttccaactttttaatttaattttaaataagtaaaacatttacattgttcagaagtcaaaattatataaaagtgacactcaaagtcttgttcccattcctctcttttctaccttttcttaacctacttcttctaaataaccattttcattaatttctggtttattcttcctgtgttactttatgcagaaataagcctctatgcgtgtgtatgtgtgtgtctctgtgtgtctgtgtgttatgtttttccttttatataaaagatactctttcgggccaggcgcggtgactcacgcctgtaatcccagcactttgggaggcctaggcgggtggatcacctgaggtcaggagtttgggacaagcctggccaacatggtgaaaccccgtctctactaaaaatacaaaacattagccgggtgtggtggcgagcacctgtaatcccagctactcgggaggctgaggcaggagaatcacttgaactcaggaggcggaggttacagcgagccgagatcgtgccactgcactccatcctgggtgacaagaatgaaactctgtctcaataaataaataaataaataaataaataaataaataaataaataaatggatgaatgaatgaatgacagatactcttttgtatcttggtcttttcacttaataatatagaaacctctacatttcatttcatattccttgttcttctttagcgctgtatgggtactctattgcgtagatgtaacattctttatttaacctgtctcctaaggaaaggcagttaaattgcttccagtcttgagttgtgaataacaccgcagtaaataaccttgtcctttaaaaaaattatgtgcataggtgtcttttaaaggtgagttctcagaaccagggcatatgtaattttttttttaacctgatgtgaaatcccccctcaaaggggttgtcacccttgccaccccaccagcaatgtgtgagcacttctgtttcttcacagcctggccaacagagggtgtgtgaatcttctgaatttttgttaacctcataagtgagaaatggtgtttcagtgtcgttttaaatttgtatttctcatataatgagtcaagtggagtgtgttttcatatgcttaagggccatatatatatatatattttttttttttctgtgaactgtcttgtcttttgcccatttttctactggattattagcctttttagtcttgatcttttaagagctcctcacgtattatggagattagctcctcgtgataaattgtagttatttcctttcctttatcatttgacatttgacttgcttgtggtagttttgtcgtgtgaaagtttttttttttttttcctgagacggagtctcgctctgtcgcccaggctggagtgcggtggcgcgatctcggctcacttcaagctccgcctcccgggttcacgccattctcctgcctcagcctcccaagtagctggggctacaggcgcccgccaccatgcccggctaatttttttttgtatttttagtagagacggggtttcaccgtattagccaggatgatctcgatctcctgaccttgtgatccgcctgcctcagcctcccaaagtgctgggattacaggcgtgagccactgcgcccggccgaaagttttttttttttttaaatgaagttggctgtcaatctaattgcttccatatatttagtcatatctaagtttttgctgtttgcaggttataaaaaatttattcctgctttcttctattaaatatatggtttcatcttttacacgaagggctgctatctatttaactagtgtcatcttcttggacagttagattctttctaattacaaatgatttttcagtatagccaaattattgcccatgttgaaataaattcttcaatgtagactttctggatttgggttgtataacattttaagccttttgaacacatatattgcagaatgacatttctacaccaattttgattatcttttaaaaaaatctctactaggtaaaaatactatgttacagtagtttaatatgcattttttattaagtcttgaatatctattctttttttttttttttttttttggccagatggagttttgcttttgttgcctaggctggagtgcaatggcacaatctcggctcactgcaacctccgagcctcccaggttcaagcgattctcctgccacagcgtcccaagtagctgggattacaggcacccgccaccacgcctggctaattattgtatttttagtagagatgaggtttcaccatgttggctaggctggtctcaaactcttggtctcaagagatcctcctgccttggcctcccaaagtgctgggattacaagcgtgacccaccgtgctcagccttgtttcttaatttcaaagttttctttttatatatgttaactatattaagctttgatctggtatatttagtataaatgctttctctattaacttgattttgtaagtgacattgtaaaacatgtaccggtttttaaattttatttgaaattatcagcatgtttgttggtgatcttttctaacgggggaggggatatcatgcttaaaaaggccttttacatgcagaggttttataaatacttaattatgtaaattttccttaagctttttttctgttattttgttttgtgtgtgtaaatctttgaaatacttggtgtttactttggtgtgtcatagctatctaattttattttttccccatttgttaaattatgaatttctttccctcatatgaaatagttcatatttaattcactggatttttatacagctacattgtttctgggccatttgttatgttgcactactgaagctgttggtgattgccagcatcagctattgtagttttttgtaatcactttatatctgattaaggcccctatgaacattatacatattcatggtttttattttccttcatttatccttctgtcagagtaattttctaaaacttcatttaaaaaaaaaaaaccaaactgtgctgtgccttaattatcacctcttctgcaataaaagaattccaaatggaatttcaagtagacatgtatgtttatagatttaaattggggaaaacttacattttcacaatattgagcgtttccttttgtttcttcagcagtatttattgcacagttaactatgtgccaggcactgtgctagatattttttagattttgttggtattgttaatgaagttttaaaataacaatttaaaaaactctccctaggtattacttaaatttaggaatgcccttgattttttttcactttatgactaatgaccatattgaattcttctaccgttttttttttttttttttgagatggagtcttgctctgtcgcccaggctggaatacagtggcatcatctttgctcactgcaacctccgcttcctgggttcaagccattctcctgcctcagcctccccagtaactgagattacaggtgcgcaccaccatgcccagctaatttttgtatttttagtagtgacagggtttcaccatgttggccaggctggttttgaactcctgacctcgtgattctcccacctctgcctcccaaagtgctgtgattacaggtgtgagccaccacacctggcctctactgtttttaatagtctttcagcccggcctctactgtttttaataatctttcagtctgggcgcggtggctcatgcctgnnnnnnnnnnnnnnnnnnnnnnnnnnnnnnnnnnnnnnnnnnnnnnnnnnnnnnnnnnnnnnnnnnnnnnnnnnnnnnnnnnnnnnnnnnnnnnnnnnnnnnnnnnnnnnnnnnnnnnnnnnnnnnnnnnnnnnnnnnnnnnnnnnnnnnnnnnnnnnnnnnnnnnnnnnnnnnnnnnnnnnnnnnnnnnnnnnnnnnnnnnnnnnnnnnnnnnnnnnnnnnnnnnnnnnnnnnnnnnnnnnnnnnnnnnnnnnnnnnnnnnnnnnnnnnnnnnnnnnntctagcatatatatatataaaataataataatctttcagttgattctcttaactcttccaagtagactattatcaatctgcaaataataataatctcatctttccttgtagtccttgtatttttctttaatttttcttattgtattggttagaacttctagagcaaagttaaataatattgtagttaaggcagtagtgttctattcttagtttttctttcttttttgtgtttcttttgtttataatttcccctgtactgtactaatcatatgtttattctgtttttaattattaacaccatgagctttattactagatttttctaacatcaaactgttcttaaattactagaataatttctacttgttgatagtatatggtcctttttaatgtaattctgaatttgctttgctaatattttttgaaaagatttttacatttataattcctaagtaagattgacatgtggttatctctgtcagtgcttgttacccaggttatggtagcttaaaatgtgaattaggctttccatctttttttgtgctctagaaagtgtctttaattatgataatgacattttttcctgattacaaaagtgatcattttcttataaaatattagaaaatcccactacttagatagaaccatggtgctttcatggtttcaatgtttgtatttagttcctgggttgttttttctctgtttgggtgatattttattttatgacttgatgtttttttcataagctgtgatggatatctttctatgtgaacaaatagagatttgagccataatttttaatggctacatactccgtctttcatctcccaaatgcttttgtctttgattttgtggactcctcttcgtaggcctggtgtgtgtggcgcctttttgtttgcttgttttgcccttttatcttttttttttttttgagacggagtctcgctctgtcgcccaggctggagtgcagtggcgcgatctcggctcactgcaagctccgcctccagggttcacgccgttctcctgcctcagcctcccgcgtagctgggactacaggcgcccgccaccgcgcccagctaattttttgtatttttagtagagacggggtttcaccgtcgtctggatctcctgaccttgtgatccaccctcctcggcctcccaaagtgctgggattacaggcgtgagccaccgcgcccggccgctcttttctctttgagtgtagagagatctgctttccttggtgtttccccacaacattgtaggtgattgttccttggttcccaggggtatggggatagttcaggttagacttttcttggctgctggtgccttggagggctgctggatgtgtgcagtctgggccagtctctgacacactggctggttttccttggtgtgattctgcaaatccaaggagggagtccgcttgagttatataattgctgcttttgacaaggtagcaaaggaaacctgtggtattctgtgtttttaacatatgtctgatttcatccgtggttgaatatgttttaacttacacaggcagttttttcacatttccaaattcctgagagactctcttctcgccctcttctccatcctttaatgtaacaggttagagtcacggacaaaaatttcctgtaggatgattggagaaaatgcgcaccctcctgggaaaagagtcatgtgtggttagcattcctcttgcataaaaagaacacattgccgtaaaacgtttcattgggttataaattttaccagttgttcagagagcctggtggggatggtaatgggactccatgctttgtcgtttgaagcctggttcagagaactgtgggtttttgctctcaaatgaagactcggggaacacaatttcctgcgtggttccaaggtagatacataggatcaatggggtagaagctcaggtgacaggattcagctgatggtgagagcacactgacagtttctagtcagtatcggggttccagtctggcttggctcaccacttggccaggttgtggagcgggtacaagctgtaggttggcagctgggccagggcaccactgagcctccttccagccctgagtttgtcgtgaggggctgagtatctatctcttccagcccttgcttggttgcatcatagcccgtgaagtagtgtttacgtgatgtaattttgtggattctacattctggactagaatacttaggatgtgttcttttcttttcagcttaccgtgacaatcagagctttgttgcagaacctgaaggaaaagatcgcccttttgaaggacttattgctaagagctgtgtcaacacatcagatgtatccatgtaaacatttccacctcttttctagagtgggaggaaaagcagtcgtattttaagaaaggaaggaatctgggccacccagattttcccacagcttgaggaagacctggtttccaaaatattgcctgtaatcttgatttctattttaagtgtctgttacatgttttacagtgaatatgctggcaaagcaagacctaccgagggaattaacttatttgggtataacctgtacagttcaggaagctaatgttttccgtcagtgcggtatttacggagccccacactgctctctgtctagaccgccttgaccatggctagctactgctccaacaggaaaacttccatgatcatcctaagctgtgattccgcttctgggagtttccagagtttttaatgatccatttattttcggagtgggcaataccagtagaaaccatacatctctcctctcaccacctgccccgtgtttatgtagatttgagatgtgccttatttttcctccagaggcacagacactgcctctagtatgggagtgtgaggggaaggggtgggatgggacttcttgaagcaagttatgccatcatcttaacctcctaccaagtgttaaaatatatatatatatatatgtatgtgtatatatatatatatatatatatatatatatatatatatatatattttagaaattcataatctgggccaggtgcaatggttcacgcctataatcccagcactttgggaggccattctcttgaggccaggagtttttgaggggcctggtcaacatggtgaaaccccatctctactgaaaatataaaaaaaaactgggcgtggtggtgcacgcctgttctcccagctactcaggaggttgaggcaggagaatcacttgaacctgggaggcggaggttgcagtgagccgagatcgtgccaaagcactccagcttggcaacagagtgtgaccctgtctcaaataataaaaaaagagaaattcataatctgatcaatttaggaaaatatacgtgacttgttacctacactaactttttacacccaagtgtatattggtttgaaaacttacctgaaactggtcttctctcatcatttctctaaattgtcagtaggtcatgccaaagacccaatttttggtatttcagggaatggatattgccagattttaaatataaggaaatacaggaatacagctttttagataaaaaaatggaaagtgttctaaaaaatattttcccccattgtaacacctttatatcaccaggaaagttggcttagttgcatggttttctagacattcaattacggatccactaaggtttcaaataaaagtttaatttcaaacaattacagccttatttttaacgcaattggaatattctgagatactttaccttccatctggtgtaatttgttacagcacagttggtctatcatataaagggtttttattttacccaaatcaacaagtcctaatatactcactgcaccattgtgcccagctaatttttttttttttttttgagacggagtcttgctctgttgcccaggctggagtgcagcggtgcgatctcagctcactgcaagctctgcctcccgggttcatgccattctcctgcctccacctcccaagtagctgggactacaggtgcctgccacctcgcctggctaattttttgtatttttagtagagacggggtttcaccatgttagctaggatggtctcgaactcctgacctcgtaatccgcccgcctcagcctcccaaagtggtgggattacaggcgtgagccaccgcgcccggcccaatttttgtatttttagtagtttcagatgggcaggactgtttcctctgctttcggtactaagcactgggaagtctacacatggcaaggtgtgtaaattcatgttagtgttacctaaaacacatatattagaaaggtaactacatattgtttcatgatataatatgcatttgcttccattaaggtaacattattagtcaccttatttatgtgctaaccctatagggcaagaaaaatatacaaattaagagcttttacttttttctattaataataatttctgctagttattagagagtactaagaataccacagttataattgactttgttctcctaaatgcttacagtctgaccatctgttgaaatcttgcagatttttggttttgtggtcgtcccagaattacttcccaaattactgaattaagcagtaagcatcaaaaacactgaacaagagttatttaaaacattacaaaaatatttaggggtcttaatgtggataatttagaatttaccaggagacatcaaaaattcaactggaatacaacaactttctttaaaattctatttattttttcaaataattgatctatttctactgtaacaacctgcagccagtactagggatggcatttagctaatccaccccatgagggcgctcataaacctgtttattttcagggaggccaactttttttttttttttttttttgagatggagtcttgctctgtcgcccagactggagtgcagtggcacgatctcagctcactgcaacctccacctcctgggttcaagcgattttcctgcctcaacctcctgagtagctgggattacaggcacacgccactgcgcccagataatttttgtatttttagtagagacaaggtttcactatgttggccaggctggtcttgaactcctgacctcaggtgatccaccctcctcagcctcccaaagtgctgggattacaggcgtgagccactgcgcctggccacggaggccacttttgatgtaagggaaaggaggtagcttgtatattatgaaggcctctttttaattctccttctgttcctcccatcttcccttcccctaacctccttcttcttcccaaacatttaaaataattctctggcagttatcttccagatttaagatagatagcaatctatgagtcctaataatctcatattattagatttttttggtgcttccttctcttctttacaaagaaagatactgaggccaagttaaactttacaccgaaagtcactgatgaagttggagagataacccggaattccagcagaggaggtttgtttgtttgtttgttttttgtttttgtttgtttgtttgttttagacagagtctcgctctgtcacccaggctagagttcagtggcacaatctcggctcaccgcaacctccgcttcccaagttcaagcgattctcctgcctcagcctcccgagtagctgggattacaggcatgtgccaccatgcccggctaatttttatatttttagtagagacggggtttcatcatgttgtctaagctggtctcgaactcctgacctcatgatgcacccgctttggtctcccaaagtgctgagattacaggcatgagccactgtgcccggccccagcagaggagttttctacactgaggagaggattcttggagagctttagtcattacccaggaccccacaactaggaaatggaagagccaggttcaaacacaggctgtgtggccccaacgtgaattgtttaaaagctgaattatactttagtagaaataatacagtcagctgtcacctggcatgtcttcaactagaattctctatgaattgttgtgttactggactgccaagacaaatcttgtttataatacaaatcttcaagaaccgtcttaaccatccgaagattaaacagtgttcattgtggtttattaggtatactttatgatgttgagaaaaatgtttgttcataaatcaccaatggagtgactttttaatcctttttttgaggcataattaatgtttgatgacttttttaatgtgaatatttgaataccacatttccttactgtgctggatagttgagaatttatgatacttaataaattgatgcctttctacacttgtgaacttgtccaaagaacactaggagttgccagaaaagtcctgtgcaaatgctttctaaacaatgaaattcatggaattaaggcatgagatgttatgctctctcctgaaaaagtatttttctcctggcaagaataaaagtcaagttaaaatggaagttctgtgcttttgaatccattagcgtgcaattaataaaccgaagtcttgcagtcagagagtttaaatttctgaaagaccttaacatctgttcacagtgtttctttgagataggaactataattgtcttaccagctgagaagagggttatgctgtgggaggctgcatatgaaattccagatagtactaaagatacttagtaccatcttcttagagttggcttcacatgaaacttatccttttgttggcatttcacaggaggcagcacctttacttattttaaagagaataaagaaaatctctttacagaggggtttgatgtcaaaaagtactttggtgtcttgggagaaggcctttggaaataagttttaaaaatctataaataaattttctcatcccaggcactttgggaggccgaggcgtgcggatcacgaggtcaggagatcgagaccatcctggctaacatggtgaaaccccgtctctactaaaaatacaaaaaaaattagccgggcgtggtggcgggcgcctgtagtcccagctactcgggaggctgaggcaggagaatggcgtgaacccgggatgcggagcttgcagtgagccgagatcgcgccactgcactccagtctgggcaaaagagcgagactccgtctcaaaaaaaaaaaaaaaagaaaaatctataaataaattttctctactctattttttggaaaaacaaagataggtaagtagatagataagtgcatagacagatgtggtgattactacataacaaaccccaatggatgtggttgtggagaggctgactgaacagattttacaggtaacccctggtagctacagtggaggtgaagtggttttcaaacactgtccctgtctattggttttcactgatacttggtaacatgagaaaaataagaagaagatagtgtttgtgtagcagaagttttttgatttataagaactttttttctgactttttaaagacaggatctcactgtgttgcctaggatggggggcagtggcaaaatcctagctcagtgcagcctcaaattcctggcctcaagagatcctcctgcctcagcctcccaagtagctaggggtccaggtgtatgccaccatgcccagctaattttttgtagagatggggtctcgccatgttgcccaggctggtctcgaacttctagtctcaagcgatcctccaccttggcctgcaaaatgtttggattactggtgtgagccaccatatcaagcctgttttctgatttatacagaactattacatggttctttctagtttttggtgttaaaatctccttgctttttcaccatgatagtaaaagtagatagttttgtttctttttttttttcttgaacatccatacctggcaaaatgtataattggtaattctatataagttacacccccccctagtttttttggacatattactggtccacgaaacctgaatgtctaggtgccattggtatcgtgggaacaacatcggctctgaaagcagacagaactgagattgaagaccagctctgccacttaccaaggccaaacagcagttcagcttttctggaccttagtttcattatctgtaatgtaggaataatcatactttgccaggttattgtacaagttgaagaaaatcttttttcttcacaggactagccccccataatggtgggtgttgaataaaaggtggttaccaacacccctggggaagttacttaacctctttgtgcctcatttgtggaatgggatgctagaagtccacctggcgtaaaggattgttgtgtaaggatgagattatatgcatacagggtgcttcacatatactaagtcctccttgaggattagctgctattgattattttatcattattgtaaagatttcagctaccattgagaatttacaggtcatcctttctttgtggagtttttaatcatgcatgatggttatgtcaaaactcacaaacaatgatggtattaaaatagtacttgcaaaatgtgatcagtgctttgaggaaggtaaggacttggcctggtacatcataaatatttattagagtttgttgacttaaaaaaagaaagccagaaaagtcttttgacctctagaaccttaaactgttcccttgcagttcttcttttttggcatggagaagtaattatctgcaaacttcttccttcgccagagcagctctttcacaaaataaggcttacctaaattctattttttttcgagacggagtttcactcttgttgcccagtctggagcacaatggtgcgatctcagctcactgcaaccaccgcctcacaggttcaagcgattctcctaccccagcctcccaagtacctgggattacaggtgtgcaccactacacctggctaatttttgtgtttttggtagagatggggttttgccatgttggccaggctggtctcaaactcctgacctcaggtgattcacccacctcaacatcccaaagtgctgggattacaggtgtgagcgactgtgcccagcctaaattcttaagccttctaccaaatataagagaaaatccaggagctggagtgggattgggtgacctgtggatccagttgcatatttaccccgctccatctgtggttcaaatgctcaccaggctacagcagagaagctggacttatgcatgctggtagtaggtatcagtaatatgaaatcaggatccagttttatttttatttttatttatttattttttgagatggagtctcgctgtgtcacccaggctcgagtgcagtggcacgatcttggctcactgcaagctccacctcccgggttcacgccattctcctgccttagcctcccgagtagctgggactacaggggatccagttttatttacaaccttacatatccatgaattggctataattacatgtacaatcagcatagccaaggacaaagtactatgatagttagctcttctcttccttttctttatctgtctgttctcttatcttcttccttggctattcaccaggttggtggaagaggaggttccccagcactggccactgactgtgtgctgtactacttttttttttttttgagatggagtctcactttgttgcccaggctggagtgcagtggcacgatcttggctcactgcaacctctgcctcccgggttccagcgattctcctgcctcagcctcctgagtagctgggactacaggcgtgtgccaccacacccagctaatttttgtatttttttagtacagatggggtttcaccgtgttgtccaggctggtctcgaactcctgacctcatgatccgcctgcctcagccttccaaagtgctgggattacaggcttgagccaccgcgcttggcctgtgtgtcctactttctacttgtccttagcatcactcaggcacactgtttccccactaccctactttacccaactgctacgcacctgtccacatacatgctgtatagattgtttcctggatgatcctttgacctcttactaataacaacccttacatagcaagggtgctatgcagatggttcattaatcaatttattctcattccatctccctcctccccatctccttatgctctgttctctccgtagattaaaatataaaacaaagaggcagcatgttcctaattggattgttttccagatttacagagtctctgggaatattctgaattcgtactcccagtattgtttttatcaggattctaagaagtggcaaagttaagtcagcatctcaaggtggagaagtctgcagaatgtttggtggaaaagccatgagctagggttgaaagagctgtcacctagcatggctgttaacccaggcaagtgacttagccatgctcacccttaatttctggtcagcaaaacaagagaactgggatctttaaggcctcttctagcatcaactgtgtgggtttctgttctttggttactcatctacaaaacatagtcatcaagttttactgtttctgaaactgatgttctttgttagctccttcttgacgtaagtttaaatctgtaactagtatctgctgattttaaaatgtacctttattgtttttattacaaaaaatattatactttctactgatatatttctcattagttattaccaatgactcctctttctcttccttattctatcctgtctcatctcattctttatagttaagtgttaatggttggtagctagtatctcagacttttctaggcttgaaatatatgcatatgtaaatataaaattcctttgactataaagggattatattatacatatggttctgaagcttgtgtttttattaattagcagatgatagagacaaacattaggaaacaatattcagtgaaacatcagtctctcttatacccttaatccccagttgtccttccttagaggcaatgtttatatatcagaaattttctgtgtgtatatacacacatatatagttaggatttttttttaacaaagtgggagcacactactcactgtttagctccttgctgctgctgtttttttcccctcctttggtttaatgttatattttgtagattattccatgtcaaataattcatgtaaacacttagtaagtgctcaaaaatgttaattatcattatcagccccctaaacagctttcctattctttttttaaggctgcaaaacattccattgtttacatacactagttacttattgatatttccaatgtggctattataaataatggttcagtggacatccttgcttctaagtccttgtaggactgtatctgaggaagaaatgtctgttgaaagactgtaccttttatattttgttaggtatttagaaggcagtctagcagttggttgaacctgtttgcattcctatcaagaatgtatgaggtggccgggtatggtggctcatgcctgtaatcccagcactttgggaggccgaggtgggtggatcacttgaggtcaggagttcgagaccagcctggacaacatggtgaaaccccatctctactgaaaacacaaaaattagctgggcatggtggcatgtgcatgtaatcccagctacttgggaggctgaggcaggagaattgcttaaactctggagctggaggttgcagtgagccaagatcatgccactgcactccaggctgggcgacagagggagacactgtctcaaaaaataataataataataaagaaagaatgtataaggtcaggtgaagtggctcatgcttgtaatcccagcactttgggaggcaggagggtcactttagattaggagtttgagaccagcctggccaacatggtgaaatcctgtctctcaaaaaaacccacaaaaattagctgggtgtggtggtggacacctgtaatccctgctacttggggagctgagaggagaattgcttgaacccaggtagtggaggttgcagtgagccaaggttgcaacactgcatttcagcctgggatgatagagcaagactccatcttaacaaaacaaaacaaaaaaaaaaaaaagaaaagaaaagaaaaggaaagaatgtatgagagtgtctggttccttgtccctttccaaaactgtcttctcagtttcctaatctgataggtggaagtggtatcttgttttagtgtgtatttcttttcttttcttttcttttttttttttttttttttgagacggagtcttgctctgtcacccaggctggagtgcagtggcacagtctcggctcactgcaacctccgcctcccgggttcaagtgattctcctgcctcagcctcctgagtagctgcgattgtgcgccaccatgcccagctaatttttgtgtttttagtagagatggggtttcaccatattggtcaggctggtctcgaactcctgacctcgtgatccacctgccttgacctgctgggattacaggcgtaagccaccacacctggccagatatattttaaaagtgtttgttagctttctccactcattcattttatggcagaagttgtttccaaacatatcctttactgtgtttcttttttctttttttttttgagacagagtctcgctctttcaccaggctggagcgcagtggcgcgatctcggctcactgcaacctccgcctcccgggttcaagcgattttcctgcctcagcctcccgagtagctgggactacaggcgcacgccaccacgcctggctagtttttatatttttagtagagacggggttttaccgtgtttgccaggatggtttccatctcttgacctcgtgatccgcccacttcagcctcccagagtgctgggattacaggcgttgagccacnnnnnnnnnnnnnnnnnnnnnnnnnnnnnnnnnnnnnnnnnnnnnnnnnnnnnnnnnnnnnnnnnnnnnnnnnnnnnnnnnnnnnnnnnnnnnnnnnnnnnnnnnnnnnnnnnnnnnnnnnnnnnnnnnnnnnnnnnnnnnnnnnnnnnnnnnnnnnnnnnnnnnnnnnnnnnnnnnnnnnnnnnnnnnnnnnnnnnnnnnnnnnnnnnnnnnnnnnnnnnnnnnnnnnnnnnnnnnnnnnnnnnnnnnnnnnnnnnnnnnnnnnnnnnnnnnnnnnnnnnnnnnnnnnnnnnnnnnnnnnnnnnnnnnnnnnnnnnnnnnnnnnnnnnnnnnnnnnnnnnnnnnnnnnnnnnnnnnnnnnnnnnnnnnnnnnnnnnnnnnnnnnnnnnnnnnnnnnnnnnnnnnnnnnnnnnnnnnnnnnnnnnnnnnnnnnnnnnnnnnnnnnnnnnnnnnnnnnnnnnnnnnnnnnnnnnnnnnnnnnnnnnnnttggtttttttttttttaaccatcacttatgaattgttgtggaaaagatgttagagactatttagtgttacatataaagaaagagagatcccaaaaggtgaaataactggttcaagagcatagatagtggaatagggctacaactctgcctctggggctcctagtctagcgtgtttgctagattcacacattaaaatgattctctttgtaattttctttacaaatcatgcaatgtatttaaatagtgaactgatggtaacaatttatagagcaaatctgttgcataaagtagcactttataaatatcctaggtgtgttaatagatattaacatggaagaaagagagcaatatagagaacttctctcccccagcgcccccacttttttaaacagagcatcttagggtattaatatgtaggaaaatgccctggaacactgacacacacatataactcaaaacctaaggaatcactgagccaggttgcaccattggcaggagaagtcatttaaatttggtcactggggctgggcgtggtgactcacgccttgtaattccagcactttgggaggccaaggcaggcagatcacctgaggtcatgagttcgagaccagcctggccagcatggcaaaaacccgtctctaataaaaatacaaaacttagccggttgtggtggtgcacgtctgtaagcccagctactcgggaggctgaggcaggagaactgcttgaacccgggaggcagaggttgcagtgggccgagatcgcgccattgcactccagcctgggcgacagagcgagactctgtctcaaaaataagtaaataagtttggtcacggggaggaaagtaatatttacctggtatatttctcaatgaaaaacttgtgtcatgatccacgtcagtgtttataagtgcctctgcgatggtcctgccaaggtcctttacctgacggcctggtgaaggtgaaggtcagagcaggaaaaacgcaagagtggtgcgcatcccttctgggtagtagtgattacagtctgtaaaagccacaactgacttgaagagctaacttaataatgtaatagttaaaacgaggtcatttattcaccattgaaccttaacaagatatctgcagaacacagcttgaaggggaccgaagacagaacctcttggatgatcttgtaactcgagagagactacttctggcatcctttaagaatgagggtgccgaaccagatctaatcaggtaggatgtttttatttacagggattacttggtgggcgaagacttctttgcagatactacagctgtttcctgaatggcttactttaggaattaatcaaaatctattctattcatttatggtgtttgactataattttctactcaatttagttttcgttaatttttgtttgtttgtttgagacagagtctcgctctgtcacccaggctggagtgcagtggcgtgatcttggctctctgcaagctccacctcccaggtttccaccattctactgcctcagcctcccaagtagttgggattacaggcgcccactgccaccgtgcccgactaattttttgtatttttagtagagatggggtttcaccgtattagtcaggatggtctcgatctcctgacctcgtgatccgcccgccttggcctcccaaagtgctgggattacaggtgtgagccactgcgcccggccagttttcgttaattttctgggtttagtaaaccaggtatgttcagctgaatcccatcttgggtggaacatactaagggagactgtgggtgaagtcagaacatttctttggcattctttggttgagttttctgctttgttaactgccttctaaactcctgaggtcactacttctctgtgtgggcaaagcagttttttgtttttttttttaattggcatattgagaacatgagtcctaataagactggtccggggctcacagaggcaaaggagttggatcctcctccccattcttcgccagtgagtgattcacacttcaaagagctgacagctgctctgagcccggttctgctggaagacctggaggacgggtcgggctttccaaggctgaggttgatgaaccgtaaattgctacctctttagaattggcctccccctgtttctagaacttccttagcttcatcgtgggaaccatcacagaaggcaatgagcttgggtggaaacccgcctctcctcatcttccacgctagggttgatgcatttatcgtggagaggagcttgtttctagttggtttccagttaggaatagtgtggcttcccaagggcagtggttttggaccctagccgtgcattgtcagactccacctctgacaggtgaaccagagtgggattgcggtggaggggcagaggggcagggaggtctcaggtgattctaatatacaacccagattgcaaacaactgcctagaacaagctgaagaaaatgaaactgattttcctgtgggttccagtcttctcaggagcggcgatccaaggttccatgaagaaactgtgaaatacaggaaggtagatgaaatgttaagttgcttctgtgaagaaatgaacctaagagtcagttagggaggggtgatactctgttggcagtctcctgggcagggtttaaatgaagatagaagcctgtgctgggccaatctactgtggttcccaatatttccctggcatattcagtcccagggtacaggggtgaagtatgtggatgaaggtggtggtccaggttggtcaaagagaacaggtgagcaaaggaatcaaaggtgaaaagaaagtactgtcgcctgggtgcagtggctcacgcctgtaagcctagcactttgggaggccaaggtgggtggattgcctgagctcaggagtttgagaccagcctgggcaacaaggtgaaatgccatctctactaaaatacaacaacaacaacaaaaaagtagccgttgtggtggcgggcacctgtagtcccagctactcaggaggctgaggcaggagaattgcttgaacctgggaggtggaggttgcagtgagccgagatcacgccactgcactccagcctgggcgacagagcaagactccgtctcaaaaaaaaaaaaccaaaaaactgtcttctagaaggggctttacactgaaggcagagtctttttagtcaagaaattaataaggacataggtaggacggggagcttgtttcatggaggaatagtggtcatgtagacagatgatggtcagaaagaggacaaaacattcagactattctgcttggtagtgatgaggcagtcgtgatgaatagtcatggttcccatttgagaagagcatgttttgcaccagactctgctctttgcttctcattaattgtgccacttaatgatgctgaaggggccaacctaggaatttaggctgaggacctctgaagtcttcccaccaggtccttgtttgttttgttagtttttggtccccgcttgcctgcctttgtcacccctcttctctgatcatctctgtgtcctttacagtgtgacttgctgataagcagcatcagcatcacctggcagtgtgttacaaactcagaattttccaacccgaaccccaaactacagaattaaaacttgcattctaacaagatcatcaggtgatttgaatgcacattacaatttaagaaataactgctttgtatcatttattccttatttatttatttatttatttatttatttattttttgagatggagtcttgctctgtcgcccaggctggagtgcagtggcgcaatcttggctcactgcaagctccgcctcccaggttcacaccactctcctgcctcagcctcccgagtagctgggactacaggcgcccgccaccatgcccggctaattttttgtatttttagtagagacagggtttcaccatgttagctaggatggtctcgatttcctgacctcgtgatctgcctgcctcggcctcccaaagtgctgggattacaggcgtgagccacagctcccggcccttgtttttttgttgttgtttttgtttgttttgtttttgagacggagttttgctgtgtcacccaggcttgagtgcagtggcacaatttcagctcgctgcaacctccgcctcccgagttcaagtgattctcctgcctcagcctcccgagtagctgggatcacaggcacgcactaccacgcctggctaattttgtatgtttggtagagatgaggttttaccatgttggccaggctggtcttgaactcctgacctcaggtgatctgcctgcctcagcctcccaaaacgctgggattacagccatgagccactacgcctggcctgtgtcatttattcttaatcgtggcactttgcatcagaatcacccaagagagaatggaaaaaaaaaaaaatacaaatgtttagaccatgtacttgcagagtctgattcatagtcttgggtgaggcctgggcatcagtaaggctggggagactaccgggtggttttagtaggtggcagggttagaacgactgctctatgtcacagtgtactagtcatgagacctatagcttatgtctgctatttgttttttatatggtaggcactgtgctaagctctttatgtgcatttgctcaggagctctttataatgccccattttgcagaagagaaacaggctcagagggttcaagattctaaagctaatcagtcatagaacttggattttagctctgaacttgtaaccattgcaccataaaaagagctggatgaggtgttagaaggacccagttctgtagctttctagtctgtcagtcatgtgggctttgaagtcattgaccttagactggggatacatgtgctgcccatttttcgttgttgttaggaccagatgaagtgattgctatgagataggctttgtaaactctaagacctttataaatacaagatgttattactggagcattgtgtctccatccggctaggagggaactcaggctgcctcattgcttcggagatcttctgtccctcgtgccctgccccctgattgctctagaaggacgtggtctgtctgaccccatcatacgctgcacctggtcctctgccctccattctcctcttccacatctcatttgttccgtgtctgcttccctccgtgcccagcttgctgcctattgtcttattagtgaacaatctcatgttaattctagcagtggaatcaacggctgccaatgtcttgtcttctggaggtattttaactgaaacctccttaaaccctaggattgaaaccacagtgaattagttgatgggaatgtttagggaatttggcaggttagtgtcaggtggtttttttggatggaggccttctgaggacctcttgggtcctgccactgggactgccttctgctcttcatgcccataaggctgatccatgtggtggactaaagctgttgcttgttggtgtgttggtgaatggctgagtggcatggggacagagatcatactggggagacactgtcaagcaaaggtaactgaatccctgagggttgaaataaagttactggccagacttatttacatgctctcaagatgaaaccaagggcaacatagagattggtgtatcttttctgttcaggaccagaagtctaggatggttcagaataagcttctagaagaattctgtttaaaaataatgtaagtactgtcaaggagaaatgactcctgtggagtgatttgaagaaggtagacgtggacataacacacaatgatggtccgttctggatgacatggagtctggccaagagcgggaaaccaatgtggcgactggacattgagcaccatgaagaaagaaaatcattgcagatacagagaggaaggagaatgatgtcggtggcctggaaggtgaatttctcattcacttccattggtgattccttgttgggctaggattgctttagacccaacaccgtaacgggaacatgtccgcatatgcttgtccaaaaagtgcaagtcctgtagacattccagagaagtctgatcaataagaaaattcatactagacaaaagcactctcataagctatgtagaaaagtccccgggaaatctgctcaagggccatgagaacaaatacccagctagctagcgttgctccaactagtcagggaagatggcaccatgtggacctatcgaggaccagcaagaagtgtatggaggagtgaatgctaaagctgaagtggactgctggaagtggattttcttagatttgaggtcagagttgctgttgtttgatttccttcacctgcctatgtaagagtattatttttgccttctttactcctaatccccatccttgagacctccccttctttccccaacttctcatacctaatagttctcttgttggacctagccttccaaggactttaattcagttgtaaacatgacttgttcattatatgacatgttcaattacaattcgattgtatccccttccctcctgattgtcagttgcctagtcatttctaataccaactcttagggaacgctcagctctatctatctttggagaaactcattcctttctctgccagttggtttctgtagtatctccaatgacttgcagagatttccttagtcctctctacagttaattcctagttctaggctcctccaacattttcgtttgcttctctaatctctggattcctccagcatttttctttgcttctgtagttcttggttttggggtggggggggtcagttgggttgctttgtcactttgtgagtggagggtaggtgtctttcccttaattcatgacttccagaagcatggtggccagaaagccttgtcagaactttgaaatgttatagacgtgctcactatggcacattttgtcaggaatgctagaccatgaccacaacacatttactgttagagaactggggttaatctgctaatcaacatttccctagtaactggcagcaatgccacaagatctgtttaccctaccaggactcgcttggaacctggtgagcctcccttcctagagcccctacctctgtttccctctttttcatttactttgcacaacgctcttttcctctctttcttccccatccctcattcccgagggcctttccatccctcttttccctcctcttttctcttcttcctcatatgtggccttattaaggagagtcaagaatggtcaaacttcagtttggattagcatttcctttaaacagacattaatgtggcaatcacataattgaatgtatagctgtcatgtgacagaatcttagttttaccttacggattactggtcattattctaaagcagtaagccttggtctaaataagcaatggttgactaatttagggtatttggaaacttgttaaagaagtctctgtgcaacagtgtctcttagaagaagataagccctgtctcataaagcagtgacacagcttctgatttaaaaccctcccgccctttatattcgagagcattgctaaatctcacaattagttaaatctttgcctgtaaagagaaaaaaaaaaaccaaaaccattgcatactccactgctctgtgaccatctcaaagattatgtgattaactcagctgcagtgggtggctaattggctaagctttaatcttcacaccaccaactctgtagaggattatagggaataggaagttgtttagagtttgaggtggtagttgtatgtcaagaaggatatattaacaagcagaccaattgctaaaatcaaaagaagatgataatgaaacgtctacgttttctcagagtgcagatttttaaatttaattttagagataggcttttctcttgcactactgacaaaacatgatatttccaatgtgtatttcatatcagtatatcggtagccaagatgggcaaaagaaaaatttacattaaattctaacattaaaaatgctcctccccatttgaaaccgttgaatgttttatttcaatttaaatgttgatttacaagaaggatgatttatgtcccatagtacttagatttcctaaagaatcattgatttatacttcacattgcttaatgttgttaccacgtgaccaacctactcttctagaagaaggaagttgctaaggaatatacatccatatcataaacccccttctctcttttatgtatgtccctgaaatacagtgacgtcctagcttttctgatgtgcaagggtgtgctgaaatcagtacagatttgctttgtcctctacgtgagtgtaggggcagttgaaccccaaggagttactaagtacagtcaagaatattacagtttcctgctagtttaatgaaaaataggtaaggaagtaaaaatgtggtaaagcaaaccttccttcattaagtagatctttattgagtgcctactatgtgctatacactgatactgggagtgtagtggtaaaaccaaaactacaaaagcacctactttttgcagttgagccatgtacagtccagggagagagacagacatgaaataaagaatcatacaatcagtaaaataagttcaaaaaaatagattgtattttgagagcatattaataggaagctgatttagctagggagactgtatggttaatacttaactgcttttctcttttgcaagtgtatattttgtctcttgatctatattttaaatacctcaaggacagagaccaaagcctagcacaatttttaataagtaattgctcaatgaatgagcgtcttcatgcacttttctgtatcttccgtaacatccagcccagagttgggtatacagcaggtgtgttgttgattcagcacatgtttgttgacagaaagattgactgagccaggacgtgatagactgtgttaacaaacctgcgaatgtcacacttttaatacatgaaagcttttttgcctgcctcgtgtaaagtctgtcacgtaaaggtgactccgagcttcaggttgcttccatctctgggctgtgctctcatgacacaaggcgtgcgtgttccctgtgactggagaagaatgagggtgtggagaactcacatccgtcttctatgccttggcctgcaagtttcacacactcagccccttggccataactagtcacgtggctccaacctagctctgagggcggctgggggatgtagtctttctgtatactcaagaggagggcctggtgaagcatgcagctttgtctctgcctcgctaattattttgggtagtttgatggaaagacaaatagctttggtgcagccttgctgctttcttcttgagcaacgattagaatcagaagttactgaagccacgcaaggtgggctaagaggtgcccatggggggattagtttgtcatttataatgcccgttcttggctggatgcggtggctcatgcctgtaatcccagcgctttgggaggccagggcgggggtggatcacgaggtcaggggtttgagaccagcctggccaacatggtgaaaccccgtctctactaaaaataataaaaaaaattagccgggcatggtggcgggcgcttgtaatcccagctattcgggaggctgaggcaggagaatctcttgaaaccagaaggtggaggttgcagtgagctgagatcgtgccactgcactccagcttgggcaacaagagtgaaaccccatctcaaaaaaaaaaaaataataataagcccattcttgcagagttcagagtttactcaggaaggggaaatgtatacaaagacagatcacagcacagtggaattagtgcagatgggtgtgtagaagtgtgatgaagaccagaagggaaggttgtttcttcagcattcagggaggaggacaaaggagtctggaaaagcaggttgtgcttattgtcctgacccactctgactgacgattgttaagggggtgcctgggtttagctctctagactagtatagcagttggctgctctcaaccacatataacagattaccctgctcaaaatggcttaaatagggaaaaacatcccgtgaagtaagttgcaagttagagaagtgagagggttgattgacagcccagtgatgccgtcagggcttcgggtagttgctgtctcttcatttcccttcatctcccgatactcgatgtcggctttcccttccgagtgactcctctcgtggtctcagaatagctacagcagttcccagccacactccaagcataacaatagaagagaaaggagaatgtgttttgcataagtaatataattcatatggctaagaaatctgcaaagcattgaacaggattcagtgaaaaatcttcccactatgtctccttctcctcaacataagtaattactctcaataatttttggcatatccttctagggttctcttaagcacataccagcaaataggaatatattatctccctccatcttttacacacatggtaacatatcatacatagcattctgcaacattcttttgtcacctgatcgaatatcttggagattttcccaatcgtgacgtaaggttttgtcattagtttttgtagccttataatatttcattgtatgcatttactgtcatttaactaggctcttatatatatgcgagtattgttttcagtctttttctattacaaaaatatagtagagggattttgcatatgtgaaagtatatctctaggtgagttcttagaagtaggatggctggaggatgggcacgatggctcacgcctgtaatcccagcactttgggaggccaaggcgggcagatcatgaggtcaggagattgagaccatcctggctaacacggtgaaaccccgtctctactaaaaatacaaaaaattagccaggcgtggtggcgggtgcctgtagtcccagctactcaggaggctgaggcaggagaatggtgtgaacccggaaggtggagcttgcagtgagccgagattgcgccactgcactccagcctgggtgacagagcaagactccgtctcaaaaaaaaaaaaaaaaaaaaaaaaaagtaggatggctgggtcagagggtatgtgcgtttgtaatttcaatagcatttcacaagttattttctagcggggtagaacccctctagacttgtgccagcaatttaggtgagtgcctgttttccaacagtctttcccaaagaaagttgttaaacttttgtatcctactccagactaacatataaagagagttttatatagtaatatcttagtagagttttatgtaattattatatataactatagtgaaccaaggttataaagaaattctcctgtgcttttttctggtacttctgtggttttataactgttaaatctttgatccatttggaatttaattggtgaagagtatgaatcctacgtttttcctacttggctctattctatttttgtgactgacgatattttttacttagtagttcatcttctcatcttcagatgtaagatgctgcattatcatagaatacgttcccatatgtattttgatctatttctggactttgtaatgtgttccattggtccttctgtctacttatgtgctagtaccacattttctaaaatatggatactttaagttttaatatgtgataggacaaatctgccattaaacttctttttaagagttttgccttttttttttgagacagaatctcactgtgtcgccaggctggagtgcagtggcgcaatctcggctgactgcaacctccgcctcctgggttcaagcaattttcctgcctcagcctcccaagtagctgggattacaggtgcgcaccaccatgcccagctaatttttgtatttttagaagagacggagtttcaccatgttggcaggatggtctcaatctcttgacctcatgatccgcctagctcggcctcccaaagtgctgggattataggtgtgagccaccacgcctggccgagttttgcttattttttaacatgaattctagaatcagctaatgtaattccaaaagagagaacaacttttaaaaacaattgggattgtgttaaatcttgaaatcctttacaatgttgaattttctcatccaagattgtgggatttgtttgtttgtttgtttgtttgtttgtttctccaaggcatttttcaggtctttcagtaacgtcttcttcacaaaagtctaacatgtttttggtcaaatttatttgttttttttttaatctttttggttgctgttttaaatccaggttttttaaattgtacttttctattgttgttgtttatatgaaaactatcaataattaatgtccgttattaatattaaagccattttcttaattctctaatagcttttagcatttttttatcttggctttttttgtatttttcagttatttctttttaaagagcaatgaaatgcttcctggaagctgcctaattgactctggctcaaaatagaaatagactattgtatcacatgatcatgttataccaaaaacgatgggagaatggggttgctgtggttgactaggttagttcaggagggagatattcttgagctgaaaatgaggatgaggttatggtctctgagcagtggagccctgaacaaaattgaggttctgataacaaggaagatgagacatactgatgttgggtaggcaagttgtagtgtctgtatcaacccttctctgcaactccctaagcaatagcaacgctgttcttgaagtttcttgaagaaccagagactcaaggttcaattctttgacctcattaagaaccttctttcttgtcacttctccttttattgaaatcccagagagttagtcactcgctggccttttgggttgttttatttaggctcaagtgaaccttagtcattactttaagtcttcaattcactttttaaagaagctgggatgtttacacctatcacttgtcttcctgaagaggcttaggagaagtacttttgaagtgcaagcggtttttttgttttgttttgtttcgagatggagtctcactctgtcacccaggctggagcagtggcacgatcttggctcactgcagcctctgcctccgaggttccagtgattctcctgcctcagctcccaagtagctgggactacaggcacatatcaccctgcccagctcatttttgtatttttattagagacggggtttgaccatgttggccaggctggtcttgaactcctgaactccggtgatccacctgcctcggccaccgaaagccgtggcattacaaggcgtgagccatcgtgaccagcctgcaagcaattttaacgtgacacattgatacagtttcatagagctggtttcttctgcagacagataatcttgtatatattttgttaattcttgtttaattctattttgagaagtagtagcttctgactttttctacacattctggtgaaatgttaatagataatttggtgcaaggactgatagaatgacaaagggagtatttgaagtaggaactgataaaaaaaatttggaatatatgttgccttagcacatttttttccagtctttatgctgcatcatcttttttttgcttcacagtatatattgaagacgatgaagcagaatgtttagggtaatacgcttaactaatggtctgataccagccatataatgtgtacagtgaccatgtttttcttggagagagaaactagatatgtcatatgatgaggtattttttgggactcttcttggtggaagagtcggtttggttgatagtgttaggtcaaaatgttgaccattccagtggtttatgggaatgaatatttgtttttgaagaatgttttttaaatataaatttatttttaaagtaatttgttacattgttaaactgtacaaaattgtaatcaatgaaaattcaggctctttctacttctcacctacagtttcccattttcttccccagaagcagccacttttaacagttttctgtgtgtgtgcccttccagaaggattctacacgtatccaaggatacatgcacgggcccatatccccagtctctattccaacttgtttgtgttttttaaaaaaacaggaattataatataatatgcattctttactgcacgtcatcttttttacttaacagtgtatcttggagatgacgaagtagaaggcttaaagtaatactcttaagtatcttgaaactaccttcgaacttgacagagtagctattcgaagtttttaggttatgtatgttctcacaagactgattatcgccagaagagatctctgtagctacttagtccggatttttttttttttccctcaccatgggataggaaaggaagctctattaacagcctgacttccaaatagagactaaatgtaaagaaagattatctctttggatgactgatggagcaaagaaaaccagagaccttgagatctgaacaaatggtcattgcaactccatgtcattgatcaagtcaagaaaggtatccagccattaccatgtgaaagaaaatgaagcacagcctgtccacacgtggttagcagtagcaacctggtagtttctctcctcagaaggttttaaaagctagacaacaaagaaaaatcaaatgaaaaaattttaaggctgctgtcatagtactttaaaaaaaaaacatgaaatctgtagaaataagtaaaatgaaagatgtatgagacttctacactgaaaactataaaacattatttagggaaattaagtaaagctgaagagataaataaagagtagtcccctgcttaagggcagaggacacattctaagaccctcagtggattcctgaaagcttgggtagtactgagccctgtatatgctatatttttacttgtgaatatatacccatggtaaagtttaatactgtaatggaagttatgagaatgtggtctctctctctctctctcaaaatatcttattgtctataatattttcggagtgtgggtaactgaaactctggaaagtgaaactttgagtaagtcggggtggggtcttaccatgctcagatctcttcagtctctgtgccttgttcagagattgggagactcaatattgtaaagtcatcagttccctcaagattgatttatagatttagagcaaacccacttacagtccccagccagatttttgtttccgttttgccacttgagaagctgattacagccactgtttatatggttaatgcaaagagataagaagagctgagacaatttttaagaacaaaaaggccagaggactcacatgaccagttatccagactcaccacaaagctgtagtgtggtgttagcacaaggataggcagataaacccgtggaacaaaagagagggttcagaagcagtctaacacatatattgtcacctgatttatgacagaggtaatcttttcaataaatggcattatgtcaactggatatccacatggaaaaaaatgaatcttggcctctgctatcaccctacataagaaataattccaaaaggattatagatctaaatgtgaagggttgaaccagagagcttttagaagaaaacaggagaacatttttatgatcttgggatagccaaagatttcttaaacaggccacaaaacatactaaccataaaggaaacaagtgataagttggatttcattaaaacaaaaaattctttttatcaaaagataccacaatgattgaaagacaagtcacagaatgaaaatctgtatttgcagggcatatattaatatttgacataggaaatgtatcttggatatatgaagaatccctataagtcaagaaaaaggcaagcaacctgttagaaaaacataggcaaaagacttgaatttcacaagaggatattcaatggttgatgaatgtaagaaaaggtgttcaacttcactagtcatcaagtaaatgcaaagtcaagtcacaatgtcattatactacaagaatggctaaaattaaaatgacagacatgtcaagtgttgctaggatgtggagcagctatagttctcatatactactgctgggactgtaaattgtacaatctctttggaaaaccatatttgctgaaatggaaaactgtatttgctgaaatggaactatacaaaaggcacgtacaagaatgtttatagcagtgctgtttttttttttttttttgagacggagtctcactctgtctcccaggctggggtgcagtggcgcgatctcggctcactgcaagccccacctcccgggttcccaccattctcctgcctcagcctcccgagttgctgggactacaggcgcccgtcactgcacctggctaattttttttgtatttttttagtagaaacggggtttcactgtgttagccaggatggtctcgatctcctgacctcatgaaccgcccgccttagcctcccaaagtgctgggattacaggcgtgagccactgcgcccggcctagcagtgctattttttgttttgttttgttttttagagacagggtcttgctacgttgcccaggctggagtagagtggctattcactgatggaatcatagtacactgtaacctcaaggtcctgggctcacgcgattctcccacctcagtctccagagtagttgagactacaggcgtctctgtttacagtgcttttcttagtagtctcacctggaaataatccaatgaacatctatagtataatgaataaatacatgatggcatattcatacaatgatgtcacacagcaaatgagaattaacaatctacaactgtacaccacactatggatggatctcagacatcatgtcagacagaagagtttacacagttcatgctatatgatgccactcctataaaggtgagacttacagtgttataaatcacgaaagcggttccctttgggggaagtagtgactagaagggtatatgacagggctcctggggttctggtaatactctttttcttgctgtgggtagtggttaactgtgggtattcactttgtgaatcatctttgagctgtacactggggatttttctgtttgtaagttctacttgaattaaagaataagtgcaaatatgtgcatttatatactacatgtacatgtattacacatgtgagtagatatggttatatttatatacatacatatttgcatatatttgcatgcatatgcatacagatacacacacatgcgtgtgcgcacccacacactctctctctctctctctctctaagagctatgtcctgaacagaccacaagatggagatgtaagtcaacagaagggcaaacttagcccatcccagttgctagattttgaaaagttagggtttttctccctataaagttaagacagaatgttaagattgctggtattaatactgcttaactttaggaaaggaattatatcaccctccagttctttctgtaaccgtttccctcttccctccatgtccctgtaagccagtttgtcatttttatatttcccccgtaatgactctgtaggttctgcccgatccccacttcatttattcttgtttctttctctctctttcgccttcttttcttgcctttttctttcatatttttctcttgtatttctctttccctctggaaaaatatgcatgattttggcatttcttgattttagtttttatctcctattcttaattttttttttaacgaagagggatgcttttaatacctctttctaatagtttctacttaagttgtcatttattttgtagatctttgttttcctattttcttccctttccgtattccctccctgcttccatcatggggaaatgaccctgtaattgggtttaaaataggcaatccacatgatacatgcacattataacaagtcaaaaaagccaggcgcagtggctcacgcctgtaatcccagcactttgggaggttgaggcaggcggatcacgaggtcaggagatcgagaccagcctggacaacatggtctctactctctactaaatacatctctactaaaaatacaaaaattagccgggcatggtggcacgcgcctgtaatcccagctactcaggaggctaaggccggagaatcgcttgaactcgggaggcggaggttgctgtgagccaagattgcgccactgcactccagcctggcgacagagcgagagtccgtgtcaaaaaagtcaaaacataccaatgtgtaactcaaaagttcatactctctctccctttctgcccctccagtgcctttctcctcaagtaaccaggattggctgtttggagtttcccttccccacatttatctatgcttatacaactataaatttacaaacatacatacctaaaaaaagttttcctttcctatttttaaagaaaacagaactgtactatacattttcctctgtaattttacttttcttcacttaaatttggacattcctccaagttgatgtgtctgacaaattcgtcagttgtattccacaatataaatatgcaggcatttttccagccactccccatttgatggacgttgggttgtttagttttttgccattacaacgagtgctgcagtaaatattcttaaagaccatggcttctatttctttagcaatagagtcctcaaagtggggttactgggacaaaaggtatgagtgttaaagatgtaataggtaccaccatgtctttttcttaaaagttgtggcatttacattcccttcagcaatctgtgtgagggcccctttccttaaaccttagctgtcagtgggcgttacagaacttgatggattttgttttgttgctctgatgggtaaaaaatggtatcttcttttgaattgcagcccttaactactggtatagttgtgacttttggtatggaaaataaaaacattctttgcccctgcatgtattaattttaagtctttaaaaaaatcatttgagaattgaaaaagaaggaaaactccagtttctgaataaacgggaagaagaaagtagaattacctaatcacgctgtattttagttcattatgttaattttaattttaatttttttgagacagggtctcgctctgtcacccaggctggagtgcagtggtgagatcacagctcactgcagcctgcaactcctgggctcaagtgatcctcacaactcagcctctcaagtagctgggaccacaggcacatgccaccatgcctggctaatatatttttattttgtagagacagggtctctctctgttgcccaggctggattctaactcctgggctcaagcaatcctcctgcctcagcctctttttttttttttttttttttttttttttgagacggagtctcgctctgtcgcccaggccggactgtggactgcagtggcgcaatctcggctcactgcaagctccgcttcccgggttcacgccattctcctgcctcagcctcccgagtagctgggactacaggcgcccgccaccgcgcccggctaattttttgtatttttagtagagacggggtttcaccttgttagccaggatggtctcgatctcctgacctcatgatccacccgcctcggcctcccaaaatgctgggattacagatgtgtgaactatgcttggcctcattacgttactttttttttgtttttgtttttttgagatggagttttgctcttgttgcccagggcagagtacaatggcgtgatgtcagctcaccgcaacctccacctcccagcgattctcctgcctcagcctcccgagtagctgggattacaggcacgcaccaccacacctggctaatttttgtatttttagtagagacagggtttcaccatgttggccaggctgttcttgatttcctgacctcttgatcagcccatatcggccccccaaagtgctgggattacaggcgtgagcctgttaattttaaaaaatgtttccaacttgtgttttctttaagtaaaaatttttaagaaattaaaaagcctgttcttgtttgttgaaaataaaagttatttctccctctttctcttctctgtttaccgagcaatttttgatatattacagtcacccctaagcatacatgagtgttggttccaggacgtgcatgtaggatgcatgtggagtggcgggcgggggcggtcttaggcctcaacgctcccatgtgtgtttgacttttttctttctgatacggtgttataactcaagcgattacttttttggtttacaaatgaggagactgattcttagagaagtcgttgtgcccatggtgaatcaatggaagagagagaactagaacccaggtcctctcatcctttgccctgggttttgtcccttgggctttgtctctcgtacttttgaaatcttaccatgattccctttcaggggccctcatgtattcctttcccactggctttgaatacttcgtctttcacacttgcagggacagtattaccctgttcgtagggacagtattccaccaggtgttcaagtgtggcatattgctaagtttgccttgtgtcattctgtggaaggagcaaaggatttggtattagacaaccagggtttgagttttaactacacatcattgtcaggaaaatgaaggtaaccatgattcctcaaactgttgtgaagttcaaatgagataaatctatgtggaggctctttgtaaactggaaagtgttctatagacattaatgaacgatagcactcaccgtcttagcagaagggagtacagagatagcaggccatgtggggatgtctttctatcttgcacaaaacaactctggaccatacatgatagtgtatagtgaaatgccactttgtgtgatatgagccataaatgatctgggagattagaaaatggagaaatctgggccgggcacggtggctcacgcttgtaatcccagcactttgggaggctgaggcgggtagatcatgaggtcaggagatcgagaccatcctggctaacacggtgaaaccccgtctctactaaaaatacaaaaaattagctgggtgtggtggcgggcgcctgtagtcccagctactcaggaggctgaggcaggagaatggtgtgaacccaggaggtggagcttgcagtgagccgagatcatgccattgcactccagcctgggcaacggagtgagactccgtctcaaaaaaaaaaaaagaaaagagaaaatggagaaatcaatgtgggcagtggggggaggctgagaagaccatgtatttataccatgtgttttctgtcttgcgtactttcttgaatcctgctttttcaagggtggtagtttctataccagtctgcacattggtgcccagctgattgcataaaagtcacctgagggagcttatacattcctgggccctgctcacagagggaaaggatgacatagttaaaagcgtgggtgttggccaggcgcagtggctcacgcctgtaatcccagtgctttgggaggtcaaggtgggtggatcacttgaggtcaggagttcgaaaccagcttgggcaacatggtgaaaccccatctctacccaaaatacaaaaaattagccagacatggtggtgcatgcctgtagtcctagctactagggaggctgaggtgggagaattgcttgagcccaggaggccgaggttgcagtaagtcaagattgtgccactgcactccagcctgggtgacagagtgacaccccatctcaaaaaaaaaaaacagagtgagaccccatctcaaacaaacaaaaacaaaacaaaacaaaacaaatcaaaataggtgtccatctcgataatttgctttcttagatatgaagtagatgaattggtgtaataatagcaaatcaaggttattgaggtggaagtgatggctatgtaggcagtccttgacttttgtatgtcttgaatggtatgcattattcattgacaccctttgccatggtctgaatagtagtgtcctcccaagattcatatgttagaacctaatctccagtgtgatagtattaagaggtgggaccttcggggaagtaagtcatgaggactctgccctcaagaatgggattagtgcccttataaaaaaaagattgaagggagcttccttgcccctttggacatatgagaacatgtagaaggcaccacccatggagcagagaaaaagtcctcaccagacaccgtatctgcttatgccatgctcttggacttcctggcctccagaactgtgagcagtaaatttctgttgtttataaattgcccagtctgaggtatttggttatagcagcctgaaaggactgagacagaaattgataccgcaagtgggtagaaatttgtacatcatgtgttgtttttcctccttgtgtatcttcttgaatcctgtctttttagaacagtaatttccatatcagtccgcacattggcacccaactggttgcataaaagttacccgagggagcttacacattccagagggaaaagatgccagaattgaaaatgtgggtgtccatctcaaaatttgttgtctttagacatgagttagatgaattggtataataaacagtaaggtcactgaggtgaaaaatggacgatgtaggtggtccttggcttttgtgcatcttgaatgcataagcattattcattgacactcttaaatggccttttaatgcctaatttggatttttgtatatcagctgccaaacacacatttctattaatattattgatggtggcactgcttgccagctgataattttgtttcactgaactcacatctttgttcatagaacagtattgatttgcacaattggttgaatattttattgcattttacctttactttataaaatgagtgagaatggaaacaagtacagtaaagtgaaaacagtaatgttgagacaaagatggaaatcattaggtatgccgaatgcctaaagcaaatgtagattgctcatcttgactggacactcaacggatttatcataactgtgtttggttgtgaagaaccaactggaagaagatggagagttgttattgcagatggtgtcaaaaaggcatggctctaggaacaccaactccctcatattatataagttctgttgacttttgcgcatttgtttctctttaaatatatatatgtgtgtgtgtgtgtatatatatatgtacatatatatttaattgacatataagtgtacatatttatggggtacagtgtgatttttttttttttttttgagatggagtctcgctctgttgcccaggctggagtgcagtggtgcaatctcggctcactgcaacctctgcctcctgggttcgagtgattctcctgcctcagcctcccaagtagctgggactacaggcacatgccaccatgcctggctaattttttgtatttttagtagagatggggtttcactgtgttagccaggatggtctcgatctcttgaccttgtgatccacctgcctcggcctcccaaagtgctgggattacaggtgagagccaccgagcctggcttacagtgtgatattttgatacatgtatataatgtgtaatgatcaaatcagggtaattagcatacccataacctcaaacctgtatcatttctttgtgttgataacattcataatcctctcttctagctattcaaaaaactgtaaattatcatttgctgtattcaccttagtatgccacagaacaccagaactcacttctgccatccagctgttccctgtctcccttaaccaacctttccttcccccaacctcttgcccttcccagcctctggtaaccactatcctactcactgcttgtatgatatcaactttttttttttgagatggagtctcgctctttcgcccaggctggagtgcagtggcgcgatctcggctcactgcaagctccgcctcctgggttcacgccattctcctgcctcagcctcctgagtagctgggactacaggcacccgccacatgcccagataatttttttttttttttttttttgtatttttagtagagacggagtttcaccgtgttagccaggatggtctctatctcctgacctcgtgatccacctgcctcagcctcccaaagtgctgggattataggcgtgagccaccgtgcccggccgataggaaacttttttaagcttcctcacaggagtgagaaccagtgcattgtgtttctaagcatgttgcatgcatcatgtaatagagaagctgcctgcaatagttggccctcctggactgttgtaactaaactgtaaccagcagatggctctcagtcaccataaatatggtagagcagctcattcatcttttacttggaattcttgttttttgtgtatcacccctttttgcccctcttctacttttaaggtaccatgatttgcaaacatttaaggtacagaagtgttccttttggttttgttttttgcttaagatggcctgtgtgactctcaggagcagtgccctggggttttgaaatttgagttggagacccaaaaaaatgatggccttttctaccctgtatttctattcttctgtgaactgtttcatcaaggttttcatttagtgttaaaactttttattggtaaatttggcaagcaatgaataggaaaaaataggattgcttttaaattagaacaatatttgattgtaatagattttaaaggtgctatagtgaaatttccttggatattatgtaaggaagatattttccttgttctgattcttatttgttctggactaatactcaatggagattattcaatttgaacaaaaaatattttgagtatcaactttgcagtcggcacaatgttaggcatttattgtcccttgagtattagctccatgaggtcaggtatttatgtctctcttgttcacttacaagtcactagattagtgcctgatacatagaagatattcagtgtttgtcagatggatggatggatggaagggtggatgggatacagaaaagagtaggacagagtattggactgaaagatgttaacagtttagtaaatatggctacagatattcctacataatcatgatctcttgaaggaccagtttaactctgggattgttattaagtgctgtgttgaaaattgaaaggtaatgaaaaaatttccttttcctgaagtcgtgtcaatttcttcaagtcacataggtttggcaatctttattccctatatccagtctattcatcaacacttgtggaatttcccttgagccactatgttaattgtccctttctctctgttccctcttgtcacttcccttgtccagactcctgttacctcccacctaaattaccacactggccttttggcctgcctctctgactgcagcctctcttccgtgtaatccagtctgcgtattgttgccagacttcgtctctaaagaatttctgtcaaagaatctatttctaattgaaatttgagcctctgtgcatctttatattcacagaaaggaactaccaaaaaaagttctgaaaaaggaattacccttttatatcataggagtgttttcaaatctataggcaagtctagttacgaagctttgcagactcagctcactcacaccccagaaatatcttccctcatcctaactgcaaacctccctgtggtctgtgaatgcccaaacactgatattttttccagacaaaacaaacattttatatagtcactttgacatctttttgaaacgctaagaaaggctaaagaaagctacttcttggaattcactgctatttcaattctgtattcagttgataagaacgcccttcctatgaactctaacaagcttcaacttcatttgtctgtagaaagacatggattgtctgtgcacccccccgatattatcataatttaaataatgtacatcattttctttgggggatgaaaatgaaatcattttatgtctttagaagtgattgtgaaactttttggttaaatcttgataagacaagatatctaacgtatttactgatgtggcatttatttgataagtttcatttatttgaaaagtttcatcttgaaataatatggatagaaatcatttattaaaaaaattcaagtctgttctaagctcagaagcatagtatttagcatttcctttctttaatttcctttgcagaggaaaaatgcctcttacttgtcatttccaaaagtgaggctgagctacaaggtgttttactgaccaaattccctttcaagtaattctctccatctgctcaaacagtatcagtctttgctgctgaagtcttgaaggcaggtagcagttgattaagttttgctttgcttgatttttaaaaaacatttcaagataaaaatgttaaatgcttctctcattttgtttttaagaaagagagcttaaaaacctcaatggttttcctagttctggttcataaacatttactgaatgcttatgctctggcatattccgaggctctgtgttttggtcctggggatataaacataactgtcatgtggcctcttccctcacagagctcataatttaggaagggagacagatgagtaaataactaactacaatcccgcttgataaatgccacgttagaggttgtgaacatagcaccatgggaataccagcgagtgattgattcaagggaagggggatggggctagggatcaggaaagcctaagcagcagaattgacatttgagttgaaccttaggggaatgaatagaattttgccagatggacaaagggggtgggggtggggacactccagactcatgcaaaaacatgagagtgtgaaagtttgtgcctttgtctgagcggtggggagcagtctggagggccgaagtagggtgtggaaggggggatgttgaggagatgatgtcgtagagagatcgtagccatgttgtagcttctggggagtcagggaagtttttgaatagggaagtgatagggtgagatctctgttttaagaacaataattcttgcagcagagtgtaggatgatttgaatgagggtaactggggacaaggagaccgatcagaaggctgtaaccatgttgtacatgagaggtgatgggtgtctgagccaaggcagtaccaatggggagggcagtcagggcttggatgtgagaaccatctctgagggaggccttgtttgttgatgagatgtggttagaagggagaccaaaaaaaaaaaaatggcttggatgacttgggaatacagtgatgctgctcaccaaaatagagagcgtacgagaagaagcagcttatggggtgagagtcatgaatttgattttggatatgttgagtttggggaggaatacccagttggagatttttaaatgaaaagacacaaatgcagataaagaacctgtagggagatattatgggtagagacaaatttgtaagtctgtttagcaccgtgattttcaatcaggtaaggggtgggaggacgtgctttgcctgaatgtttttatatgtggggtttctttttaactatttgtgtgctactccccccaaaccctccagattctggtattgtcctgctaggaaggagagcacgtccctccccacccctagttcagaattcaccaccataatgactcaagggaatgtgtctgatttcatatgtgctgggcatagaatgaatgtctttaagcattgctagcatttattcttttttttttttttttgagacggagtctcgctctgccgcccaggctggagtgcagtggcacgatctcggctccactgtaacctctgccttccgggttcaggcgattctcctgcctcagcctcccgagtagctgggattgcaggcgcccaccactacgcccagctaactttttgtatttttagtagagacggggtttcaccatgttggccaggctggtcttgaactcctaacctcgtgatctacccgcctcggcctcccaaagtgctgggattacaggcatgagccaccacgcctggctgctagcatctgttcctacagcctgaagcccctagcacagatagacttgcccagagaaacacaataccgtgagaggagcagatctaagtcgaattcccaaggaacccacatttcagaggcagatgggggaagaggtacctgcaaattatagagaaggagctgtcagtgggagagagtggtgtggaggaagccaagagaggagaggattcatggaaagggggataataagcttagctgtgacacatgaggcctggaagaggggtctggtaaggcctggaggaggggtctggtaagacctgggaagagtgtttggcagtgaggaggctgtgagtgagaagattttggtcgtgcaggggtagaagttggcttgcagtgggttgaggagtgaacgggggtcaggaagtggagttggtgagcataggttattcttcatggaagtttggctgcaaataggagagaaagtcattgcttgaggatttataggatggagaagaactagtagaaagttaaaattatgagatcctgggataataggaggataagttattagaacaaatggagggtcactgtagctacctacctcggaattaattctaaatctagcccccccaaattttgcccactctccactcttacatcacacatgtttatgtggtacacattcctggtcctggagactcattcgtgtttttgccttttcttggaatgccttaccatctcttcctttcttcactaaacctcacgcattcttcaaggctgccttaagtctctttgcctttttttttttttttttttttttacaataggggtcttgctttgttgcccaggctggtcttgaactcttgggctcaaacagtcctcctgccttggccttccaaagtgctgggattacaggtgtgaactactgtgctcaacctccttacctttatgaaacctctgaagtggtagaaaggaaatgccttgggttaagaatcacaagatgtgggctgaacccttagctctgccactaggtgggtggccctgaggaagccactggatgtctctgccttagttttcttgtcagtaatacctgtgctgacttacacacagggctgtgtgcgattcacatgagataatgtttgtgaaatgcctttgaaatcacaaaacatattatagcaccaatgtgtgatactgtaatttcctgacaactctccttattgatttcattcatttatttatgggttttgctgaaaaaataattaattccatgtttttctttcagtgtccattatgccagccataatgtgataaaggatggagtgataagacctagtccctgcccttgtggagcttatagtctagcgtgggagacagaaaacaaacaaatgcataatggctggtgacttcagtgctataaagaaaaattaagcaagataaggaggagtggggtgaaggagtgacagagacagatgttattttagatggaggagtcagggaaacctctctgaggagacaacatttgagaggagattgaaaaaatctaattcacaatttgcaacaataggaaatcatcttttgcaggattaaaaagaatatctgctttctcccaccaagatgagtcttccccacttactccccaatgtcactaataacaagggtatcatatcctcaagtgttgggccagaaagaaggttgaaaaccattggcccacttagtttgcttgttttatgggtgagaaaaccagagctgaagaggtttttggaattgcccaggagggatacaaagctagatgctctcttattttaactagtgtgcttcatgttggtgagtttctcatttcaatttgattataaactccttgaaagcaagaattatgttttcatattatttttcgtattttcctagtacctagaacagtaataataggcaccaccccaaatgttaaattgaacataaaaccaaatgaaaagagaatcgggtgtacatccagggatacctatgatctcatgatcttacctgcttttctgagtgaaggtcagtgagtgaaattgctggatttcctcataggtttggggcatcaggaaagtagnnnnnnnnnnnnnnnnnnnntactcattttgatggtcatagctggttactaatgcactttcaaagtatctttacatacctctgacccacttgcatttgcagtaaaccatggacaaatcctgtgtaattcctgatttgaaaagtggctcttgcaagatgatatgagagttgggataggctttgaatgtgaattttcttctttccttccctttcctattgcattcttcccccttcttcgaaggtacgtgaaattgaataattattatagagaagaaatccaaaatcttgacatcttggctatttggtgccaatggcataaagtaaggcttccagctgggcacagtggctcatgcctgtaatcccagcattttgggaggccaaggtgggaggcttgtttgagccctggagttcaagactaacttgggcaacatagcgagaccccatctctacaaataataaaaataattagccaggtgcagaggcacgcacctgtagtcccagctactcaggaggctgaggtgggaggatcccttgagctctggaggtcaagggtgtggtgagagatgattgtaccactgcactcccgcctgggtgacagagtgagaccctgtttcaaataaatgaatggatgaatgaatgaatgagagagagagagagagagaaagacttcaaagaaacacacctgtcgttttagtaaagtggaagaaagtcatacttctgtttggcatgctaattagtatacttgagaccaactctgtgcttaaaatcttagtctaaggaatcaaaaattttcttccagttttgcctgggtttgtctcttgctacatgaaatagtcttccaaaggctttaaagttctaaactaaaagtgaaattaatatagcttttgtgatatacagatttatttaaaattttttagtgccttctgtgtaaaaaaatgcaataattggtattatgatagtagttaacatcttccaagtacgacattagacagtttgcacacattttacacattgtttcatcccaccagaatgcaaacagcaccgataacaagaatctatgctttgtatgggtggagattttggtccatttgtctatattctattttttcttcatgcccattaatgagagcaatgccgactatataataactacgaagtaaatgtttttggaatgaaaaattattgaatcctccagctactttctgttcatatgttgccagtaggtgatatgctattagctgttcactccatattgtgggacagcgtgtgtacagcgaagggtgattttcagtttctgccttctgtctagtggatatgcaccttatctatataaaaggttaaataatagggtagcaattgtttctggatgatatgggagatgtgaacaaggctagaagaattataaataatggagatatgagtgaatatatataaatcacctggagccgtgtctgtacagggcaaatgcttactgcatgttaactgttgttattgctattgtaacatcattgtcatcattttgttttttgtttgtttttgttttgtttttgagatggagcctcactttgttgcccaggttggagtgcagtggcgcaatcttggctcactgcaacatccgcctcctgagttcaagcaattcttcctgcctcagcctcccaagtagctgggattacaggcgcccgccaccatgcctagctaatttttgtgtttttagtagagacagggttttaccatgttggccgggctggtctggaactcctgacctcaggtgatccacctgcgttggcctcccaaagtgctgggattacaggtgtgagccaccgcacccagcctatcattttgttttaattgacatataataattatacatatttatggggtacatagtgatgttttcatacatgtaatatataatgagccagtcaggataattagcacattcataatctcaaacatttttcatttctttgtgttgggaacattctatatcgtccttctagctactggagactttattgttaactgtagtcatcctacagtggtgaatagaacactcaaacttattcctcctgtccaactataattgtgtgtcccttaacaaatctcttgctctcccccttctccctactctccccagtttctggtgtgctctgttctactttttacttctatgagatcaacttttgtttttagcttctgcgtatgagtaagaacatgcagtgtttagctttctgttcctggcttattttacttaatataataacgtcctccagctccatccatgttgctgtgaatggcaggattttattcttttttatggctaaattgtattccgttgtgtatgtataccacactttctttatccattcatctgttgttggataggttgattccatattttgcctactgtgaatagtgctgcagtaaacatgtgggtgtggatatctcttcaaaatactgattttctttcctttggataagtgcccagtagggggattgctggatcatatggtagctctagttatagttttttggggaacccccatactgctctccatagtggctgtactagtttacatttccaccatctgtgtataagagttcctgtttcacaacatcctcacaagcatttattttgtgtttttgatgatagccattctaagtggaatgagatgatacctcattgtgatttggatttgcagttccctgacgattagtaatgctgagcaatttgtatatatttgttggcgcatttgtgtgtcattttttgagaaatgtctggtcagatcatttgtctgtctttcacatattttgtgtatctttttttttttttttttttttggaaatagagtctcactatgttatccaggcttaagtaatcctcccacctcagcctgagtagctgggactataggtgcatgccaccatgcctagctcatttgcccatttttccatccaattattattatgatttttgccattgagatattttgagttccttacatattttgcatattaatcctctgttggataaacagtttgcaaatattttctcctatagattgtcttttcactctattgactgtttcctttgctgtgcagaagctttttagtttgttgtaatctcattcgtttctttttgcttttgttgcctgtgcttgtgaggtctgactcataaaatcttttcccagatcaacatcctgaagtgttttccttgtttttgcctggtacttttatggttttgggttttacatttaggtctttgaatcattttgagttgattttttccttagggtgatagatgggtgtccaggttcattcttatgcatgtgcatattcagtttcccaacaccatttattgaagagactgtcttcccccagtgagtattcttggcacctctgttaaaaatgagtaggcttggctgggttcacatctgtgatcccagcattttgggaggctgaggtgggcagattggagtttgaggccagcctgggcaacatggtgaaaccccgtctctacaaaaattatctgagtgtggtggcgtgtgcctgtaatcccaactactcaggagactgaggtgggaggctcacttgagcctgggaggcacaggttgcagtgactcaagattgcatcactgcactccagctgggttatagagtgagactctgcctcggaaaaaaaaaaaaagatcagttggctctagatacatggattaatttctgggttctctattctgttccattggtctgtgtgtttgtttttatgtcagtatcataaaaacagcattgtagtacattactacagctttgtggtatattttgaagtctggtagtgtgatgcctccagctttgttctttttgcttaggatcgcttgtctcttcagggtcttttgtggttccatgcagatttttaagatttttttctattgctgtgaagaatgttattggtattttgatagagattgcattgaatctgtagattgctttgggtagtatagtcattttaacaatattaattcttccaatccatgagcatgaaataactttgcctttgtctgtatcctcttcaatttctttcatcagtgttttgtagtttttcttttagagatctttcacctccttggttaaatttattcctaggtaattttggcggggggattgctattgtaaatgagattgtcttcttgatttctttttcaactagttcattatttatagaaacaccacttactgatttttgtatgttgattttgtattctgcaactttactaaatttgtttatcagttctgagaggtttttttttggtagtctttaggcttttctctctataagatcatgttttctgcaaacagaaacaatttgactttctcctttccaattttaatgccatttattactttctcttgtctgattaccatggctaagacttccagtactgtgttgagtaagagtgatgagagtgggcatccttgtcttctagttctcagaggcaaagctttcaccttttctgtatgatgttagctgtgggtttgtcatatatggcctttattgtgttgaggtactttccttctatacctagtttattgagagtttttaattgagatgttgaattttatcaaatttttttctgcatctattcagattatcatgtgggttttgtcctttatagttgatgtgatatatcacatttattgatttgtgtatgttgaaccattcctgcattcattggataaattccacttgatcatggtatattatctttttgatgtattgttggatttcatttgctagtattgaggatttttgtgtgtatatttatcagggatattggcctgaacttttctttttctgttgtattcttgtctgcttttgatatcagggttattctggcctcttagcatgagttaggtagaataccctcacttcaattttttggaatagtttgagaagaattggtatgcatttttctttaaaggtttggtagaattcagtatgaaagccattcagtcctggacttttctttgttggcagattatattattgattcaatctcattacttgttattggtctgttcaggttttaaaaaaatttcttcttggttcaatcttgataggttgtatgtgtccaggaatttatccatttcctctaggttttttaatttattggtgtagagttgtttgtagtatcctgtaatgattctttgtatttctgtggcatccattgtcatgtctcctttttcttgcctgattttatttgtttgagtcatctctctttttttcttagtctagctaatggtatctcaattttatctttacacaaaaccaacttttattttgttgattttttaaatacattttttatttcaatttcatttatttctcctctgatctttattatttctttcctttactaattttgggtttggtttattcttgttttcctagtttccttgagatacattgttagggtatttgaaatctttctagttttttattgtaggcatttattgttatacacttgcctcatagtactacttttgctgtgtcccataggtttcggtatgttgtgcctctattttcatttacttcaaggaattttaaaattccattcttaattttgtccttcactcactggctgttcaagagcatgttgtttaatttccatgtgtttgtatcattttgcatgttcctcatgttattgatattttccactgtggttaaataggatacttggtatgatttcaatttctaaaaaaatttttgagacttgttttgtgtcctaacatatggtcagtccatgttctatgtgctgttgacaagaatgtatattctgtagctgttgggtgaaatgttccataaatatctgttaggtctgtttgttctgtggtgtagtttaaatatgatgtttctttgttgattttctgtctgaatgatctgtccaatgctgagagtgagatgttagaatctccagctattactctatttgagtctatctctccctttagagctaataatgtttgctttatatatctgagtgctctggtattgaatgtgtatatatttacagttgttacattctcttgttgaattgatccctttattattatgtaatgtccttctttgtctaatttcacaacttttgacttgaagtctgttttgtctgatataagtacagctactcctgcttgcttttggtttttgtttgcgtagaatatctttttccatacctttgctttcagtctatgtgtgtctgtaggtcaggtgagtttcttctatgcagcatatagttgagtctagtcttgtttttttttttttaatctagttatccagtctatgtcttttaatgagatatttaattcacttacattcaaggttattattaataggtgaggacttatcttgtcattttattgttttctggctgttttctatatcctttgttccttacttcctcttactgtttatttttgtggttgggtagtgttctgaagtgataaggcttgatttctttctctttttcctttgtatattggctctaccagtgagttttatagtgtcacatgtttttataatggctgttatgatcttttcacttccagatgtaatactcccttgagcacttcttgtaagactggtctagtggtgatggattaccttcgtttttgcttgtctgtgaaagattttatttctctttcatttctggaggatatctttgctgcatgtaatattcttggttggcagattttttttttcttttagtactttgaacataaaatcctattctctcttggttggtaagatttctgctgagaaatctgctattagtctaatgggaactccctcataggtgatttgatgcttttctcttgctggtttctttttgtcattgttgtttgtttgtttttgagatggagtcttgctctgttgcccaggctggagtgcagtagcgtggtctcagctcactgcaacctccgcctcccaggttcaagtgattctcctgcctctgcctcctgagtagctgggattacaggcacctgccaccatgcccagctaatttttttgtatttttagtagagacagagtttcaccatgttggccaggctggtcttgaactcctgacatcgtgatctgccagcctcggcctcccaaagtactgggataacaggcatgagccaccacatccagtccttctcttgctgtttttagaattctttgtctttgacttttgataatttgactctaatgtgcctaagaggggtcctgtttgaatggaatctatttgggattcttttagcttcctggatctggaagctcccaagacttgggaagttttcagctactatttcattcaatgttttctgtacatttgcccttcttttctctttctggaacacctacagtgtgaatatttgttcacttaatagtgtcccatgaattctgtaggctttcttcattccattttactttttcttccccccatctttctgtgttatttcacaagatctgtcttcaagttcaaaaattcagccacgcatggtggctcacacctgtaatcctggcactttgggaggccaaggcgggcagatcacttgagattaggagttcgataccaacctggctaacatggtgaaaccccatctctaccaaaaaatacaaaaattagctggatgtgatggcatgcccctgtagtcccagctactcaggaggactgaggagggagaatcacttgagcccaggaggtggaggttgcagtgagctgagataatgccactgcactccagcctgggtgacagagtaagaacctgtctccaaaaaaataaataaataaaattctgcttggtctagtcttttggtaaagctctagcttgtacttatttacttattcattgaattcttccactccaggatacctgtttcgttcttttttatggtatttatcttcttgttgaatttcttgttcaagtcatgaattgttttcctgatttcatcaaattgtctagctctattatcttgtatctcactgtaagattactattttgaattctttttctgtcattttgtatatttctctatcattggggtctattacacaggaattattgtattcctttggaggtgtcatgtttccttgctttttcatgttcgatgtatccctatgttgatgtctatgcatctggtggaataattgcctcttccaattttatgtggtaggttttgcagggaaagaaatatttgtatgaatggatcttggggtgttggttcagtgggatgcattggctttggttccaggtgggcatagtagtgtagtttttgtgtagtttctttaactgtaatccatgccagtgacatttgtgagtgtctcagtggcctcagctgagaggctttgtggtggtggtggcatgactttgccagggatgtgttcaccgggctatttgtcaggtcagcgatgcatgcgttcacatggtgggttgtccaacttggggtctcacttgctggggttggggttggtgcccttactctggctgagggcacagttgcttggttgcttggccagtctgggagtatgcctgccagaggtggcctgttgggctgtttctcaggtttgggacatgggcacactgctgctcagctctcctgtggggaatgcctgctggggacagcctacagggctatttctcaggcatgagaggtgggcataagtctgcttgatggccccgggggcatgtctgccaggagtggcctgaggagttgcttctcagacccgggatatgaacacaaggctgctcggctggcctaggggagttgccgctaggggtgacccatgggctgtttttcaggcctgagatatggacacatggctacttggctggcctgggggtatgtctgccaggggcagcctgcagggttgtttctcaggccctgattgaggtgtggggcctttgggcaggccgggggcatgtctgtagggggctgcactgcccgactgtttcatagatccgggatgcaggagcgtagtcactctgctagcctgtcagttgctcagggccttctgcttgcaggagggtatgcagcagtttggttggctcaagagtgggtttgccctgggtgggactgtttctgtggctgaaagtgcagagggtggtttcccttcattgcaggaccagagtcacagccattcccgagccctgggttgtggagttcagccacctgtgtagctttggtggcatgaaaatggagtcccagtgctggaaaggtgcagtggctactggccccaagaggaaggcacactccagagggagctgtggtctaaagatggcgccatgctgtagtaacttggctcatggagtgggtggggagtggggaatgctcctaatctggggcagtgcaactgtacgaattcccagcagctctccaaactgggctcagaacttgcaaggactgggggatcctcctgtaataaggactgtaggtgtttgcagtggcagtgggggcaggtgggaatctcccgcttaccttttcctcacagggagaaggccttcatatgtccaggcctccccagtcctggtggaagagatggggccacagaggctgggggccttcatgctgccctcctagactttcagtcaccacaggggcctctccacttccccactgcagttcagcactttcccacactgaagtcaaatcttagctgtttattcattgccttagtcctttcctaagaaaggtgggtggggggggggagcgggtgagcaccagctgactctaatcagtcatcttgctgatgtcccacccatcatttattctatgatttttcatgaatctgttgagagctctaaagatgagtctaatgttcatctctttgttgaattggtcagaaggtcgtgtcctggacaagatgatcttctcagcttggacagaatgcagacaggtggggagaggagaggagctacttgagaggagaaaaatcctgaaaacatggggactgaggtggaaatcatgtgtttcctgttccttagacagcgagaccaactggtctcgtgcagaaagggcacatggattattagagggagtaaggttaagattgacaaatcagaatgtgtttattctgttatgaatgctacattatagtcacaaaattggtattgaaaccctgcatgtgtttctgtctctgagcaaccaaatactccttttttttttttttttttgagacagagtcttgctctgctacccaggctgcagtgcagtggcgccatcttggctcactgcaacctccgcctctcaggttcaagcgattttcctgcctcagcctcccaagtagctgggattacagatgtctgccgccaagcccggctaattttttttgtgtttattagagacagggtttcatcatgttggacgggctggtctggaactcctgacttcaggtgatgtgcccgcctcagcctcccagagggctgggattacacacatgagccactgcgcccggctccaaataccctttaatgggaaattatatggtctttttttaaaacaacaacaacattgtaatctgtagtcgcaacattgtgtctgcttgagaaataatatttgtacctttggggtcacgtagcctctgagacaaactttgtcctaataaaaaggccactgttcggccttctgtttttgaaatttaagaacctcatttattaccaacttcttttaggattattaactgaaacatctcttggaggattagtacaaatattatgttctcccatcatctctataacaggctgtaattctgaggaccaagcttgtgccttattcatccttgtatctcttccagcactgaatacagttcctggcataaactaacgatgcaataaattgggtttgaattgaattttcaaagcattcaaggctggccacctctgcacttgtgggagtaatttgcatttgagctgcatgttttgagatatatcatgcatttaatattgttctttaggtccagcctgatgagtgaagaggctaagcgaggagcacccaacccttggctctttgaggagccagaggagaccagaggcttgggttttgatgaaatccggcaacagcagcagaaaattatccaaggtactaaatatcctgaggagtgtgggctcagaaaccttgccagaattttttttttttttttttttttttttttttgagacggagtcttgctatgtcgcctaggctggagtgcagtggcgtgatcttggctcactgcaacctccacctcccgggttcaaacgattctcctgcctcagcctcccgagaagctgggactacaggtgcgtgccaccatgcccggctaattttttgtatttttagtacagacagggtttcaccctgttagccaggatggtcttgatctcctgacctcatgatcttcccaccttggcctcccaaagtgctgggattacaggtgtgagccaccgtgcccggccaccagattttctactggagccttgtttgttcctcatccccattgaaaattggagtgaaaactgctggtcttttaaagcttttggtgtgtgcctcaggatacctgaggaatagacagttgctgtcactcatctcggtggctcatggaagtggtgattttccattgggcaagagcagagagagcagatctgaatctaagtccaagcgaatttgatgcttatgctctttactttagcttcacgactgggaattagtctccaaacacaagactccattttattttttaaattataaaatatgtcagtttggcttttcttttttatcttttgccctgtggctttttaactttttttttttaaactttcttatatttttaaaatttcagaagtatgcatgattgttatacaaagtgtaaacaacataggaatgtataagatgaaagccctccatattgtttctccaatctcaaactggaaacagattaatatgtatttccttagaccttttgtatacattcacatacatatattcaatataaatatacttattttacataaatggaatcatgagatatttagctctctccatatatatatataattccacacctttttaaaacttagtatgtgtcggctgggtgtggtggctcacgcctgtaatcccagcactttgggaggctgaggcaggaggatcacctgagatcaggagttcgagaccagcctggccaacatggtgaaacgccgtctctactaaaaataaaaaattagctgggtgtggtggcacgcacctgtagtcctagctactcaggaggctgaggcaggagaatcgcttgaacccaggaggcagaggttgcagtgagccgatatagcatgtcactgcactccagcctgtgcaacagagtgagactccatctcaaaggaaaaaaaagaaaaaaccacttagtatgtgttatggactttttaaaatgtcagtatgtacagatacattattctttctaattctgctttttaaaatcagctttattgccaggcctggtggcacatgcctgtactcctgacactttgggaggccaaggcagcaggatggcttgagtgtaggagtttgacaccagcctaggcaacatagtaaaatcccatctttaaaaaaattaatgaataaaaaggaagagggaggaggaggaggagaaaataaatctaaagtcagctttattgagatatagttgatatgatcataaatggcccatgtttgaagtatatgatttgataagctttgacatatgtatatgcctgtgaaaccatcactgcaataaaaataatgaacctaattgttattcccaaaagttttcttcatgcctctttgtaattcttcctattgttcctccctgccatgcccagacaactgctgaacttctttctgtcactataaattagtttccattttctataattttatataaatagaactatacagtatgtaccttttggggaagaaggggctctggcttctttgtctaagcataattattttaagattcattgaactggttatgtgtatcagtatttcactcttttttttttttttttttttttgagacagagtctggctttgctgcctagactggagtgcagtggtacgatctcagctcaccacaacctccacctcctgggttcaagcaattctcctgcctcagcttcccgagtggctgggattacgggcgcccgccatcatgcccagctaattttttttgtatttttagtagagatggggtttcaccatgctggccaggctggtctcgaactcctgacctcaagcgatccactcgactcggcctcccaaagtgctgggattacaggcatgagccaccgcgcccggcctgcatttcactcttatattatagatttgtattccattgtatggatttaccacaatctgtgtatccattcacctgttgattaatatttgggtggttttcagtttttgactgttacaaagaaagctgctattagcattcatgtataagactttgtatggacgtaaatttgcattttttctggggtaaatacctacaagtggaatgagtgagtcatatagtagctgtttgactttttaaatttaaaacaatttttaatttgcaagtaaaaattatatttatggtttgcaatgtgttgtttcaaaatatgtatacatagtagaatgggcaaatcaatctaattaacttatgtataagctcacatgcatatttatttatggtgagaacacttaaaatctactctcttagcaatttttaagtatattagttaccctgttgtacagtcgatcttttgagcttattctttctgtctaactgaaattttgtattctgtgacccacatctcctcatctctcccccaaaccccagggctgggtaaccactcctctgctctctgcttctctgttcatctttttcagattctgcatataaatgagatcatatggtatttgcctggctttctttgcctacaaatcccagcagtgggattgctagtatcacttttaattttttgaagaacctccatactgttttccataatggttgcagtaaatttacatccccaccaacagtgtgcagggattcgcttttctccacattcttgccaacacttgttatcttttttctttttgatcatagccattctgacaggtgtgaggtgacagctcatcatgtttggtttgtttgtttgttttttgagacagagtcttgctctgtcgcccaggctggagtgcagtgacgcaatctctgctcactgcaagctccacctctcaggttcacgctattctcctgcctcagcctcccgagtagctgggactacaagcacccaccaccatgcctggctaattttttgtattttagagatggggtttcaccgtgttagccatgctggtttcgatctcctgacctcgtgatccgcctgcctcggcctcccaaagtgctgggattacaggcgtgagccaccgtgcctggcctgtttatttttttgagactgttgcccaggctggagtgcagtggcgtgatcctggcttactgcatcctccgtctcccaggttcaagcgattctcctgcctcagcctcctgagtagctgggattacaggcatgtaccaccatgcccagctaatttttgtatttttagtagagatggggtttctccatgttggccaggctggtctcaaactcctgacctcaggtgacccacccacctcggcctcccaaagtgctgggattacagatgtgagctgctgcgcgtatgggcctatttctgttgtactctctgttcttttccattggtctatttgtttatctttataccaatgcctcactgtattaattattttacctttatgatgggtcattaagtaagatagtacaggtcatccagcttcgtttatttttacaattttattggatattctaggtcttttgcatttccatgtgaattctagaatctgtttttaattttacaaaagaaagcttcctgggcatttgattgggattacattgaatttttagattagtttgaggagaattgatattttaacactattgagtctcaaattctctcagcaatgccttttagtttttgctatacgtgtcttatatatcttttatcctatttatccctaaatagttcatatcttttattttattttattttttgagacagtctcactctgtgacccaggctggagtgcagtagcgagatcttggctccctgcaagctctgcctcctgggttcacgacattcttctgcctcagcctcccaagtagctgggactacaggtgcccgccaccacgcgcggctaattttttgtatttttttaaatagagacagggtttcaccatgttagccaggatggtctcaatctcctgacctcgtgatctgcccgcctcggcctcccaaagtgctggtattacaggcgtgagccagcacgcccggccttcatatcttttattctaagtagcatttttaaaatatcaatttctaattgttgcttgtatatcaaaatacagttgatctttgtatattgatcttggatcatgcagccttgccaaagtcactaatttctgaatgacactcagctcgagactcaaagtggcccctgtgcagatctacagagtactctctgcagtcctctctggtcctgtgccctacatcctctaaccaccatggcctcttgggacttttctcaactcgaggaaaatgctgggttccacctgtgttctcccatccccacaccatggcttgggaactcttatgaggtagtaatccggggcagtcttagaactcacctcatttgtttcccgtctctcagggatcactgcccttcatttcctgatgtccatgtcttaaaactgttgtttcgtatatttaccctgttttgttttgtttttccagttgtttcagtccagaaggaagtctggtgcctgtcagtccatcttgggcagaagcagaaatctgattctatttcgaattcccttttcacagtgaaattattgagtcagtgaaacaccgtgactctcttacatcttcagttttacatacttcacccattaccatatttggaggaaagtgaaaaaaatgaaaaacaacacagctttacatgcagcacaaccattcgctcttcaggactcacatttcctgaatggagcaccttatagctaatactcatgcattttctggcattgttgcattttgccaagaaaagctgttttcagtcgggaagagtatgctcgtcccggagaaggtgctattttcaggggttgctttaggtcagtgtgagaggatgctcctcaaagtgtttgtcacagtctccaaaacagagcttccttatgaagattctcacccttgggaagcctgctggcctgtggggtgtgggtggagtttgcggggagcggcagcgcaggttgcaggtcagtttctctccactgctcttacctttgtgttttgaaatgctatgttccggctgggcgtggtggctcacgccggtaatcccagcactttgggaggcagaggcaagcacatcacaaggtcaagagatcgagaccatcctggccaacatggtgaaaccccatctctactaaaaatacaaaaattagctgggcgtccgtggcgggcgcctgtagtcccagctactcgggaggctgaggcaggagaatggcttgaacttgggaggcggaggttgcagtgagccgagattgtgctactacactccagcctggcgacagggcaagactgcttcaagaaaaagaaagaaagaaatgccatattcctctttgctagcgagctgtttttcaaggacaaatacaaaaaatggaagtaatcttcacacagaacccttattagccttttctctgcctcaagaatcttgacaatgtgctgaagttgctatggctttgtttgcgtccttgccaggtcctgcattaaatgaaaataaagagccacaaaaggtcatttctgacttcctttagcccgtggaatcccttagccattctgcactctagctgacccttagaaactttgaaaatcatcccaaaattacagtttactggtagaacatagactgaagggcagggaatgccttccttgcctaacctagaagtgaagcctcatcgtaacaaattagccaatttggcttctgtgccccttcagctgtaatttgaagcatgaaatgggcattaggcagaagatgggtgggtgatgacaatcacttaattgcctcaaagatccctgagatagaaggaacaagggtacttgtttcttgtttcaaaatgctttggttattatacacccttgtccctgagtgggatcgcagaccttggagaagtatgaagtgtcattccaccttcacccaggaggtctttcttgatggggtttcttcatcagcttcatctagtcttatgagttttctatagatgttctttctagactctagcaggaaattgtgcaatcgttctagatttctgcgttcttaggtctcttggtgtttgcatgtgaaatggggctgtagaaggtggctagccagactccatttcacactggggaatcttagtagctaacctttgaacccttgcagtcacagcttcacagacaactttctttgaagataccctttcttgtagctgtcacctagactagaaggattcctttcctaaaatcttaaaacaaaaataaaaacatctattcttaaacttgctctgagtcttctaacatagtgattaactttttatctagcttgacctaatttttcttttctttttttttttttttttgagatggtgtctcactctgtcacccaggctggagtgcagtggtgcgatctcaactcactacaacctccatctcctgggttcaagtgattctccagcctcagcctcccaagtagctgggactacaggtgcatgccactgcatctggctaatatttgtatttttagtagagacaggattttgccatgttggccaggctggtctcgaactcctgacctcagatgatcccccccacctcaggctcccaaagtgctaggattacaggcgtgagccactgcacctgggtgacctgattttcttctctttcattcctaccttcctttattgagggagagctccttctgtatgttaaatgtgaaaggttcattgcttctctgtgggcactggacaacacaacatcaactacttttttgactgtgtaaactcagagggctctctagtattggccaggagtctttctgtctagcagagactgtattcctttcttttgtaaacctagagggccctccctctgtggtcattcattgatttaaacaagtgttgtacatttcagtccttgatttaaatatgttggtgctccgtgccactagctgggctcagatctggggcaaagacatagaaaaagaagaagtctcatgtatgtcaaagacacaggaaaagaagacagtcattggggtctggatcttgtactcaatccagggactgtagttgcagctcttagggatgtccctctgttgtattgttaaaatattgataactttttactatggaaaatttcaaacgtgtaatagtagagagtgtcagataatgactttgtcctactcatcctccagcctcagtgattgtcaacccatagccaatctgttcacatgtatatgccatcccgtaacctacccatcctacccagcccctaggttattttgggagcaaatcccagacatcgtatcatttcatcagtggatatttgagaatatatatctgaaatatgtttggaaaagataaatactgttttggaaaactatagtcacatgccattatcatccttaagaagttaacaatatttcctgaatctaatcaaatactcagcattcaagtttccctgattgtgctgtgatgttttcttttaggtagttcaattcaggatctaaatatggcccatacattgcaactagttatgtctcttaagtttctttaatatacaggttctttttccaactcttcctttttcttctatgcagtttcttcattgaaactgcatttgccctttagtttcccactatccagatcttgcatttctgaatgtctacagataggaaatatccaaacacctaatggtttcaaggggatttttaaaaaatgattgtattagttttctattgctgctttaataaattagcacaaacttagtgacttaaaacacatttatgatcttacagttctgtaggtgagtagtccaatgcaggtcccacagggctcagatcaagcagttagcttgattcttttctggaggctcattctggagaattcgttcccttactttttctagcttctagagggctcccacatctcttctttcgtcttcaaagccagtaagttatctctctctgacccttcttcatactccctctgatggcagctgggaaaggttctctgcttttcaggactcatatgattatactggatccacctggataatccaggctaatcccccgtctcagatttttaaccttaatcacatctgcaaagtcccttttgccatgtaagggaacatattcatagtttctggggattaggatatggacatcttaaacatgggggatattattctatctgtaacaatgatccatccatttttaaaaattcaaatcattgtaaaatagaataatgactgatagagtgtggtatgttacaattgccctcttgtgatatcatcatgacttgggttatgtgaaagagtagggcagattttggcagttatgacatgatggtagttttgttggtaagaaagtacatggtggctgggtgtggtggctcacgcctgtaatcccagcactttgggaggccgaggcagctggatcacctgaggtcaggagttcgagaccagcctggccaacatggcaaaacctcgtctctactaaaaatacaaaaattagctggacattgtggtggatgcctgtaatcccagccactggggaggcggagacaggagaattgcttgaacttggaaggtggaggttacagtgagccgagatcatgccattgtactccagcctgggcgacaagagcgaaactctgtctcaaaaaaaaaaaaaaaagagaaagaaaaagaaactgcatggtatggtttcttcttctttttttctttttgagacaggagtcttgctatattgcccctggctggacttgaacttctgggctcaagcagtcctcctgccttagcctcccgaatagctgagactacaggcgcacaccaccatgcccatgcatggttcttgattatttatatttttgcagtcagcagcattgtgttttgatcattgtctctaagatagccataccaccttccccttagaaatgcctcttcaggacttggggaagcccaggttatgaatgtgattattattacctctacagcatctcgattatctgaatcttctgtgtctttggattgtgtaatgaaaatttactgcagcacttaaagatgtggagagaattgctaagcttatacaaattattagaggggaacagaacttttagttctctttctcatgtgcattagatgatcatcaggttgctaaatcagataatgagtcaagtttgagattaaagagtgtaattagtgtatttttcattcataatctatgtctctactagataaagcaattttaggagtttaatgactcttttcctaatggaaactgtggaggaattgcctttcctatttttaaatggttttatcttttaatccacgttgacactcaaccctcagtcctatatatatagattattcatcagatgcatttagaattttactataacatcagtcatcctataggagcacttggttgaggatggatttatcttggaggccatccaagaggttgttattaaagaccaagaggacctcattataaagtgattttactataaaatggtccttgtgaatgatccctaaagacggcaggtcatttgtatagttaaaaaaagtacagtgtgtcaaacaatgtcacaaaggggttgttacctcacaccgttagtttaaataaattccagatgaattaaagagctaagtttgatgatttaattccataaaaagacttggaaaaaatataagtaaatgttaatgcgacctcgagtaagacctttgtgatttttgcttttgtagataagcctttatgtgaaacagtcatttcaaaaaccctgtagacaaatgaagctgcgaggggtacaatgttaccttcatgcggcgtgttccgtggtgaacaagagtcattacactcagcttcacagtgttctcaaagcacctgaaattagaggaagaaaatttttacaaagacatgaccgagacccccagttcaaaatatacatattaaattttaaagaaaggatcgtgagtaacttgagtttaactcacctttttctttaaattttcaaaaactaactttgctctttaaatttgcaaaaagtttcaaagtaatacattttcatttttaaaacaaaagctgttgtactatactttgttttgtatctttttttttttttttttttttttttttgagacaggttctcactctgttacccaggctggagtgcagtggcgccatctcggctcactgtgacctctgcctcccatgctcaagtgatccatccacctccgagtagctgggactataggcatgcgccaccacacccagataatgtttgtatttttagtagagacagacagtgttgcccagtctggtctcaaactcctgggcttaagtgatctgcccgcttcagccccctaaagtgctgggattacaggcgtgagccactgcgcccagcttcctgcttttttacttaagaacatatcatgggggcnnnnnnnnnnnnnnnnnnnnnnnnnnnnnnnnnnnnnnnnnnnnnnnnnnnnnnnnnnnnnnnnnnnnnnnnnnnnnnnnnnnnnnnnnnnnnnnnnnnncactcctgtgaggaagcttaaaaaagtttcctatcggccgggcacggtggctcacgcctataatcccagcactttgggaggctgaggcaggtggatcacgaggtcaggagatagagcccatccaggctaacacggtgaaactccgtctctactaaaaatccaaaaaaaaaaaaaaaaaaaaaattatctgggcatgtggcgggtgcctgtagtcccagctactcaggaggctgaggcaggagaatggcgtgaacccaggaggcggagcttgcagtgagccgagatcgcgccactgcactccagcctgggcgaaagagcgagactccatctcaaaaacaacaacaacaacaaaaaaacaaaacaaaaaaaaacaaaacatatgaacttctttcaacatcaaaatatagataaacaatatgattttcagtggctatacagtgttttactatgtggatatactataaatttataaacatctctgtgtttgggcatttaggtactttctaatttttcactattataagtatatcactatgggtctgatcaggagagagaaatttgacagggaaagttgaaagtaaattattaattttaacagggattagagtaacgagggattagctaacaagaggtcaaaagaactctcaaaacagaactagcagggataaggtgcaatcaccaagtctcaggctgagacagaatgtccagggaggagcccacgcccctagggctaagagaaggctcagctgagggtccctgaatttcacagaagcccccgtggtgccctgctgtcagaacctcctggagatctgccctctgggatgctgggggaaactcttcatggggaagaacctccctggaggcgctcttgttataaacctgcccgaggagggggtgtgctgggagaagttgctggttctgggtattgctggccactgtgcactgaaggggccaggcactgaaggagttgcagttgctgaaggagcctgccaagattgcaggctggagccaggaagcaaaaactctgacaaaggaaaaagtattcaagcagccttggttcattttcttttttaaaaaattttcaaattattttttatttagagacagagcctctctctatcacccaggctggggtgcagtggcgtgatcatggctcactgcagcctcgaactcctggatgatcaaccaatcctctcacctcagcctcccaagtagctgacactacaggtacatgccatcgtgcctagctaattttttttttttttttgagacggagtctcactctgtcacccaggctggagtgcattggcgcaatctcagctcactgcaatctccgcttcctgggttcacaccattctcctgcctcagcctccccagtagctgggcctacaggtgtccgccaccaggcccagctaatttttttttgtatttttagtagagacggggtttcactttgttagccaggatggtctcgatctcctgacctcgtgatccacccgccttggcctctcaaagtgctgggattacaggcgtgagccaccgcgactggctgcctggctaattttttaaagaaaattttctagaggtgagatcttactttttgatgcaggatggttttgaactcctggcttcaagtgaacctcctgccttggcttcccaaagtggctgggataacaggcatgagccactgtgcccagctggttcatcttcatagagcagccaaaaagagggaatttgttgctgagaggcactaagttgatatctggcacaagaaacaaatgtttcagggaatatccttgtatatccatcattacatgctatctgaatattttcttacatacattcctagacttagaattggcaggtaaaaaggtgggcacagtctacacttgagaaatacggccgtcagtaaaacttattcacctattacatagtacttgggagcttctagatcgtcacaatttaattaaccttaggtattgtcattctttttaatccttatacatctgataagccaaaaaaagtagttttttatttgtattttttaaaaaattagtagcgatgttaaaactttattttcttttttattgtgaagttcttgcctgtatcctctgctgatttaaaaaattgggatattcagtctttttcttattgatttgtacatgctctttatatattaagtatcagaaagtttaaatgttcatgtttccaaatcttactttgtttttcatatttaaaatcttaattcttttggaaatcgttttagtttaaggtgtcaggtaggtgtttagtttttaaattttgttccaataatgttaactcttttctcttttttttcctgactgatttatatgtcaacttgtgttatatgcctgggtatacttatggactttaagttgttttcttctagtttctagttaattatttttcttttttctttcagaacaggatgcaggccttgatgccctttcctctatcataagtcgccaaaaacaaatggggcaggaaattgggaatgaattggatgaacaaaatggtaagaataagtctgggattgaccagatttgccgttgacataaatactaaaggcttgagcatttgttgaatgagtttaagattatacaacatgtaaagtggtttaatgtcaacgattgttacagtttaacgcattggagtgggggttgtggcagatttagatgatagttgttaaatactatgcaaagaaatttggtgaaaaattttccagttctcagtagctgcttttaacaatactgtgttttatgatccattcatcccaagagcttttcttctatgtggcagtgatatgaaattgctcagcactttgtacactgaggctgtgtgggcctcctgtcatccccacacccggtggagtttgctcttcttcgatcctatgtaccaggcttcagggcaaaaaagggtttgaagatctttgttcagggtttgatgtgacaagtctggttggaaaaagatgaatttgcaaactgcaagcagggtggattggggagtgtttaagacgtgtaggcatctgcaaggctcttggcttgaggagggcctggatgggttgtaggggcggaaagggggaagaaatacgggggcacgggattgccagtgattttacgttaaggatgaagttgggaaacttgagagcagacactggtttttgggtgagatggtaagtccagtttgcatgtgtctaattagagatgccggcgggagatgtccagttgacagtgggagacagggtaccagagctcagggagagggcggagccaaagagaagagatgggagcagctgcagtgtagaggtgacgtgtgacagcgtggagtcgttgagtggcagtgaagctggcatttatggaaagcccccactatgtgctaagccctttcatctatgtcatttcatttcatctccacacaacatcatgaaggcggcaccctcctcgtgtgagaggcaaaactcagagtggctgcagggccccctgagaccacatcgcttatgagtgacagagctaaactccagctcaggtcttctgattctaacgtgactgcttttgctgctaaactggcttcctctctaaagaagacaaagtaggaagagaaaaagaaaatgtaaagtattctatctaaggtttcagcttttagtaataccacgatggaatggctttcaagaaaagttatcaggtgggtgcggtggctcacacctgtaattccaacactttgggaggctgaggcaggcggattacaaggtcaggagaccagcctggccaacatgatgagacctcatctctactaaaaatacaaaaaattagctgggcgtggtggcccacacctgtaatcacagctactcgggaggctgaggcaggagaattgctagaacccaggaggcggaggttgtggtgagccgagattgtaccattgcactccagcctgggcgacagagcaagtctccgtctcaaaaaaaaagaaaagttatcatgtatgagcaagcgtcgaagccctggggttagacgaacacctgctttgaagagagggctgcacttctcagaatcctacagcagacacttctattctccatccttgggaagaatgagttaatttgttcctgcagtgctgttccatttatctgtcataaatcaattccatctgtttatcatctatcataaataaatagattactaaatccaatggagaagccttctctctttacaattctaatagtttcagcacagagaggacaacttagttctttccctgatggtaccaacacgaacaggctaatttatgtatttgcatataattcagttattggtcagttccttccttaagtgatagtattgataagaaagtaagctttataggccgggcacggtggctcattcctgtaatcacagcactttggcaggctgaggcgggtggatcacgaggtcaggagtttgagaccagcctggccagcatggtgaaaccctgtctctactaaagatacaaaaaattagccaggcatggtgttgtatgcgtgtaatcccagctacgcgggaggctgaggcaggagaatcgcttcaacctgggaggcagacgttgcagtgagccgagattgtgccactgcactccagcctgggcgatagagtgacaatccatctcaaaaaaaaaaaaaaaaaaaaaggaaagtaagctttatagaaaatctgcctatctggtgtacaattgttcctcatcccaaggacatttagcctattcgatgggtgagactagagaggactctagccaccaaactgatgatcatgtgttgtgatatacgtgcaggtaagctgcagtgtctgcgggtggatggctaacaagtgatggtgctttacgtgcataatttggtgggatgatttactaagttcccatatgaaagcaccgtttctttgtccagcataaggcaatcaagccgcacatctttatcttgtctttcgtctggtttagtggttgtcatactttgctgcatattagaatcacctgggctgcttttaaaactccaagagcccaggccatacctgtgttagttttcttttttgttgttgttttcattttttttaatttgatttttaaaattagcttcctcaggttgaagtgtgttagttttctgttgctgttgtaacaaattaccaccagtttagtggcttaaaacaacacaaggctgggtgcagtggctcacgcctgtaatcccagcactttgggaggccgaggtggatggatcatttgaggtcaggagttcgagaccagcctggccaacgtggtgaaaccccacctgtactaaacatacaaaaattagccgggcgtggtggcaggcgcctgtagtcccagctacttgggaggctgaggcaggagaatcgcttgaacccaggaggcaggggttgcagtgagctgagattgcaccactgcactccagcttgggtgactgagcgagactctgtctcaaaacacacacacacacacacacgtgaccgagcgagagactctcaaaacacacacacacacacacacacacactctctctctctctctctctctttctctcttaatgtcttacagttctgtgggctagaagtttgatgtgagtcacactgggctaaaactaaggcatgggcagggtggctcttccttctggaggatgtaggggagaattcatatctttgattttccagctttgagaggtccagctacattccttggcccatgaccccttcctccgtcttcaaagacaacaacagtaggttgagtgcctctcatatggcatcacttgtacctctgactgctgcctccctcttctacttttaaggacccttgtcatgacattgggcccacccagataatccaggatcacctcctcatgttgaggtcagctgatgagcaacccatattccatctacaagcttaatggctcgtttgccatttaacctaacatattcacagacaccagggactacgagctggacatctttagggagccactgttctgtctaccacagtaatttttttttttttaagacagagtttcgcccttgttgcccaggctggagtgcagtggtgcgatctcggctcactgcaacctccatctcccgggttcaagcgattctcctgattcagcctcccaagtagctgggattacaggcgcctgccaccatgcccagctaattttgtatttttggtggagacgaggtttcaccctgttggccaggctgttttcaaactcctgacctcaggtgatctacccgcctcggcctctcaaaatgctgggattacaggcatgagccactgcacccagcctaccacagtaattttataccaagtgaatcacaacctccaggggtggggcccaagcatcagtagtttttgaagccacccctgatgatttcaaggtgctgccagatttgagaagcagtgcccttgttgaatatgcagacaatgtatttagcgctgtactttgtattggttcttatatgctcacatgacaggtctaaatcccccacatgcacagaagcgcatccacgtggcgacgtgtatatacacagcatcacagtcacagtcagaggtccttcgactcgcacattttgcccctatcccttttgctgcttcccccacacctcccctgtcctcatctccatctcatacccgggtggctacatgtgtacatatacaaataggaggtatttttccattcgttgccagtgcaaacttggttttctctgtggtggcctcccggagagaaggcagctatgctggtggttttctaatgtgaacatttgctcctcggagatagggcagagtcagccattttcagtcacaggaaaagagactctctgaggataaaaaagtatatccctgccaagaccatcatcagcttttattccttttgttaaagcgaaaaaaggccatgatagctgtaggtgttaagaatggggctgcagccccatctggatttttattgtgatctgagtgatagggagtcaggggcgctggaaaagggcagcacattggctgcaagtatctgcatgtgatttaccggcctgctgaattttggttttcattaaatgaggaaaacaataggctaggtcattttggaatcaagtatcaaaatcttactaacaaaatacgttgtacttagagtataaccacaaagctgaaaggtcgaattatcttcagttttggaattcagtttctaatttcctcatagagaattaaaaagggcctgaccaaccccagtaattaccctgttcctatgccagtgaccaagccaagcgaggaaatggatcagcagttaagtgaaaatcccagtgatgacagaccctaatggccactgactaggggcgttggcaagtggaacactgagtggatgacgtcccctcatgcagccacaaattctagtgctctttagttccaggtggcctctatgggtgggagggcacaaagggctcatgacagaccaccagcacttctccagaacccagagttgtggttctggtctcactctgttgcccaagctggagtgtagtggcacagtcacgtctcactgcatcctccatctcccaggctcaagtgatcctcccacctcagcctcctgagtatctgggactacaggccggcaccatagcacctggctaattttaacttattttttgtagagatgggggtccggtcgccctgtgttgcccagagtggtcttgaattcctgagctcaagcaatcctcccacctcagcctcccaaagtattgggactacaggcttgagccaccacccgcagcagagctttttaaaaagaacaccaaaacaagaaaatgaacagaattgatgttctgagaccttttggcatgagccaccacaaagaatcacatcacaaagatcagcatcacaaagaatcatagaggcacgatttgatggatgacatcacaccaagaacaaatctctgctggtgtgtgcaggtctttgccattcttttgatgctcaaatatcccaaattgaccaatccttttggatgtttccctgacaatctatgagcaattccttgctttctggaagcataaaatgtcccaggctctcctttttctctatcctatccctggaatctgctgtttcctcaaggatccctggttccttttattgggaaatgctgtttggaatctaagatcttggtgcatactgtactgtacccattgccactggagtgttgttacttttaggccgttcattatcacgattcttgattttttataggtgagttatttccttctctctggaacatgttaggatcttttatttatgagcatgccttaaagtaggtacattttcattcactgttttggatgcttggcatcccttacaatctagagattccattctgggacattcttttgtcatttccttccctctgtttttctgtattttctcttgctgcaactcctactggtcagatttagaactcccggattgtccgagcatggtggcttatgcctgtaatcccagtactttgggaggccaaggtaggtggatcatttgaggtcaggagtttgagaccagcctggtcaatatggtgaaaccccgtctctactaaaaataaaaaaattagctgggtgtggtggcacatgcctgtagtcccagctactcgggaggctgaggcaggagaatcacttgaacctgggaggtggaggttgcagtgagctgagatcacgccactgcactccagcctgggtgacagagcaagactctgtctcaaaaaaaaaaaaccaaaaaacaaaaaaacaaaaacaaagaactcctggatcaatcctctaagtttcctagtttttcctctgtgatactgtctagtttacttattgtttttctttctgatttgaacaacagcaggcatacatttttttaccctttgagggttatttccattttatttatgaagcagaataggtatgtgtatatatgtcatagaagccaggccctatgctttcctctccatgaatgccttcttcatctgcccagttactccttcctcatgaggtgagtcctgtcctgtcctgtcagctgtgcttcctaaagatcactagagtctgttcatacctctgggccactgtcatccttggcctcgattactgcaatagcctgataccttgccttgtgtcttatttccttctcagcctttctctgccttgtatcagtgttgtcttcagaacacagatcttattataattttttttctaagcgacaaggtcttggcatgttgctcaggctggacttgaattcctgggcttaagcagtcttcctgcttcagcctcctcagtagccgggaccacaggcatgtgccatcatacccagctacattattaattttaagtggccctcccaatgccttcctgataaagtccacactagttctcaatgatctagtcattgcattccctgtcactagaattacacaccccaccatactgactcacttcaagttcatcagttgcaccagaatgctgggcctggcctctgacactttctctttttttgagacagaatcttgctctgtcacccaggctggagtgtaatggcacgatctcgcctcatggcaacctccacctctcgggttcaagtgattcttgtgcctcagcctcccgagtagctgggattacgggcacgcaccaccatgcccggctaattttttttttttttttgtatttttagtagagacagggtttcaccatgttgcccaggctggtctcgaactcctgagctcaggcaatgtacccacctcagccttccaaagtgctaggattacaggcgtgagccaccatgcccggccctctgatactttcattaaacttttcccagtggctggaataccttccccctcctgccaattactgttcttccctctctgcttcctcctccaacccccacctcagcatacatcttgctttagctactgctgacttttttttttttttttttgagcttaggttgggcatccttttctcttaagaaatcttcccttctttcatgctcccctaggatcctgtatttccctagtcatagcatccgtcactgactgattgacatttacttgtctgtattctccaccgcactggaacccccttgaagggaggcactctattctattcattgttggatcactagtgctaactcacatggcaaatagtgactgatgatatttgttaaattaatgaatatgaataagggttcagaaactgttattttacatgtttttccagaaatcaagatcactacagctacctgaagtgaacatgtagaaaatgtttactacatggttgctaaattgaatgagagcattttgtttgtttggcattgatgaagatgacactattgctcatgaaatagcaattcagccccactgtaggagctggcagacatacggagatatcttaccaaagggggccaggctcttatttttgcctaaaagtacttcccattcccaccctgcctgtgcccaagatgctggattattgagatctgacagtgtaggcacaagggaccaggcgtgcatctcctctctgctttgtgtgacacaccgggaaccagagtgataaggaaaaccaattgtattcgtagagtcagtcctggaattgaggagaccagcgtgtcctttgaacgtgctagaaaatatgactgtgctccttaaaggataaaatacgactctgcgcctccaaaaaaggatcagataaagatttcacatacacatcagtgatttaccatggtaaggggctcttagaactgctcagctgaattttcatgttaaaagtttagaagaacagcgtggtaggctgaataatgacccccaaagatatcctagtcccgatccctggaatctatgaatgttaccttaaatggcaaaagggactttgcagatgtgcaaagtccagattgccacggtgggtagattatcctggattatcccagtgaaccctaagtgcgatcccaaacgtccttacaaaggggaggcagagggagtttgaaacggaagattgaagcagtgcagtgactgaagcaggatgctacgctgctgactctgaacgtggagaacggagccatgagccaagggtacaaggaatgaagctctaaaagctggaataaagccaggaaatggattcttcctgagagcttctgcgggggtcgcctcaatttcagtccagtgaaactggtttcagacttctgatctctagaactaaagggagtaaatgcctattgttccaggctactcagtgtgtgataatttgttagagtagcaacaggaatctaatagaagtaatcatggtgtctttttgtgaattgtcattgaattgaggttagccacccttttgctaagaaatgtttatagtcatttgtgtctacagctcctctgaactcttgaagagatttcttttttgttttgttttgttttttgagacgcagtttcgctcttgttacccaggctgtagtgcagtggcgcgatctcggctcaccataacctccgcctcccgggttcaacccattcttctgcctcagcctcccaagtaactgcaattacaggtgcatgccaccacacccagctaatttttgtatttttagtagagacggggtttctccatgttggtcaggctggtctcgaactccgggtctcaggtgatctgcctgctgtggcctcccaaagtgctgggattacaggcgtgagagatttcttaaaagcagactttacagaaagaagttttcgttgctggtgcacaagtcactatcagaagcctctcaaatgcctctcaaactgtttatttagcactttgataatggaattaatcatgtactggtgaaatgtgaggaaagtttggtgaaggaatttcttcatgtattatctgatatcagaattccccaaagtatgctaggcaaatttattttagataatatacagagaaagatcttgtattttaatagttgtatatttcattgtgtgatagaaataaaaatggctagcatctgaaaactgatttctcggcaatataaaatttctttattcatttaacttgtataagccagaaaaatagtacagatgaaatatgaacgaggcaaaaaaaaaattctgtaggtggtatttgaaatgctgaagtttgagaaacattgctgtaagacgattaaaaaaaaatagggacagggtcttgctgtgttgctcaggctggaatgcagtgtctattcacaggctcgatcatggtacactgtggcctggagctcctgggatgaagccatcctcctgcctgagcctcccaactagctgggactatgggcatgtcccaccacgcctggcttagaagattctttttgttaaagtctaggttgccatagaacagcggtccccaacctttttggcaccagggaccagttttgtggaagacagtttttccatggaccaggatggggggtagtttcaggacgaaactgttaaacctcagatcaccaggcatcagattgtcgtaaggagtgtgcaacctagatccctcgcatgcacagttcacgatggggtttatcctcctatgagaatctaatgccactgctgatctgatgggaggtggagctcaggcagtaatgctcacttgcctgctgctcacgtcctgctgtgtggctcggttcctaacaggccatggactggtgttggtctgcggcttggggtgggggacccctgctatagcatacttcatttttggttccatcctagtatgatgccatgtggtttaatatgtgacctattcccacttgaccctcctggtgataagagcacatgttagaccaggggaggggttggaagatctattgaaacaatgccctccagcctgtgagctcagagctgtgtaacgtagtggctatggcaggagtgatgttgtctgatgctacacccctagaatttaagtacgtttgccttttgaaggaagcaagacagttagaaaccgctgtcctttaaaggaaatatggaatgatttgaagtggaaggagttcctgttactgtttggcaggtggaacgtgagcaggaagacacgctcatccacagcccagagctgtaacccggaagagctatgctgaggactttgggtgcacttcctggtggcatgaggcactttatgggtcaagcagtcttttagaaattggcataggaggccgggcacggtggttcacgcctataatcccagcactttgggaggccaaggcagatggatcacgaggtcaggagatagagaccatcctggcttacatggtgaaacctgtctctactaaaaatacaaaaaattagccaggtgtggtggcgggtgcctgtagttccagctactcgggaggctgaggcaggagaatggcatgaacccaggaggcggagcttgcagtgagctgagatcacgccactaccctccagcctgggcgacagagcaaggctccacctcaaaaaaaagaaagaaagaaagaaagaaattggcataggaacctaacacctgccccctccaaatgtggagtatagacacacattgatgtcagatgaggaaagggttttctctacgtggctgtgttggtctgaattcaggttttctttattgagatttcattcagcggactttggctggctgctaggattcatggagtggcttctcaagtctgcatttcattcataaataaacttgcaagttgcttcgtctcagagaattttggaccagaatgagtttatgaggtcatccttctcccctaccccatgccatctttccatcttttggaaggacttccatttagtgatctgtgacctagagagtcacctgtactttctaagatcttcccggaagttgatgtgcaaaatcagcagcagtggcagcaactcacctttctgctgtccacatttgtacacatctgtttgaacattttactgactagctccgtagctatcctttaatctagattaaataaactttttcttttcctaataagaaaaagtgttattaaacatagtaaggtatttttcctaaatccaaaataatatatttccttcctcagtacattctccaaattgtttattcgttaaacaaatgttgaactcctattatgtgctaagcactgtgccagaatccacatatacatgtcatgtctgttgtcacggctccttcccctcctggagtatttgttctcatcagggaggcagctgctggacagatactgcacagatacacagttagagacggtgataacacagggacctattcgaatgtgaaacagaagaactggcatggtttgagggttagaaaagcctttcctgggaaaatgatatttgaacagattgaaaaggataaacagcagttacctgtatgaaaagcaaagggaagacccttgcaaacagagggaagggcataggcaaagggcctttacgcaaaggagcgtaacatggttgagaaccttgagagaaggccagtcagtcagtgtacccagggtctagagagcatgggcaggagggggccaggagagctggcaggagggggccaggagagctggcaggaggcgggggttagggcttgtggtgtcggtgtgaccatcaccctatgctataaagtagagtcagtggtttcaatgtaaaattacttaatttgctacttatggattctgtaattttgtctatataatttactgaaaatcagggagacataaaattctcccatgcatataatttatatatattatatataatttataaaatacatctatacttaaatttaaaatacatgaatatatacttaatatatatttatatatataatacatgtatattatgcatactttatctataacatgtattcccaggctggagtgcagtggcacgatctcagctcactgcaacctctgcttcctgggttcaagcgattctcctacctcagactcccaagtagctgggatcacaggcatgtgccaccatgcccagctaatttttgtatttttagtagagatgggttttcgccatgttggccaggctgatctcaaactcctgacctcaggtgatccacccacctcagcctcccaaagggctgggattgcaggagtgagccaccgcgcctggcctatatatggtatactatatattaagtatatatattttttcattgtcccacagccaatagcatatctaaactgagagagtttagccacttttggggagaagaaatagccatattggcaagggggtgtttatccattcaacaggtgtttaccaagtaccagctgcatgtgtgactggtcccctagatagtgaaaaacagcaataacaactaaaagtcccttcctttatcattcctacactctagtgtcgggagggagacattcaacaaatacatctcaaaataaggtattttatcagattttaataagtactgtcaaggaaaaggacaggaggctgtggaagggatggtgaggaggcagctgctgcagcttcaggaatgggccgaagggagctgatgaggaggtggccagtgaagagtcgcagggaaaacggggatatctcctgtgagatctcagaggctacagagaactttgcaagctggagaaatcaaaaggctttatatttctgcataaatgtataatgtggctggaaaacagcaagtgacaagaatcatgtacccagatgaagttgtggaggggtcatgagacaggacgcagagggcttcacagtgtgaaaacctcacaggccctgaaaactataaggtatttatatttttctaggaaggactttgtttttttagtcacaatcaatagtctcagtcaggaaacatttatgctaatagtaatttgggacaggactagggctccatgctaatgtataccgtttctcctttgcatgtatacaaaagaccgtaagtcggccttcaaatagcatttcagggctgggcgcagtggctggagcctgtaatcccagcactttgggaggccaaggagggcagatcacctgaggtcaggagttcgagaccagcctggccaacatggcgaaaccccgtctctactaaaaatacaaaaattagctgggtgtgatggtgcacgcctgtaatcccagctactcaggaggctgaggtaggagaatcacttgaacccgggaagcagaggttgtagtgaggcgagattgcaccactgcactccagcctgggcgacagagctagactccgtctcaacaaaataaaaaaaactgttctcatattcttagctgagcttgaaagcaacaaagggagttctccaggtgccagaaatgaagaaacttacctacaccagtgagtgagtgaagcctcatggccctcagagataaccaaaccacatatgtagcttagggacctgcatttccacacccgtgtggatatgggagttgaggttatagggcctacgcattgcaggcagctgaaagtgggctttccaaataaagctagaagctgggaaatgacagctttatgggaaaatttcccccttccccacccaagaatgggatactcaggccacccaccttgggccacagccacccccacatatttaacatgcatacctaagtttacatttttctaacaaagtctaaagcaaataaatatcttggaataaatcaagtttagaattcttaaacttccctttaaactcttcatcttctgttttgttttcaaccgaagcccccttttatttctgtagtcagtattttatttacatttaccaacatgttttactgactgctgttacaattgctgtatccattttattactcagctcttctcactgatttttaaaattttgagaatgatagttttaaacaccaagaggttttaatgttcatgattgctttttttttccacacaagtgtgtatataaggttgtaaactttttaatcctttgaatggcactagttagaactttaaaaaatggtgagtgtttttgctccttttgttatttctgtttcttctctaggtaagttttggtttattcatcttagtctttctcttttatgctgctatgggctgaattatatgtcaccccccaaattcaaatgttgaagtactaaccccctactacttcagattgtgactttatttagagatagggtcttcagagataattaggtttaaatggggccactgtggtgggccctaatccaatatgcctggtatccttttaagcagaggaacctgaagctgggcacggtgccttgtgcctgtaatcctagcactttgagaagtcgaggtaggtggattacttaggcccaggagtttgagaccagcctgggaaatacagggagaccccatctctacaagaaataataataataataaaaaaattagcctaatgtggtggtgtacacctgtagtaccagctactcaggaggctgaggtcggaagatcacttgagcccgggaggtcaagactgcagtaagccatgattgcaccactgtgctccagcctgggcaacagagtgagaccctgtctcacaaaaaaaagaaaaagaggcacgtgggacacagacacatgcagagggcaggccacgtgaggacacggagaagacaagccaaggaaagaggcctcagaagaaatgacctctggctgggtgcggtggctcacacctgtaatcccagcactttgggaggccgaggcaggcgggtcacctgaggtcaggagttcaagaccagcctagccagcatggtgaaaccccatctctactaaaaatataaaaattagctgggtgtggtggcatgtgcctctaatcccagctacttgggaggctgagccaggagaatagcttgaacccgggaggtggaggttgcagtgagccgagattgtgccactgcaatccagcctgagtgacagaacgagactctatctcaaaaaaaaaagaaaaaaaaaagaaaagaagaaacaacttccgctcacatctataccttggacttctagcctcaagaattgtgagaaagttaatgttatttaagctccctagtctgtagtactttgttatggcaacctttacaaactaatacacatgctatgggcttttcctcacgtctgctaattcttcattgattcttcatatttatgaatgaaggaccatattgatttgtataggtagctgcaataggctttctttgtatttgggtaggtttcgttttgttttgttttctgagacggagtctcgctctgtcgcccatgctggagtgcagtggcacgatctcgcctcactgcaacctccgccccccggcttcaaacgattcttctgtctcagcctcctgagtagttgggattacaagcatgtgccaccatacccagctgatttttgtatttttagtagagatggggtttcaccatgttggtcaggctggtctcgaactcctgacctcgtgatccgccgaccttgacctcccgaagtgctgggatgacaggcgtgagccaccacgggcggccctttaggcaagtttatttacccgaaaggcttctttcttgagtgggaagacaggctgtgatgtgtactctgtgtaaatgggcaagatatgccagtcggcaggtttctttctaggatatatggttaggtaaaagagggcacaagccgattcaggaccatttgctataacaaaactaataacataaggagaactccaatcttggggtgacatcttttatatgttttatttctttttacccctgtgtctatcctagaggctcttctttgactcattctctagcctggacaccaacaccatgcgcactcccaggcaaactttcctctccagagaaggctgttccgggggttccagctgggggcaagtactgcagactgcagtctacacagggcagggctgtgggcagactggctcagctgttctgtagacagctctccactcagatgccctgattcctgccttataaccacttctttgtaggccattctgtggctgccaatagccattgactctaagcttggagcctctccagggttctgtcaaaaagaaagagcttcttatctgcagcctgatgtatttccagctgtatttcacccattccccacccccagttttggtttattggtcaatacagtcccaactctattcttgaagagaatctccaaaatgatgtcttcattgataacgcttcttcgtgtcttcagtgccaccatggatttattctttcaaaaatagcttgactgccatttcattgtgctctttggaatgaaggaggcaaccatgtgtgctttctctactgtttggagctcaaagtctctctcttttgcatttttttaccaggtcatagtatctatagaaatcattttgctgaaacagctggtgttctggaggcttcagtaaaacaagttttttttgtttgtttttgttttttgctacagagtcttgctctgtcgcccaggctggagtgcagtggcatgatatcagctcactgcaacctctgcctcctggattcaagcgattctcctgcctcagcctcccgagtagctgggattactggcatgcaccaccacgcccagctaattttttgtatttttagtagagacagggtttcaccctgttagccaggatggtctcgatctcctgacctcatgatctgcccgcttcagcctcccaaagtgctgggattacaggcgtgagccactgtgcctggctgggaacccttcgctttatagccagttggactaaagtacttggggataccccaggactaatggctggtatctgaagttagaacagtcttgtgggatcaagcccttaaacctgtggagtctgatgctaactctgggtaatgtcagaattgaattgttggctacccagttagtggcacctgtagtcccagctacttgggaggctgaggcaggagaatcacttgaacccgggaggcggaggttgcagtgagccaagattgcgccattgcactccagtctgggtgacagagtgagactccatctcaaaaagaaagaaaaaaactgaggggttcccatgaccccccttcaggatttgataacttactagaatgactcactgaactcaggaaagcactatacttactattacagttttattaaaaggatccaactcggggacagtcaaatggaaaaggcacagtatatagggcaaggtatagaggttggggtggtggtacagagctcccatgccctctccatgtatcaccctctccatgtatcaccctctccttgtcccccaactcctgccccagcacactgatgtgttcaccaatccagcagctccctgaaccttgttcaagggtttttatggagacttctttacataggcacgatcgatgacatcatcagccacttgactgaccttgatctccagcctccctcccctccctgggggttgggagttggcctgaaagttccagccctctagccattggtatggctagccctttctttgaaattgtctaagagcctaccgtgagttattatctgatgtgttcatagatgaatttccccaaagaaattagcaggagtccaaaaagactcatcatgaataacaaaagacacgtctagcactcaggaaattccaaaggtttttgaagctctgtgccaggaacctggggtaaagaccaaacatatgtatacttggccctctgtatctgtgggttccgcatccatgaatccaaccaactgagaatcaaattttttttttaaaaatggatggttgaatctgcactgaacatgtgcagacttttttcttgtcacgattctctaaaccatatagcgtaacatctattacatagcatttccattgtattagggattatgagtaatctagagatgacttaaagttatacgggaggatgtgtgtaggttatatgtaaatgctacaccattttatatatgggacttgagcatccatggattttgtatatggaagggatggtcctggaaccaatcccgcaagataccaagggatgactatatttttattatattacagcaaggaaaccagagtctttgaatctgctaactgtgcagaaaagatcctgagacatggctgggcacggtggctcatgcctgtaatcccagcactttgggaggccaagacgggcagatcactggaggtcaggagttcgagaccagcctggccaacatggtgaaaccccgtctctactaaaaaaatacaaaaattagccaggtgtggtggtgggcacctgtagtcccagctactcaggatgctgaggcagaggttgcagtgagctgagattgtgccaccgcactccagcctgggtgacaagagcaaaactccatctcaaaaaaaaaaaagaaaaaaagatcctgagacacatgcatggtgtttgtcctatgactttgctgctagctttagctctggtgatgggtttggccagctttgagtcacaaggaccttttgctgcttctgccctagttcctccctgacttttttcttctaggcccatatactggtcttgaccctggccacgcagccaggctgagaagccatctaactagaaagggatgagggttttccaaggaaaagctgtggaaacacttgtcaaggaaaaggccatctctcctcaggccctgggacagctggcctgggtgactcacccggcttcctttcccctgaacttcattcaccgctgttcctatttgacctccaagagggaggctaccacaggcccatccagctgtagcagctgaattggagaagggacttcaaaaaagcaagccaaaaagagaggccaaagagaacctcaaaggaacagccaaagtaatcacagatgcaaagagcaggttgctctggaagctctacctcttgccactttggccctagtcatactgtttctcctcctcagtgcctctgcaggaaggggaatcttggtctctccttggaggctacggtgggggtccccaagacaacctccaggtttagtggtttgctaggaggactcaaaggattcagcttatactcacctacccactaaaatgtacttaaaacccccaagtgaatactagcagtactctcgcatttactcatggacgtggataaagtggcaaaaggtttgactcaccccacaagcacattcccagccgaggttgaacaaggtgatgccctgccttttgtttcggcctcagagagggatgaccagtggacactctggctctggggccagacagacaggcttaaatcccacctctggctcctcttagtggagcagcctcaggcaagttatgtaacacttcagaaccttgttttttcttttgaaaaaaaaaaaaaaaaggaatctaccaggatgagttgtttttaggatttaatattatgatctgtgtggggtatgtacagatagaggtacatgtctccctcaggaacatcagttgagtatttgctaattcagtgttcatggtgactttatggaacataattactgtgaatagcgggaatggactgtagttatcctcatgattatgatttatcatagcaaaaggatacaaagcaaaatcagcaaagggaaaaggctcctggttgaagtgctggggaaaccaggtgcaagattccaagcatcctctcccagtggaatcccacagggtgcacagaattaccccaacgatgagttgtgacagcacgtgcgacatattaccaaccaggaaggctcattagagactcagtgcccggggttttttgagggtcttggtcacataggcaccctgtctggcatgtacccacatcccagactcccagaaggaaaccaggtgttaatgaaacagagcattgatacagcttaggcacagattgccactcttaccagttaatggcgggtccttcccaaaatccaagctccaggatgccagccagggaagggccaaccttggcagcagtgccttgttaagaaaagcagttagggccgggcgcggtggctcatgcctgtaatcccagcactttgggaggccgaggtaggtggatcatgaggtcaggagttcgagaccagcctggccaagatagtgaaaccctgtctctaataaaaaatataaaaattagctgggtgtgatggcgggcgcctgtaatcccagctactcgggaagctgaggcaggagaattgcttgaacccgggaggcggaggttgcagtgagccaagatcatgccactgcattccagcctaggcgacagagtgagactgtctcaaaaaaaaaaaaaaaaaaaagcagggtgcggtggctcacgccccgggaggcggaggttgcagtgagccaagatcacgccactgcattccagcctaggtgacagagtaagactctgtcaaaaaaaaaaaaaaaaaaaaaaagcaggatgcagtggctcacgcctgtaatcccagcactttgggaggccgaggcaggtggatcacgaggtcaggagattgagaccatcctggctaacacagtgaaaccccatctctactaaaaaaaaaaatacaaaaaattagccaggcatggtggcgggcacctgtagtcccagctactcaggaggctgaggcaggagaatggtgtgaacctgggaggcggagcttgcagtgagccgagattgtgccactgcactccagcctgggagacagagtgagactctgtctcaaaaaaagaaaaaagaaaaaagcagttaggcctgctgtgttagctttttctgcatagaggcctacaccaaatatgacttatttatcatgttacttttcctgtttggagaatcaatgaaagaatgagaatgcttaattcctgagaaaagtagatgcatgctctttagaaggaaaaagatacagaaagaaggtgaaagccgcttaagacaaattgtagctcttcacagtttcattcattattgaagatctttagctgagcttggcttatcctcagagttctctgagaatgtgcttctcaaagtggaaattgtttagcatatggggtggtgaaaaggactgaagaactttggtaataaaaaccaaagcagcaggaaggaagtggtctgattagaaccaagtgcttgagcagggaaagacagcgtaagaaagagactgaagctgctgagtagttgtttcaagtaatttcaaatccttaaaggagcttgaactggaaggtaatgtggtctcaacggtttattctgggaagagacacgacattctctttccatctagacagtcctgccaggagggtgaaatctttgagaaagcattttgaatgcagtgataaggactctttattatttttgttgttgtttttattttaaccatttcaaacagtagttggggaactgaattgacatcaaaggtagaacagttctgtcaaccaatttggttagtttgaaatccacaagcacaattaaaaaaaatttattatgtcctgaggaattaacagctagtggtttagagtatgtttcagtgataagcgttttgtatctatgaacaggtgaatttaggagaccctccaaggtgtttctgtactcccttgggtcatttgaacaggataatttgaggtcctgtgtccaagagtgaccctcctctctgcttctggattcactcctagctcgtgtaggattcatgttgctaaactcattccaaacttggccatctctaggggtgacgataaggtgaagactcattttaccattttcttttgtcagccaatcaaagagcccaagagtagccattttttgttttgctttgttttataaacaggattttctctggtacttttttcttgccagaaatggacagagagctttaggaagaagaactggttgtgtttatgggagatatatttaggatgggctcacggagagtttgtccttgaagcaacgacttgggatgtacattaataaggtgatcctatttcttcttaatcttttatcacttatgaacatgtaactgactaataccactgtaatcaggcctcagttttctatggaaaggaagagaaagagacatggaacatctttaggggtagatgtgtgtgtgtgtgtgtgtgtatgagagagagagatgaaacagactgatgagagacagacatgaacttagacttagatttgaatgggaatatatctaatgagctggctttaaagtgggtcaggacagcactcaccttgctcaaaggagattggaggctgaccacgtagctcagtgtgcctccctgagagttcttctgtgctcctttatctgattggaaccacgcaaatgaccaccttggctgagctgcccagccttctcctaggttgagctttaaccatctgttggaggaggaaaattcccaagataacaatgaaagcaatttttctaaccatctggcttaacctgtaccacttcccttgaaaattgaatttctttttcttctccatagaggcattgaggcacgggttggattctctggggagcagcctcggaggggcttttgtatgcgggatgcgtatgaggagcactgatgggatcaacatttgtgggagggagctgggcagcaggattagcagagggagcggctggctttgacgacagccccctgggaagcccgggtgccgaaatggccttcaggattgtcccacgttgaattcacattgctgggcttatatgccccagccttgatcagtcattggatggggaacaccctgggaaggccgggtccttgggcagggcagctctatgcccttgagaggctggcagttgaagaccgtctgccaagagcactcccagcagctgaggcagaaaggccttgcttgaaagaggaactgtgtggtgcgtctctgtgcctgccacacgtgggatattgatctgccagttttaagcatttgaaaattgttaggtatggagtattaaatcacctgggtcggatggggactgagttaactagaatacaagtctctggatgttatcaccccattcctaacattttcgtaagatgtttattaatccttgagataaaaccactatattgctgggtgcagtggctcacacctgtaatcccagcactttgggaggtcgaggcggctggatcacttgaggtcaggagtttgagaccagcctggccaacatggtgaaaccccgtgtttactaaaaatacaaaaattagccgggtgcggtggtgcacgcctgtaatcccagctacttgggaggctgaggcaggagaattgcttgaacccgtgaggcagaggttgcagtgagccgagatggtgccactgcactccagcctgggtgacaagagcaaaactccatctcaaaaaaaaccaaaaacaaaataaaacaaacctcgctatattgttgctacgctatttctaaccatagctgtgttacatttaaaatgtgtaatattgtgtcttttctcctatgccttttagagttacatgtgtattattatggcagctgtatattttaggaccttctgtattaaaaactgttactcagttacagcttgtttgaaaacaactggaatctgtcctatagctcccactacttcaagatccatttcaaactaacatttgtaaaaatagtgggagatggtagttgctgtgctggataaaaggccctggacgtgcctggaacaactgggagggtcagagcaggcaaccttggtcccctgccacctggagttgctccttgcttctcttccatgccccgagccactccggagagtggattaagcagcacaacgccctcttcaggggaaagggtttcccctgcactttggtgaagcaagagtgcatggaagccatggtttggtcaccttcatggtgttcttttcttccctgtttcctcttccttttccaaagcgagcctttctccaggatgctcttctctcaattaaccaagcatgcttcccactccttaaggggaagagagaggtcttcctagcttgttttctgcagtcattgttgtcagggaggggagtggatggatattcattctgttccttaacccaggggagactggatcctctgcaacactgttgcagtcctgaagctgggtactgctttcaccctccagaccctacagcatagccttagtgattaagacagagagctctggaagcctctaggatttggcaaattacttaacttctgtacgcctcagttatcacatttataaagtaggaaaaataagaacccacctcacagagtttgttgtgaggatcaaatgagttaaaagcatgtaaaaggccgggcacggtggctcacacctataatcccagcactttgggaagctgaggcgggtggatcacctgagatcaggagttcgagaccagcctggccaacatggtgtaaccccatctctactaaaaatacaaaaattagccgggcgtggtgacaggcacctgtaatcccagctactcaggaggctaaggcaggagaatcacttgaacctgggaggtagaggttgcagtgagccaagatcgcgccactgccctccagcctgggggacaagagccagacttcatctcaaaagaaaaaaaggctgtaaaggacttagcacaccacctagtgtatagtaaacgctcagtaagtgtgcattgttattgtcataagaatgcctcatgcttcggaggtggttggtgaaggttggttgaattgagattccccaggttctcatggagctgcctggccacaccactgtcctggtaaccctgccaggccaagtttgatgagaagagggcatattggacacaggcctatgtcacttttgatattggaaatgaatttggggatttaatatcactatacctgttaagatgaaactggctagaaatctgtagcactcttcctgagtttttgcagtttgtatggattctgaagagctagcaaatgtctctccagtgcttatttccatgcctgtgttaaaatgtgtaaatgttgggccttctcaagagccaaaaatgcctttcatcttggaagtagtacttatctcccagggcgattaatgaatttagtccactctttggaaacagtccaccatgttttccaaggcatcccacacagccaatacctattaggttttaatgtttcttccatctaatttacaagctttttacctttcctatgaatatcagggcatgagaaagaaggaaagaatactaaaatagctgggcgtgatggctcaagcctgtaatcccagcactttgggaggccaaggcaggcggatcacgaggtcaggagatcgagaccatcctggctaacagggtgaaaccccttctctattaaaaatacaaaaaaattagccgggtgtggtggcgtgcacctgtaatccctgctactcgggaggctgaggcaggagaatcacttgaacccaggaggcagaggttgcagtgagccgagattgcgccagtgcactccagcctgggcaacaagagcgagactccatctgaaaaaaaaaaagaatactaaaatagtatggtggttaaaaacaagggctttggaatcagagatacccacttcctccattttctaggtgtgcaaggaagagcaattcacttaatcttctcaaacctcatcccttgtatgtagaccagaggtgattgtacctaccttacagtttgtgaggattaaactaaatgggatcgcgtatatgcagggctcagtgcagtggctgccctggcttcagtcccggaagtcctccctaaaggcagctattgttgtcgtcgttgttcgagtgatccgataccgcatagcgctgttcagtttttcatactctgtgatgacaggcgtgctgcttgaagaaatgtttgaactcgccttttctcaagttcattttctccaggtgatcctgcacacctgtgatatggctgatctcagggtatacatttctccggcacacaaaatttccttttcaccacgcacaattcatccctgatattagtcactgaacttggaaccgtctggttttgattggctagtcagggttcactgaggcaaattccttcctgagattgctccatatgttcaggaaagggagtgtttgtgagctgcacaggcagtaacgtagacatgaagccaggagacagcagcacgttgccattttcagctactcccagtgggcagctgggcaggatgattaatattttagcatctttgttctttctgtttagctataacactagagctgtttaaatcactctgaaaataacatgcctgacatttcctcagttaaaaaaaaaaagcaacttcaagtaataatcctctgcctattactgaggaagtgtttttggtgagaaaggagggaaaattagatgacttaggggagaaggataattctgaatagcttcatggtggagaatacattgaaacctaaaaagctcaaaggtgtgacccaaagtgtgtgtataagaggatgaggccgggcatggtggctcacacctatgatcccagcactttgggaggccgaggcgggcagatcatgaggtcaggagttcgagaccagcctggccaacatggtgaaaccctgtctctactgaaaatacaaaatttagccaggcctggtggcaggtgcctgtaatcccagctactcgggaggctgaggcaggagaatttcttgaatccaggaggcagaggttgtagtgagctgagattgctccactgcactccagcctccacgatagagtgagactccgtcacaaaaaaaaaaaaaaaaaacaatgagattggcatcagagggcaccgtatattccggatgtagtccctgcatctaggtccctcccacacttgttttgaacatttatgatctgctcacttctgacactcttcatttatgacacactcttgagatacttgagatttttcagcacatagagccctgcagaaatctcagtgtttaagtactagagacccgtgatcatggttggatctcctgtttcagtacttttcttcccttcttgtgctattttgctaaagttgctaagcaatcatttattcagcctactctgtgtaatgcatggagctaattttgagactttaaggattatacctagcggcagatttgtgatataggtgtaaacatttgcctggtatcgtagctgaatttctaagataattgcatgtcataattgaaagatcacaattgcagatcataatttacatccctcaccacacctttctatttatagaagtgcctgagaaaaatgtttctttctaaagcaactgctctttacaataattgcctctttcagctgctgctgtttaagaatcagatttaggaagatgtggagcatatatggtaattgtctcaaagaagaatatttcaatctcatgataaatatttgacttttatttttgtttttgtttttgagacagtcttgctctgttacccaggctggagtgcagtggccctatcacggctcactgcaacccctgcctcccaggtttaagcaattctcttgcctcagcctcctgagtagctgggactacaggtgcacaccaccacacccagctaaattttttttttttttttgagacggagtttcactcttgttgcccaggctggagtacaatggcgcaatctcagctcaccgcaacctctgcctcccgggttcaagcaattctcctgcctcagcctcccaagtagttgggattacaggcatgcgccaccacaccctgctaattttgtatttttaagtagagatggggtttctccatgttggtcaggctggtctcaaactcccaacctcaggtgatccgcccagctcggcctcccaaagtgctgggattacaggcatcagccattgcgcctggcctaaattttgtatttttagtagagacggagtttcaccatgttcaaccaggagttggctggtctccaactcctgacctcaagtgatccacctgcctcagcctcccaaagtgcaggcgtgagccaccgcacccagcctgtaaatatttgactttgaatgggtgaaataaaagtattttgatttggaggaaggaacttaatactaaaaatagtctcaatggaatagattgcagggatacctgttattatcagtaattctgtgatagcgaaacaaacataattgttactgtgtattgggtgctcactctgttccaggaaagtactataaagtattgtatttacgtaaattattgtatttaatactcatagtgtccctgtgagcggtaataacattaccattttacagatgggaaaactgagactcagagaattaaataccagcctcaaatcacgtagctaataaagaggtgaatctgctcaagctgtaaaccatgaggccagctaggcatagggatgtgttctgggatgaggattcttttacattcttcctcagtgagactcccctcccctcttcttagaagaccagggagctcttgctttactttttacctttcctgccagggtggatgaatattattccttggactttataaggctgtggcctagatgctgagtccctgtcttctggtgtctgggaagtgtggcgggccccttggccagtccatttctttagtcgttctgtcactcttcctcaatggatactgccccagtgtagaggaatccagaacataccccaagcagtccttccctgtacagtttcactttattaaaaggattataattagggtttcattggatgttttattattccccatgcttttttcctgatggaaattatttcgttgttgagacagagcctcgctctgttgcccaggctggagtgcagtggtgtgatctcggctcactgcaacctccaccttccaggttcaagcaattcttgtgcctcagcctcctgagtagctgggattacaggcacctgccaccacgcccagcgaattttttgtacttttagtagagacagggtttcaccacgttggccaggctggtctcaaactcctgttttcaagtgatcctcccacctcggcctcccaaagtacttggattacaagcgtgagccactgcacccggcctcctgatggaaatttttgaaagagaaaagaactcagggttgaaatgagattttcttctcaggttagtcacaaatgatctctgccttggtttgcttagaacttataaagccacaaagtgagtttgtcttcattagatcactccaggggctcctttctgcctttcttgtcagcctcaggtttccttaggtgaaggtctcatgcgcttggcctctgtgtgacttagtgagagacttatttgtgcttctcctccgatagaaccagccactgtcatgtttgttcccctgattctctaacccaggggtccccaactcctggccatggaccagtactggtacgtggcctgctaggaaccaggttgcacagcaggaggtgagcggcgggcaactgactgaagcttcatctgtatttatagcccctccccattgcttgcattaccgcctgagctccgcctcctgtcagatgagcggcagcattagattctcataggagcgtgaaccctattgtgaactgcacatacaagggaaatctaggttgcatgctccttatgagaatctaatgcctgatgatctgtcagtgtctcccatcacccccagatgggaccatctagatgtaggaaaacaagctcagggctcccactgagtctacatgatggtgagttgtagaattatttcattatatattataataataataatagaaataaagtgcgcgataaatgtaatatgcttgaatcatcttgaaatcaccccccacccactagtccatgtaaaaattgtcttccatgaaactggtccctggtgcccaaaaggctggagaccgctgctctaacccaccacaagcaccagctttctctgtgcaaattcacactttctcctggcagctgagcctgaatagtttagcctccctttgggcttactgtgaatccacacttcctagaaagtcaagactatctcttcttgactttatattggcttctgtctctatctctagcacccaaaggaacaatgtattcataattttctaaggaagctgagctagaatctagggtggtggtaggtggagggtgtgcacccttggaaaaaggtaattctgttgcccaccctctcaccttcctaccctccactggaaaccactcctctccatgttgacctcctggattgcctccatcccctcccgctgtggggttctgtgtatctgcttgtgttttggattggttcactgtctggatctgtcaaggaagataaccattttttcaggagctgtgtacatggtgaaaaatatacagttctggttgtaaggaactctcacttgggaatattattatttaaaaacttatacgttgagctcagtgctgtcacagaggtaagaatactgtggaaaggctataaatatttttccccaaagcaggggttggaaacatttttctttcctaggctgttgagactcacagggaaaaaaaaaaaaaaagcagtgatgaccaagttaagttttatagtggtaattaatttaatcttcccaaccaccttatgaagttagtattattattattcccatgtaacagctggggaaagtgaggctgaggcaatctaagtaacttggcgaaaggcacacagctaccaagtgtcaaagccagaatttgaacccagatcagtctgatgacaaaatatgttcttttaaccaccatatacatatttactgtctttctacatgataaagatatgttgttgttgtgaatttagtagtttttttttttttttttttttttttgagacagagtctcactcttgtctcccaggctggagtgcagtggcacgatctcggctcactgcaacctccacctcccgggttcaagctattctcctgcctcagcctcctgagtagctgggactacaggtgcccaccaccaggcccagctaatttttatacttttagtagagatggggttttgccatgttggccaagctggtcttgaattcctgacctcaggtgatccacctgtctcggactcccaaagagctgggcttacaagcgtgagccactgcacctggctgaatttagtaattttttaaaaagatattcaaaatacaaatatgactgtgcttatctacctccttcccccagaaaggaatgggagtgatagtaacatccaagagttactagtaaatattgtgatatgattgtggagtgagggaacagttgcattcccagaagctaaataagcatttcctaactatgaaagttttttttaaccctttcatacactctgaagccccttcatctcctttatcattcccaaagatgtatactcaactgcaaaagaaggagactttgctactggtatcacaggatagtttcttgttgtgccctttatgaagccattgtctctcaaccccaaacatggccttctgtgccctcctgtgtgatgctggagctcggcctctgcaagccacatttctgtcttgccagctgcctctctattcggctctgccagtagcgagttctagatgctgcaaagctgcagcatccttctagatgccaaaaaaacttatttgatgtgtttttgaagaatgtggtagaaagcaacagatttcagctcaactcttctgtgcttaagagccagcatattggccaggcgtggtggttcactcctgtaatccgagcacttcgggaggccgaggcaggtggatcacaaggtcaggagatggagaccatcctggctgatatggtgaaaccccatctctactgaaaatacaaaaaattagctggacgtcgtggtgggtgcctgtagtcccagctactcgggaggttaaagcaggagaatggagtgaacctgggagacagagcttgcagtgagccgagatcatgccactgcactccagcctggacgacagagcgaggctccatacaaggaagtgatgtgtatttcccatttgcttcctgtgagcttcccgtctgtggtacacaagatacgcttcttcaccctggcagcagcagttctttccctgaggcagcagctggctgaattcagtccacgggtttttcaacacttgcacaatcagcctcttcaggtaccctggagacacttgtgtcacctgagcagcacctcctcctcctcagaatttcgagttcacttccatgggggccctcgtccaggctctttattttaataattttcacctcttgcttttatctcttctgctcccatgataccttagagttctgtttttaccctctcacctagttaacaactctatgtcttgttaatggctctctctgccttaaattctttctgttaaaataactggagtgggccgggcatggtggctcacgcctgtaattcgagcactttgggaggccaaggcaggcggatcactaggtcaggagatcgagaccatcctggctaacacggtgaaaccctgtctctactaaaaaatacaaaaagcattagccgggcgtggtggtgggcgcctgtagtcccagctactcaggaggttgaggcaggagaatggcgtgaacccgggaggtggagcttgcagtgagccgagattgcaccactgcactccagcctgggcaacagagtgagactccgtctcaaaaaaaaaaaaaaaaattaaataactggagtgatttctgtcgcctgatcagaccctggccgatacgcctatataattcaggcctctgctgtttggcttcagcttcgttcatcatatgacactgtcatctggaagagcagtcagtcctctaagcagcctctctgatccatacttcatattgcattgggagtgctggatttctttgaggaacaagagcacgagagcaaactcgaagttagaacctctcgtatattttctagcaagtcatgcattggtcttctcaaagtcatgattacttttgaattattttaaaaacttatttgatgtgtttttgaagaatgtggtagaaaacaacagatttcaactcaactctcctgtgcttaagagccagcatattggcagggcacggtggctcacgcctgtaatcccagcactttgggaggccaaggcgggcggatcacgaagtcaggagatcgacaccatcctggctgacatggtgaaaccccatctctactaaaaatacaaaaaattagccaggcgtggcagtggtcgcctgtagtcccagctacttgggaggttaaggcaggagaatggcgtgagcccaggaggcggagcttgcagtgagccaagatggcgccactgcactccagcctggacgacagagcgagactccatctcaaaaaaataaaattaaaagccagcatatttactcctccatatataatagtatatgcagaggtaaccataactagaatacatagtaaaattcaaacgagccttggttttcttagcaagattggtttaagtactggacctttagttataagtattctgtaaatagtaactttctgcccttcttggtatttgctacattatagtgaatatgatggctgactctccaacatccattccaaattcttatcctatgccaatcacagtgaacctattctccttgtcaaaaattggattgataatgggcaggtaacccgtttcagccaattaaacatgaaggaaaatctgctctagggcctctggctaaagttttcttcctagaaagaaagagaccagaaagaggtgtctcaccttttttattcctctacaaagtatgtctggatgtggcatctgaaacttctctaattagtaccttatgatcatgagaacagccagcctgagggcaaagccctcattgaggctggaagagcacagagattatggtaggcagaattatagcccccactagagatatccatgtcctaggctctgtaatctgaagatgtgttactttacgtggccagagactttgcagatgtgctaaggaagggtatggccttgagatggagagagagttttggattctctgatgggcccagtgtaaccaccagagttcttaaatgtggaagagggagcaagagagtcagtgttagagtgatgtgatgtgagagactcgagcagtcattgctggcttagaagatagaaggggccacaagccaaggagtgtgggcagcccctagaagctggaaaggcaaggaaatggattctcctggagcctccagaaaggaagacagcctttctgacacgttgattttaacccacggagacctacgtcagacatctgacctctggacctataagatgataactttgtattgttttaaggcactaggtgtgtgggaattggttatagcagcagtaggaaactagtaacgagatggaaagaatgatggctgcttgatgactttgcagaacctcagcattagccaactctagagcaaccctgcatttcttaccatgagagacacatttctgtgatgtttaatccagttcgagtctcattttctgctacttgcagccacagctgtcctaagcaagatgcatacgtacttagcagagttctgtgtctaaggcggactctaaatgagtgtttgctgaatagtgaaaaaatgcaggagaaaaaaaccccagaatccacatctaaagaagcagggctgttttccgattcatagtaagtgtaataacttagaactttttttttgttttttaaaaataaaagacacaaaagatgtttggaaagatggataaattatttgaatgctgagatggcctagaacttcagcaggtgcactttcaaattgccagattcatttcctatagtgacctccaggcattcagagtctcttttctgaaataacatttcagcagattctgtgaacatgccaagaagtgattatttttacaaatccagatgatttcctaatttaggatggctcaagcagaggaagaaatgaagggaaacatagactctttttccatctccacagagtgggaacagccctggtactggcttgaagcaaatgttgctgacaactatgaaagtggttatcaccggacagctgttcagtggcctcagtgaactcagctggaggcccagcccagtttcagatcagagaggccaaagatcaaatggtgtttcatttggtttccatgccttttcttcactgcctctgggtttcaaattagtttttgtaatttctgttccaaagactgtcctgagacccacaagactcgcttcatctgccaccccccaaatacacttgcttagcctcacttcctccctctcctccctttcaccagcaaatgggtttttttaaaaagtaattcatttccgtgggaaaataggaattctcttatcatgacacccagcccctacccatctagtgagggccttctctgagggtggcgtatttaaaagcttaacagccctgatagttaggattcctcccaggatctgaatcctgggtgaaacacagttggatcgtcaggttagggagggagggtgtgctgggagagtaaattgtgcccccagatcccagatgaggatgagctgtacactgcagatgggtttgttgatatgcctttgcatatgagaaatggtcagaatcctaattagacttattggttgcgtacctcccccttatagtagcaagttgtaaagttttagaaataattttcagagactcttggctggaagactgttacagagttagcccactttgtgaataatattgtatgtactgtctgcagaggacattgactgttgctgaagtgtctgtattcctgtccatattttaagtttctccttttcttcccttcctgataccatagtcaaaatcttactgtttttattcagttttttaaaaattcttattgcattgtaatattttcatttgtgcttttttttacaccaagataccaaaatattttccttgctgtgccttttcttgtagccaccaaagccttcactatttttcttttattttgttttgtttttatttattgattgatttttgagacagagtctcgctctgtcgcccaggctggagtgcagtggcgtgatctcggctcactgcaacctccgcctcctgggttcaagcgattttcctgcctcagtgtcccgagtagctgggattacaggcgcgtgccaccatgcctggctaatttttttgtatttttagtagagacggggtttcaccgtgttaggcaggatggtttcaatctcctgacctcatgatccgcccacctcggcctcccaaattgctaggattacaggcgtgagccaccgcacccagccttgttttgttttttaagagacagggtcttgctctgtcacccaggctggagtgcaatggtgtcatcatggcttactgcaacctcaagcaatcctcccacctgagccttccaagtagttgggactacaagtgcacaccaccacacctggctaattttttaattttttgtagagacggggttttgctgtcttgcccaggctggtctcaaactcctgacctcaagtgatgctcccgccttgaccttccaaagcgctgggattacaggcatgagccactgtgcccactttaaactgtttaatctactgttgtaaaaacattgtacctgaatatattcctgagtgtaagataattttttttgtctccaaagaggatgatccatcctctgccccctagaacagtttctttcccaaatcaatagttcccccttatatgtggtttcgctttctgtggtttcagttacccatggtctgctgcagtcccaatatattaaatggaaaatagcaggaaaaacaattcataagtttttttgttttttttttttgagacagtctcgctctgtcgcccaggctggagtgcagtggcgcgatcttggctcactgcaagctccgcctcccgggtttgcgccattctcctgcctcagcctcccgagtagctgggactataggcgcctgccaccaggcctggctaattttttgtatttttttagtagagatggggtttcactgtgttagccaggatggtctcgatctcctgacctcgtgatctgcccgcctcggcctcccagagtgctgggattacaggcgtgagccaccgcgcccggccagcccggcccataagttttaaattatgccctgttctaagtagcatgatgaaatctcatgccatcctgctctgttccacctgggacacgaatcatccctgtgtccagcatctccatgccatacgtgctcccggcctacgagtcatttggtagccctcttggttatcagattgagaaagggtttggtactatctgaggtttcaggcatccactggggaccttagaatgtatccctgaggacaagcggggactactgtgtatacttttaggactatagctgaaataatcaaatatgatattcaatttatttaatgatgtatatataatgtagaaaacatatttagaatatagtcattccactttaactttatgacatagtttcttataaacgcttcctttgcaccagtgtctgaagccatgtgagagcggtttcccagagcctcgccttccctcttcttcaattgccatccatgcttccccatccagactggtgacttttacagactcttacccataagtccccttaggagagcaagagactcatggcacaatttatttattaactcaacacatagttattaaaaatcctccataagaaagacaagtagccaggtacggtggctcacacctgtaatcccagcacttttagaggctgaggtgggtggatcacctgaggtcaggagtttgagaccagcctggccaacatggtgaaaccctgcctctactaaaaatacaaaaattagctgggcatggtggcacatgcctgtgatcccagctactcgggaggctgaggcaggagaatcgcttgaacccgggaggcagaggttgcagtgagccgagatcacaccactgcactccagcctgggcaacagagtgagaccccatctcaaaaaaaaaaaaaaaaaaaaaaagatgagtagtgacaggaggtataaagtgctcttgaaggttgtatacagttcataccttcctgtctaattcagatctgaatatggtaggtatccttcaccatctgtcccacaattagattataaattggtgttaattacaatagtgttttctccatggggtaaacataatgatggtgagattactatcacagtagcagctgagctgattcataatgatctttcttgattttcctggaggcttacagtggattggatgaacctaccctatgaaccagggtcagtgagtttctagtcataggaaattaacctttcggatccccacaccattttctagccatactgagtactaaagatgagaaacatctaaaagaaggcccatcctggccaggcgcggtggctcacgcctgtaatcccagcactttgggaggccgaggcgggcagatcagttgaggtcaggagttcaagaccagcttggccaacatgatgaaaccccgtctctactaaaaatacaaaaattagctgggcgtggtggtgggcacctgtaatcccagctactggggaggttgaggcaagagaatagcttgaacccgggaggcagggttgcagtgagccgagatcacgccactgcactatagcactgcagcctggcaacagagcgagactctgtctaaaaagaaaaaaaaacaagggccatcctactgggatactttgttatccaacttcccaagtagatttttaatcttaaaatcatcaacaaccaaggcagtgtagaagtttatacattgagaacacccgtcatgtgacaacctttcaagggtttcaggtgctcgcctacacctgagaacccctagctgttctgctttgtcacaccgagagccaaagctactgccaggctgggggaccatttgccccaagtgttcatttggcttctgcggcatcgggttcagcaccatcccaaagctgggcacttcctaccacctacctgaacctttcagagtggcagtgtgttgtagaggactaattccttctcacaggctgtatcatagttgagtaagaactagtgttcggaaatagaaacacacatttaacttctagttgagcaaagatttttttttttctatttttggtaactaatttcattaaagatagaagagatttttctctcatcccacctttctccgatgtcaattttctttctcataagtgctcttgtgtttgaaagcagggaaaataaagctaattgtttcaggtatttttagataagagatgggctccaccaagaagctgtcaggtacttggagtgtccagggtgaaaacatgatcagaaaaaaaaaagtcaaagaagttactaaattaagttatagttactaagtaactagagtttgagtcatatctcaggtcataatggtgaaattgtcattggaatgtatgtcatagttacacattattatttgactccagtaggacaattcatgcactttatattaagagagattgcaataaatccttccatgttttaactgaaaccatcaaggtaatttaattggattaagagaaaaacataaatcagatgcagctcaaattaaaccaaataagaaagaggaagcaaaatatcaaactcaaattttctaagcagtgaaacttttgttccgttttctaagaattcatggtgtccatctctctctctctctctctctgtatatatgtatatttttgtgtatatatgaatatatttaaattgcacatttgtttatgaagtattcaaaaataatcatttttggaaaaatctagcaacttgggtatttttctatttttctttaaatattcattttttattgaaaggagaacttagagatgggtttatttataaagttataaaaataatttggacatatatatcataggagttaaattatatctcttggaataggaacttttactgaatgcaaagtatataatattttcacttcattagacaccacgaaccctagcaggggtcatagctacatcagaggtaccattttatttagaaaaattttaaaaactatggtttccaaagggaattagtgcttactttggaaagttacattaaacgtggagatgatgccttgtgtaagttctcgaactgagatgtctgtcgccgtagatcacacacttagtaacaaagtgtgacatggaaagatgagacgaaatggcattgacttatgggatcctgttttttctccacagagagatacatatatgtggaatcaagttctgaccactccaagtctagcttgaagaagttgttaatgggattatggtgtggattagatctggaaaaagtgaataattcccaagataaatgctggaagggagggacggtataaacaaaggagataattttaacatatatgccagaagatttgagggcttaagtttgtgtaagcaccattgctttaagatagagtgaggaagtgatataagtaaggctgtcttattcatttttgtgttcctggtactgagcgcagggcccagaacacagtccatgcttggcaaatcttttttgtgttactggacaaaaaggcaggacctcttatggaggaaggctgcaaaagaggccttgtttcaggatgtcatttggacttcctgcattgctggttaagagcaggtatgtctacaaaatactgagaataccaccgagaaataaaattccttcttaagaaatactgctgtgtgaatggggagaaaagtgctgacttgaaattgatcaatgagtcctaccttgccagattatcatgctggtctttgctagaatggcagaattaattagatttttataaaataaaacaaatcatcaatttatattatagctagataaaaatgtgcctatgaacatcggtaaaaattagaggaagtcaggcgcagctgcatgcttcgcagctactagggaggctgaggctggaggatcgtttgaggctagtctgagtaagatagggagattctatctctaacacacacacatccgtatatatgggtcttggagaatttgaaggaatgtctatcattacagcattattattttttactaccttttttagtgtgaggtttatttagttaaatttacatgtaaggtcaggcgtggtggctcacacctgtaatcccagcactttgggaggccgaggcgggcagattacttgaggtcaggagtttgagaccagcctggccaacatggtgaaaccccatctctactaaaaatacaaaaattagccgggcgtggtggcgcatacctgttttcccagctactagggaggctgaggcagaatcacttgagcctgggaggcagaggttgctgtaagccaagatcgcaccactgcactctagcctggatgacagagcgagactccatctcaaaaaaaaagttacatgtagcaaatttcatcttttttttatgaacaatttaatgagttttgatatatatacttgagatataaaacaagtccatcaccttcaaaggttctttcattctcctttatttattttttaattaatttttgagacggggcctcactatgtttcccaggctggcctcaaactcctgggctcaagagattctccagcctcagcctcccaagttactgggactacaggtgtgtgccacctgtgcttggctcattcaacccctttacaggtagaccctcttctcactcccagcccctgggcatcactgatttgtttgctgtccctcaagttttgccttttccaaaatggaatataaatagaattgtgaagtttgtagctttttgtatctggctgctttcactaagcataatgcatttaagatttattcacattgttgcatacatccgtagtttgtgcctttttattgtggtggaatagcttattgtctagctgtaccacaatttgtttgtttgtttatttatttttgagacggagtctcgctctgtcgcccaggctggagtgcagtggctccatctcggctcactgcaggctccgtcccccggggttcacgccattctcctgcctcagccgcccgagtagctgggactacaggcgcccgccgccatgtccggctaattttttgtatttttagtggagacggggtttcgccgtgtaagccagggtggtctcgatctcctgacctcgtgatccgctcgccttggcctcccaaagtgctgggattataggtgtgagccaccgcacccggcaatttgtttgtttatttaccagtggaaggacattgagttgttttcagtttgtggcagttttgactaaagccactacagatgggtatgtttggatttttgtgtgaacaattgtttttatttctcttgggtaatcctgcctaggagtaggattgctggtttgtataagcatatgtttagttttctaagaaactgatcaactgtttctaaggtggctggattatttgcatttccatcagtggtgtatgagagtttcagttgcaccttattcttgtcagcacttggtattgtcattttagaaatttttttaatctatgtatctttttaaaaaagattgcagtaatatatatttttttaataatgtagagaactgacccttacctttcaaaagcaaaaacatctgtctttctctgagaagcaaaaattttgtattaaggtcatttctgaaaataattagagtcagtcctcattcatttgtggcgctcatgttctgtaaagtcaccgtgaacaccaagttagtgcatactgaaccactgttcttaggggaaatacagcgttagggtccctcaagctcatagcattttcatcaaccaattaatgaaaccctgcttctaagtgtttctgttaaggacatattattttatatacatagataggtatagatagatagtgggttaacattgaactcctgggcaacagcttgaatgaaacttaccgaatacatgtattttctccgtaacgcacattgcagccttcttgtgcttaggaacgccaaacggcactttagcagtacacttggggccattttaaacggcagaatcacaacaagcaacaacagaaatgtgaaagactaaacacaccgccgaaaggacacttgtttgcagtatgtggagctgaaacgagaaggcagggcgttgccttgctcagcctcagttaggagtgtgcgggttgggcgactcagactttttgcctctctgtgcatgttcacgaatgactctgaaagttcctcaaatattgtcttgggggttacaaataagttttagcaagtaggcaaattcataaatatgcaatccatgaataatgaggatcaaactttttttttttttttgagatggagtctcattctgttgcccaggctggagtgcaatggcacaatctcggctcactgcaacctctgcctcctgggttcaaacagttctcctgtctcagccttccaagtagctgggactacaggcgcacaccgccatgcccagctaatttttgtatttttagtagagacagtttgatgatgctggccaagctggtcttgaactcctgacctcgtgatctgcctgcctcggcctcccaaagtgctgggattacaggcttaagccaccgcacctggccaaccatattcttatattttagaaaatgcataaacttagttcagttgaaatgatctgtaatgatttggtttaatgccaaacatcattcaatttttttattccaataaattgatgagaacattaatttgccaaaccaggaccatttggtatgaagattgctttaaaaacttctcaaggccgggtgtggtggctcatgcctgtaatcccagcactttgggagactgaggctggtggatcacttgaggtcaggagttcgagaccagcctggccatcatgatgaaaccccatctctactaaaaatacagaaattagctgggtatggtggcaggtgcctgtaatcccagctactggggcggctgaagcagaagaattgcttgaactcgggaggccgaggttgcagtgagctgagattgcgtcactgcactgcagcctgggcaacagagcaagactctgtctcaaaaaagaaaaaacaaaagaacaactcctcaaaatcttcctaagattttatccccaggcaaatgcaaagacatgttcttgattttatattaaaaactcttgtgcaccattctaacgtattgtgcacacacttcattcttgtaatttaaaatgttgaactctgaagttttgtcatagtaatagctaaagggtatgtgtttaaattcaggaacagattaacgcacttaccaaacctccattgcttaaaagtaattataagttttctagattgactgccaatataatataggccccaaagaaatcacccctctttactgagacagaacaataaattggttttcctgaatacggtgggtaaagaatccaagttcttgaccttgaatatttcactgatcgtattctatgcagtagggaacaatcaggatgacatttgctgaaatgtttgagatttataacataatagcttgagcatatgtgccaaaaaatagaaatcttaaatcctatcaaatcaagattaattacctattaaaatactaacaaatagtgcaatacaggtggcataataagctgtctctcttcatatattgttacaaaacaaactgttttggcagtgacatgaaacatcacggatcttctgtctcactctcagtgggaaaacggaaaaaaactgctactcagtcattcttggtgtggattttggcatttcattaggaagtgctatctcaaaccttttcactgaaaagcacatgcaactctctggaaactgctatatttcctggctttgtactactgccaaaaaaactgttgcttctcctcatcattaactactacttatttattcctttctatctttgtggatagtaacccgtgtagcactcccgtgaaaaggaaaacagtagtttgcttcctcctcctcaccagccttgaagaaattaatcccctgggctaaatttcttctttatattcagctttcacttcacactaatagtttcaactgtggacgtggtggtaatagcagaaatggtgcagttatgtttgtatttcttcattaaaataattttcgaaagttgtgggaaaatgctcatgaaattttatcattaaatctgagctagaataataaagcacagtgttgctaagttggcttccaatgaatagtcagtcagcaaatatttagtgaggatctactatgtgccaggcattcttctaggctttagtgacaccatggtgaataaaatagtccctggcccccatgtaattattctgttttcttgtgctaaatgtctttgtttaaaatattttttaaggaggccacgcacagtggctcacgcctgtaatcccagcactttgggaggctgaggagggcagatcacaaggccaggagatcgagaccatcctggctaacatggtgaaaccccgtctctactaaaaatacaaaaaaatcagccgggcgtggtggcaggcgcctgtagtcccagctactcgggaggccgagtcgggaatggcgtgaacccgggaggcagagcttgcagtgagctgagatcacaccactgcactccagcctgggagacagagcaagactctgtctcaaaaaaaaaaaaaaagagaaaaaaagaaaaaaatgtatattctttaaggaaagatgatagaaaagatgtgcaaaaaaactgctattgaaaaagtagtgtgcttaatgtatcttcatggtttaaaaagtgggtaatagtttggaagtgggtcttttatggtttgaaaagcatgcagaatcttggaaaatttaatgactcaaacttataaaacacggtacctgcttgatctgttattccgatttacaacttaggtaccagttttcttaagtaaatatgccttccccgcttgcgtggtgttttaaagctcttcattccgtgagccctcacccccacccccctaaccccttcccccaccatccccccctccccggccaccactcttcgcattctaaaagaaacccaggggcatgccattcttctttctgagaccctggactgtctacctctgagtggtgttaacaagctgtaccttttcatttgttttttaccaaacaaactctttagcagtgacatgaaatatcatgtctcttctttctcactcgcagtgggaaaaggaaaaaagaaatgttccttggtcgttctctttgtggattttggcatttcattggagtgccaataggtattcattttttatgttgctctggaaagctgtaagcagccttcaaagtcacaaagcaaactcagtccctaacggttctccaaacttaggtcagaaaggtggggaactttatttttctgggcagagagtgcatgaataatacacttgcaacctgctcagcttccctaagttctctttagctagcttctccactcgaactacacatcaatctgtcaccagtggtcagcagctcagcagagagccagtgttattgtgaacctacggtggaatgacttgcttcccagctggtgatcaatctgtgttagacggcaacatgtttgcttctacaaatgagctggacccctctgtaacatatctctgccaacttttgaaagaaagagtctgtttcaattcttttccggggtaaagacaaaaagcctgtctccctttgcacaaccagctattgaacaatccgtgcaaatatttacagccagtatcctaaagaaattgttttcagaggtcaggaagttgcactaaaaaaaggaagaaaaaatacatgtttgtgtgcatacatagaagataaatatattttgcttttctttagtaaagatgatgtgctcatggatgcaccatctctggagacttctcccttatatataaaaagatcttgaggtttaggactttagctgacttctccaagctcaagatgaaattaacattgtgttactgctatggaaaatgctacacaactttaactgaggtttattattattaattaaggaaggaccagatctaaactggaaataattccaccaaatcagcgctagtcaggacacacatgatttgtcgtactgattgtgaactttcttaagattcactagggcagagaggggcaggataatccagaaaccaagggctagcagatgcgctttgcgttgttagagctgaagaagtaattaagagaagaacagacagggaggggtggctcatgcctgtaatcccaatgctttgggaggccaaagtgggaggaccgctcgaggcaggagtttgagaccagcctgggacaacatagcaagactctgtctctataaaggagagagagagagaaagagagaagaatgtgcgaaagtgtgtgtgaataaagaatgggatgaggactggtggacaggaaatagaagtgtgagggaggtctttgtgtcaaactaggtatgatacagtgctatggtatgttctggataggtatgaatgaacacgatgacagaaatcattcgtcgtgtcacatgatgacacaggaagttattcatgaaaagggccaggcaaagtggaaaactttgaggaagggccaaaaaggaagggtgtatattgggtatttggtaataagagctgatggtccgccttgcctgtgatcatgtcagcccaccagacaaacagcttctgtttagttgtcatttagtagagaaatacaaaggaacattggaatgttttgcacctatggtaggtggggttcctcatttctccttagagaagagtaggggttccagacccacagaggagccagtagaaataatataaatgagttaggaagaagagaactctggaaaaggagggttggaaattaccttggcctcagattattgcacagttggacaatgactgtggttctgtggctcaagggagtggctctgtgtggctctatggctcaaggggaatggctctgtggctcgggggagccctagaagggatttctttgttaagaagcagttattaggtgagcttagtggtaccctccaatatcataccacatgaactcgcaacagactgtcccacattgcttaatttaaatttccttggggatgcggactgtgtgtggtctatctttgtgctctcccttacatatagtaggtacattgtagatgcttaatgaatgagtgactctagttctgttctgggaaagagaaaagagttgaaggccctatggctgctttcagtagttgatttaatcattcagctccaaacgtgaagattagcaactcctaagaatagtggtggttgcccttttggatatatgatcctccacattcccaagcctgtgtttgaaggtaacctgcaaggaggacacattacagaagggcatgattatcttctttgatgttaactgccatgatgactagtatcttccaaacatctgagcaactctccatagcaccctgtagcccctttatctatgagattatcttagttcaatctataaccagaatgtctccacatttcatcagcttttgactataaatgcattacgttgatgcctctgaggccatattaacattatcatccatacctgactgactcccctctctaaatgttttaatgagtcccaagaggatatctcacacgttcttaggagtctggctgctaataatataccacaccactgctactcatctataccacctggagacaatgcttgcccctcagtgctgtaatttgggacctccactattcacttcttttgctccaaggtgaccactaaagtttcaataaagaagatacaggccgggcacagtggcttgttcctgtaatcccagcgctttgggaggtcgagttgggcaaatcccatgaggtcaggagtttgagaccagcctggccaacatggtgaaaccccgtctctacaaaaaatacaaaaaattagccaggcgtggtggcacatgcctataatcccagctacttgagaggctgaggcaggagaatcacttgaacccaggaggcggaggttgcggtgagctgagatcactgagactgcaacactgcactccagcctgggtgacagagtgagactccatcttaaaagaaagaaactatggcttgggagtaatgtagatgatggataggagcggggttgggatggtagacagggaaaccagtcaggaggtggcttgaagtagttcagtcatgacatgatgttggcctagactggagtggttaggatgagaagatagggagagaagtggatggatggaggggaggttttaaaagtagtaggaccagtgattgattgggttctgcctcaggcagctgcatagatgacaatggccttgactgccatagggcacacaggaagaaaaacgtgtgtggcggtaaagtgagaagacactgagttcgaagacacgtggggtgctctcagcttaggtgtgtcagaaatagtatgctgcttttgaatctggagctcaggggagacctataaactggaattttagatctgagagtcagcctgtggatggtaatcaaagccatggtgccaggcgcggtatgtaatcccagcactttgggaggccgaggtgggcggatcacgaggtcaggagattgagaccatcctggctaacacggtgaaaccccgtctctactaaaaatacaaaaaattagccgggcgtggtggtgggcgcctgtagtcccagctacttgggaggctgaggcaggagaatggtgtgaacccgggaggcggagcttgccgtgagctgagatcgcgccactgcactccagccttggcacagagcgagactccgtctcaaaaaaaaaaaaaaaaaaaaaagccatggtgctgagcatagatggagaagagctcagcgtcttagggcagcgccttggggagccccattatttacaggaagggtgttgtgaagtagcagtcagaaaagaatgaggacgatcaggagtgtgattaacaaggtcaaaggatataaggatatttgactcagtttcttttttttttttttttagatggagtctcgctctgtcgccaggttggagtgcagtggtgcaacctcggctcactgccacctctgcctcctgggttcaagtgattctccagcctcagcctcccaagtagctgggactacaggtgcatgccaccacacacggctaatttttgtatttttagtagagacagggtttcatcatgttggccaggatggttttgatctcccaacctcgtgatccgcccgccttggcctcccaaagtgctgggattacaggtgtgagccaccgtgcccagccgtatttgactaaatttctaaaggtcctgtctcattttaatctttttgcattatgttgtattcatcttagcatttgccccttcatactcaggattagtaattatttgagtacatcttcacgcctctcatttggcctgagtttgaaatgttaactccagtttggaggtgatgaaggaagcatgtgagaaaggatgaggcacaggagtggagtcaacccctgggagctggagatggagaggaggccagccatggtgaagcgaaggaggagtgggtgatagctttggggaaactgaaatgcttgtaggatatggagccggcatttcaagtgttgggaaattactgaagactgttcaaaatgacagtaactgtggtttaaaaaaaaatcaggctggatgcggtggctcacgcctgtaatcccagcactttgggaggccgaggcgggtggatcaccttaggtcaggagtttgagaccagcctggccaacatggcaaaaccctgtctctactaaaaatacaaaaattagctgagcgtggtggtccacgcctgcaatcccagctactcaggaggctgaggtgggagaatcgcttgaacccaggaggcggaggttgcagtgagccgagatcgcaccactgcactccaccctgggtgacagagcgagactccgtctcaaaaaaaaaaaaaaataaaatcattgattcactatgattgtattgggcaataatgtgaaacatcatggacgtcattgaccaatggagataactgcagtaaattgggggtgaagtgttaactaagatggtgacaatgagaatgaaaagcaggggacacatttgagagggattataaaggaggaatcggcaggtttgggggatggatctgaagggaaatccaagtggaagggatgaatcagagaggattcccagcctttgagcacatataactaggtaggtaatggtactaataacaaatctccaaattttagagttaggaaatatgtttcaaatcatccgattccatgtttcttaaataggctgtaagggagtatccagattggaaaccattatagaaataattgtcaactcttctttatgacttccttccttttgcccttttcccagtggtattttccatggttctggaaatgacctactttatgccaccactatatttaggctgcaaatttcccctgtccatcctgaccaaggtttgaacaatcccatgtggagaggaacttaattgcagaataccctttgccatgcgtctttttattttccctatatgccgggggtacttttggggtgagaattgaaaaggaaaaaatggtaatgtgtgggaatgtgttccagctccagacttcctcctcaccccaccaggaagcagtattgatggtgctttcctgattaaaaaattgcaaaatttggccaggtgcagtggctcactcacgcctgtaatcccagcactttgagaggccgaggcaggcagatcacaaggtcagcagattgagaccatcctggccaacatggtgaaaccccatctctactaaaaagacaaaaattagctgggcatggtggcacgcacctgtagtcccagctgctcgggaggctgaggcaggagaatcacttgaacctgggaggcagaggttgcagtgagccaagatcacaccaccgcaaaaaaaaaaaaaaaattatatggcagtaagtacagtagtgatcataacaattagttattatagtgtggagaagatatgactattgaagatataagtaaattttgcaaactgatatcaattttttaattgtttacaaatgtccagccacattgtatgctgctacattaaaataagtgttttgttaggcattggtcttcaccaaaacaaatgctatgttcaaatcatgagaaataatggtcttgctctgctcagtactgttaaaaattcatctgttttgtttgattcagttatgcatgctgcattaatgaactggaataccttatctagaattgggaccaggcccaggtgaaaccagcaaatgatatcatgtgaagtgccagagtatagagctaggatcagcaagctatggtttatcccgtttttgtacaggtcatgagccaagaatggcatttatatttttaaatggttgaaaaaaaatcaaaagctattttgtgacacatgaaaattatatgaaatccaaaccttagtgtccataaaactttttgtaaaagcaaaacaaacaaaaaccagccatgtttgtttgactatggttttttttgttgttgttttttgtttttttgagatggagtctcgctctgtcacctaggctggagtgcagtggcgtgatctcagctcactgcaagctccgcctcccgggttcatgctgttctcctgcctcagcctcctgagtagctgggactacaggcgccaccaccaccgcccggctaattttttgtatttttaatagagacgggggtttcaccgtgttagccaggatggtctcgatctcctgaccttgtgatccacctgcctcggcctcccaaagtgctgggattacagacgtgagccaccacgcccggctgtttgactgtgtgttatgtatggttgcttttgcaccgcaacagcagttttgagtagttgcaacagagacgtatggcctacaaaacctaaaatatttaccacctggcccattgcagaaaatgtttaccaaccactggtctaaagccgtgtttcccaaaccttagtgtgccaatgaattacctggggatcttgttaaaagacagatactggttcaggagggccaaggtgggacctgagagtcagcacttctgaccagctctcagacgatgccagagttgctggtccttggcgcacacttgcatttatacgatatttaagaggtgggtgggggaggggggtagtgtgttgtagaggagagatgatcaaatgttttacagtagaaatggcctttttttttttttttttttgagatggagtctcactctcacccaggctggagtacagtggcacaatctcggctcactgcaacctccgcctcccgggttcaagcaattcttctgcctcagccttctgagtagctgggacaacaggtgtgtgccaccatgcctggctaattttttgtatttttagagttggggtttcaccatgttggccaggctggtctcaaactcctgacctcgtgatctgcccacctcggcctcccaaagtactgggattacaggcatgagcccaccgcacccagcgagaaatgggctttttataccttatttcaaaggccagaataagtaccagttgattccagctctgctttttaccttaggaagaactttctaatgattgaaattcatcatggaatcactgcaatggccgcaaacagaggcgtctaagagactgggaaagtggccggcctggtgagatctccagcttaatttctttgactgacaaagaaaaggcaaagtgagagtatgaattagcaagccagacactgaattgcttatagatataaggcctagcctagcagggacagtattaattgaactaatctcttaaatggcacaactgctggtttacgtttgtaccaggaataagtaactattgaggcctaacatgaaatcaactcataaagagtaaatgtgtagctgtaggtttataatttaatttgtactgactgaaaaagctacagttgtcagacgtctgcaatttcattttttcactcatgagccagttaaaagataatccctgccattgttactcttcgcttgtgtccatttcatgcacatcccctccctgaaagctgttgtatcagccttatgaatggatgtatatttgtaggtggatcttccagctgcaagtcattgtagccctgacgagtgaatcctcttgttaatggctcctttaagcagtacttttggtggggaaagaaaagagagaaagaaactagccattttgagcaagccaatcaatgttggagaccagagcgcatttagacagatgatcgagtaatggaatatttaagcaacgcgatatttgctattgatgaatacttttaaaaccataaacctcattaaattaatagtacaactgtctgctcaaaattcagtgagtgcttatagtcgtggtttcattgtatttctccactttgaacgcttttcatttcagcttgtcacaggcttttaaaggcatgatttatgcttcataataccctaaggaggttaagtattttcatatttattgcacagaagagtattttgtgattgcttgcctgtcctaaaatcagcttggctggaaaaggacctaagaattctgacctcagctctgtatccaaaccaggagtcagcgtttgaaaaatgtgagtcaatatcttgcccagagagtttgtttcattccactaacctggggcaagaacagatggtgggaggcagcagacaaacaatgctgctttttattttgtaaatctgcctagatccctacatcccagagctgggccacattgatacaggccaaacatctttcagctctttcagatgttttcagccagctctttcagatgttttcagccagctcttcatcatccaccatgttatgttgatcgtggtcgtaattgttatcctgaatgattaaaacccaagtaggtcaaagtgtctgtgatctgtccgaagcgtgttggccatcttaccctcaccagtatttttgtgtattgatatttttcaaaatcagaatcattttagatgcccagagaccctagtgtactttccccattctacgtgcccacttctgacttgcctttcatggagtctttgggtttattatggttatctctcttttggcaagtcaaaggtagggtactttttttttttttttgcgatggaggcttgctctgttgcgcccaagctggagcgcagtggcacgatctcaactcactgcaagctccgcctcccgggttcatgccattctcctgcctcagccccccaagtagctgggactacaggcgcccgtcaccactcccagctattttttttttttttgtatttttagtagagacggggtttcaccgtgttagtcaggatggtctcgatcacctgacctcgtgagccacggcgcccagccaaggtggggtacattttaagaaaaacatttcaggacccacgtatgttgtttcattcatttagctagatggattatatcccttttggctgtagcttgcctgagaaccagtggcttgattcccacagtcagactgtaacggattccttccctgcagagtctgtttttctctcatccctccatataccactcttttgtttttaaaattttttaaattgacaaaaattattattaggtaaaatatattgtttgaaatatatatacattgtagaatgaataaatggagatagttaacatatatgttacctcatatacttaaacctttgaaaatactgttcttgtgacacgatttgatgctcaaaaaactctggttgttttcttattatctaaaggatgaagttaaaattccttaggctgttactaaaggccctctttaatcgaacgctcgttttcttctactccatgtaagtttcctctatttcaattccacatatatcttctatttacctattatggttctaggtgctctttaagcagtgggtataaagccttatgtttttaatttgtctggggaaacagggcatgttttcacaatccagataagtaacgatgaaagtcagcatgcatatcgttaagcagaaactgacgtatatgggtgaacatcacttgaatcctggactcttcagggctctgtctttgggtctctctcactctgcatgctcttattggggtcctctcctgttcataatggctaatgcttatcctaatctcctgtgctctagccttttttagatgttaacgtttcaatctgtacttttctacattcctagatccatatttccaactttactcagcatcttcacctgaacggtccttcaaatgcaacatgtctaaaacacggctcagtatctttccccacaaacctgttccattccttttgttctttatcttggttattagtgtcaccctccaacttattttcaaggttatgaggtaggagatcagcaggacttgttttctgagcaccagtcacaacccactgattggagaaagatgtggtcaaaacagggcgtgcagtgaagaagccagctgaaaccagcaaatggtgatgaaagtgacctccagttgccctcactgctcattaacataaaggcactcccagcagtgccatggcagtttacaaatgccgtggcaacatgccatgggaatgacctgaaagttatcttctatgcatctagaaatgccccaccccttttctaaaaggtctaaataacccacctcttcatttgcatgcaactaaaagtagatataaatacagctagccaacagcccatatgctgctgctctggacacactgcctatgagttagccctgctctacaaggaacagtacctctgctgcacactgccgctcacctctggctcacccttgaattctttcctgggtgaagccaagaaccctcccaggctaagcctgcctgccctatatcagttagacatctgcagccagtcactgaattcagttgatttcacctctgaaactgtctctcacatttttcttcccacctctgctgccttaatttgctttgatcccagaccctgtcttctctgccttggaactatggctatacctagctgggtttcctgccacaagtcctttagtgttccactctgtcttcccctctgctaacgcaattagtttcttaaaaacaaatctgattgtgttgttttcatgctaaaatcctctagtggcttcttgtcacattgaggatgaaatagcaactttaagatcctgacatactggctgggcgcagtggctcacgcctgtaatcccagcactttgggaggctgaggccggcggatcacgaggtccagagatcgagaccctcctggctaatatggtgaaaccctgtctgtactaaaaatacaaaaaattagccgggcatggtagcacctgtctgtaatcccagctactcaggaggctgaggcaggagaattgcttgaacctgggaggcggaggttgcagtgagccgagattgcgccagtgcactccagcctaggcgatagagtgagcctccgtctcaaaaaaaaaagatcctgacatactaaagcccgttttaccccctaggcagcatcatctcttctgtagctgcactgactacagcaatccatctcaccactccttaccttcttctgtgctgttctccttgcttatgatgctcaagaagagcatctttcttacctaaaagacacacacaaccgtagttcaaatatcatcttccccattaaactcttcctcactttcctaggaagagttggcccatttctctgggtcctcacaatactctgtggagcagctagagttttcactcttttggattcccaccctcccttcccccgttttaatatctgtgaccccctgaagtactctgtgtattccttaagagaaggggccacattttttcccattcttttttcccccacatacaaaaaatggtaatatttaatgcctacaacatgatgagtttggagataggtgtacatccatgaaaccatcatcacaatctatggaggaggaacttcttatctccagtagggccaataggtagtttttgactgaatgaaagaatgaatggatgcttttcatgagtgatattgtgggccgaagagattgagaaaagcttatagtgatgaaggatctttgatttcatcccaaaccactaattgagcatctgtgcaatgcaagtgctcacgacaaagctatgaagtggaaattactatttccgttttgctgattttgaaactaaagacttgggttatttggttaagaccgtctagctcatcataagtgaaggagacgtgatttgaacccacactggcctggggtccaggcgtatgccttgtcttccacatcaaaacgctagtgtcaaagaataaatcttaggagtgcattatgacgatggtgattttgagattataaagcatttgggagctcacaaaggaagcctgtggttttgtagaggactagaactattttcacaactggtttccctgactgcatccatatctgtgtggccttaatattgtttgactcacaaaggaaacttgttgatccagagtgaaccagttcaactttcttctcctcaatctcaagagtattccatggaggaaaatgttctaaactgcacctgagctataaacaatttactctgaaggtaacagtgttagtattccagtacgtaaacctttagctaataacaatcaaagtagcctaatttggaaagtacacagaaggttagagggaaagcttgtaaatgttttcaaagactctgtatttaattctatcaccagctagcaaaataaataggccagctgctagctctgaaacagacacgtggtggaaatgaaatgttaatagttgaaatgccttgctcattcgaaaccaaaaggaacatgaagtacactttctagtttatgagagacaaggtgaaagttcccaaaacacatttgtggtgactgcatttaaaattgcttcctcatcttttattttagtggctaatactttagtgtggcctatgtgtgactagagggcattttttttttcttccgatttagatggaaggtttggaaataaatggagagtggaaatcgggagatgttaaattctacttttccatgtgtctaagttgtttgctctagtttgtaagctgcaggccagacttttctgaggaatgggaggttactttcaataatgtgctaagattgacctgagatatttagccagcacatctgcttgcaagctctggccgtatgtgaggagcttatactggaattaattaactctgtttggtattctgaaatgtttgctccacatcttgttttaccatcacaaaacttacaaaatcaattggaacttttttatttttacttaagaacttaaaaaaaaaagccaggtgaaaaagagaatctgaaaagcagttgttttcctgcttgaagcaaactttcaagaacgagcattagaattagaatttattttttcaaatacttctttttaacttaaaatgatggtgaagtgtaactctttcatccattacattaatgccatttttgaaatgtttgattttattagaaaacaaggagattgaagtgagaggggtatcctgtatgctgagatagtcacagcattacaaaatgttttatgaaccaaaatgttgtcctaggaacactctgacttcagaaaggaaaaggaagggaggtttctgggaaagctctgcaagcatagccttgacctgtatttggagacagtacagcactcgtggtcttaacaccatgatgttaatgtcagaacgtttggcactatgttgttgctaacctgctgttcttaaacaagtgagccttaccttgttacttttctcagttagtaaaattgggaagaggactaccttctagaattcagccacagcaccagtgtcatgactgtgttctctcttcctttaaacctgctgcccttggccagccgcggtggctcacgcctgtaatcccagcactttcagaggccgaggcaggtggatcacaaggtcaagagatcgagaccatcctggccaacatggtgaaaccccatctctactaaaaaacaaaaaaacaaaaaaaacaaaacaacaacaacaacaacaacaaaaaccctgctacccaatgagatgctcagcaactcataatttattaaaaaatgagccaaaggccaggcgcagtggctcacacctgtaatcccagcactttgggaggccgaggcaggtggatcacgaggtcaggagatcgagaccatcctggccaacatggtgataccccatctctactaaaaaaaaaaacagaaaaataaaacaacaacaacaaaaatgctactacccaatgagatgctcagcaactcatggtttattaaaaaacaagccaaaggctgggcgcagtggcttacacctgtaatcccagcactttgggagaccaaggcaggtggatcacgaggtcaggagatggagaccatcctggccaacatggtgaaaccccatctctactaaaaaaaaaccaaaacaacaacaacaaaaaaacccctgctacccaatgagatgctcagcaactcatgatttattaaaaaacaagccaaaggccgggggcagtggctcacgcctgtaatcccagcactttgggaggccgaggcgggtggatcacgaggtcaggagattgagaccatcctggctaacatggtgaaatcccgtctctactaaaaatacaaaaaattagccaggcatggtggcggtcgcctgtagtcccagctacttgggaggttgaggcaggagaatcacttgagcctgggaggcagaggttgcagtgagccaagatcacgccactgcactccatcctgggcaacagagcgagactctgtctcaaaaaaaaaaaaaaaaaagccaaaaccactgagcccaactgtccgtcaacagatgaatgtgtaaacaagttgtagtatgtacttaaaatggtctattattcagccataaaaagaatgaagttttgatatatgcgattacatatatgaacctggaagacattcagtgaaataagccagatacaaaaagacaaatattgtatgatttcacttatatggaatatctaggataggcaaattcacagagaaagaaagtagattagaggttaccgaggctaggggcagggggaaatggggaattattacataatggttagagttgctgtttgagataattttaaagttttggaaatagataagtggtggtggttataccacactgttagtgtaattaatgccacagaattatatactttaaaatggcaaattgttttatatataatatatattttatttatatataaattatatataatttatattttatttatatataaattatatatattttatattttatatataaattatatatattttatatttatatttatttatatataaaatatatatattatatagaatatatatattatatagaatatatatattatatagaatatatatattctatagaatatattatatataatatataatatataatatatatattatatataatatattctatataatatataatatatatattatatataatatattctatataatatatattatatatattatatataatatataatatattatatataatatattctatataatatataatatatataatatatattatatattatatataatatataatatataatatataatatattatatataatatatattatatatactccccctcctatatatatattatatatattatatattatatataatatataatatatataatatatattatatataatatataaaatatatatgttatatataaatatataaaatatatattatatataaatatataaaatataatatataatataaaatatataatatatatttttttgagatggagtcttgcactgtcgcccaggctggagtgcagtgacgtgatctcagctcactgcaagctccgcctcctgggttcacgccattctcctgcctcagcctcccgagtagctgggactacaggtgcccgccaccacgcctggctaattttttgtacctttagtagagatggggtttcaccgtgttagccaggatggtcttgatctcctgacctcatgatccgcctgcctaggcctcccaaagtgctgggattacaggtgtgtgagccaccgtgcctggcctatttacatatatttatatatttataatatataaatatatgttatatataaatatttattatatattatatataaatatatgtatataaaatatataataaaaatatataaataatgtatttatatattttatatataatatataaaacaaaatgtgccattttgccattttagatatatatatctcaaaacaattttaaaaaattaatagtataacattccaaaaactatgtaattatacagtttaaatgggtaaatttgtggcaggtgaattatgtctcaataaaactgttttaaaaaccccactgagtatatagtaagggattgggatgttctggttaactgaatcttctgggtaattaaggattaatatgtttgcactgaaactgaccaagtcaaaggtaccctttcatgaaatatggggctatgaacttgaaaaacatgttttgtgcctcattggttgcattttctttcaattatgtgtctctagaaatatgacactttgctatcaacagagcctctgaatagaccggtgttgtccactatagtagccacaggccacttgtagctattgagctcttataatgtggctagtctgaattaagatgtactgtaagtacaaggtaacactgaacttggaagatatggtgccagaaaaaaagattcaaaatatcttgccaataatttctatattgattacatactgaaatggtaatatttggctatattgggttaaataaaatatgccattgttcctttttactttttcataattacagacatggttcacattacatttctatcagacagggcttgtccagaaatcagactgatccactcagggtgaacacacctcaagagagattaagaatcatttctttgccggacggggtggcttacgcctgtaatcccagcactttgggaggccaaggcgggtggatcacaaggtcaggagatcaagaccatcctggctaacacggtgaaaccccgtctctactaaaaatacaaaaaattagccgggcgtggtggcgggtacctgtagtcccagctactcgggaggctgaggcaggagaatggcatgaacccgggaggcggagcttgcagtgagccgagatcgcgccactgcccaccaggctggagacagagtgagactccatctcaaaacaaaacaaaacaaaacaaaagtcatttctggtgactaagtagaatacaaaagacttgcctgaattgtcatggatgtcaagagaatttacctctcacaggatggctgccccctgttctctgattcagagtttttagaaatgggagacttggaaagggccttctctaaccaggtgagaactctgaggagtcagcagccactggtcctaggagtgcagttctgtgtgctacagcccttgggtccatagcacgagtcagctcaactgaaaagcagaggaatgatgtcagtatatcctggaggttagattgatccagaagcagtttttctttggccagaggagcaggaattgccggagtagagttacagccttcagcaagaaaggaaagaacctcacaggcagcagacacgcttttcaactctattttaagaaaattaaaaatgagtgcctgcacccagcgctttctctccagggcaggcacccgctagccttctaggactctgggctcccagcaggcatcttccctctgtgtccaccttaacatagctcctggctcagaactccactctgtctgtgagccaacagttgccactctgtcatttgtgtgtttaatatccctcgaggcagccgcagccacagccaagctgcttgcctaggctgtccaagtcatctccctaggtattaattattcttttggttagtgctctggttacagagttacagagggatttagtggtctaccccaacagcctttttcatcccgttatttttcaagtgtgattttgtaggatgtgagatttttcaggaatgtatatatcacattatagcagaaataccgacatggatttttgtcctgctccttcaacacacaagtctcaggatgcccaggtgactgcctgccacactggggaggcgtgttcctggcatcacacagcagactcgggttcagactgttgtgcatagtgatcaggtgtggctggatcaagactgctactcctgtgacatggtgtgatagatctcatgggccacctgggaacgggtctgccacatatacaacgttatttctatgggaacatgtatttgggcatccttgagttctgaacaactaagccacgaatacacttttggaattcattctctttgcaaattggggaatacccagaagcctctagatagcaactctcttacttccaaccgagcaaataggaaatgtgaactttgggaagctgaaagtagttataaaaatcacagaaattcaaaggtaattagtggtaaaatgggaatttcagactatctttctatctcttaactagtaagagatacactggtaatactaggtaatataagttatatctagtaagagatagactggtaatactaggtgtgtctcttacaagatataacttatattgaattattttgtttgctcagtgtaaaacctctgaaaatcttcagaggataaattttaccaccatcattctttattttactttattttttgagacagtctcgcactgtcacccaggctggagtgcagtggttcaaccataaggtcactgcagcctctacctcccaggctcaagcgatcctcccacctcagcctcctgagtagctaagaccacaggcgtgtgccaccatgcctggctaattttttaaatttttactagagacaaggtctcactgtgttgcccaggcaggtctttagtttttagttttatttatttattgttttcaagatggagttttgctttgtgacccaggctggagtgcagtggcacgatcttggctcactgcaacctctgcctcctaggttcaagcaattctcctgcctcagcctcccaggtagctaggaccacaggtgccgaccaccacgcccagctaatttttgtatttttagtagagacagggtttcgccatgttggccaggctggtctcaaactcctgacctcaggtgatccacccaccttggcctcccgaagtgttgggattacaggcgtgagccatcgtgcctggccttgggcaggtcttgagctcttacacttaagcagtcctcctgcctcagcttccccaagtgctaagattacaggtgtgagcccccacacttggcccccagttctttattagcatagaataaatccttcaaaacgttgaaattcagcatttttgggctacttaggcattgtatcagattaaagacagattgtctaggttctaattaacagggtgctttttagtggttggctgatcctacttgagaagagagagacagttattataggatgaaggatgggactttggagccatgtttcagctgtgtgtgtgtgcgcgtgcatacgtgcgtgcaagagagagattgagactggctcatctgtagacgtccaagcctttagatgtgtgtactgagcttttctctggcctgggctgaagtccctaactccaatatgtgctagggatctgagcttggagggacattagtggactatttcagattgtcgtccgtgcttagtagaacctgtgaagctgtacagtttgcctgtcacttaactggaagaaagaactaaatgctgtaccgcaattattttgcaactattactgaagataacatcttaacacattgaaattttgatcatgatggattgtaatgaacattttttacatggtttgcttttcaccatgaaaaccttttgagtgataatatttaaagtccgtgtcgtgctcagtagctcaatagctggtagcgattatcattaagtgcaattattaagtggagtgcccccaccttgcttcaggtgtacctctttattttaatgacaatcaaaagaatcatgtcatttaccattcagatattaacagtatacataatttataaatacaaataaatcatcatgtattatatgattaaaatgaatgaacctggacaggagcatgtgtgataagttattgagatttttgtaaatctgaagtattgagatttttgtgacgttactgagattttgttgaacgatgactacctagaaggcattctttctctgtacagtgttgggtgatataatgtagtgtttcagacaaaaagccagctgattagaaagaacatattgacaagaggccagatttgctcattatttaatatagaagatttgaaaaatatactttttcttagtcagaaactgtggcctctgtcctaccccataaaaatcctggtcattcatcagtatcagccacaggtgctgcctcattcatgaatcttttcctgagtttccccaattggagatgatctcttcatcctctacactctggcacttttaacctctcttgtgttacatggtattctttgctttggatgatttatagttatttctgaatttgttttttctctactaaatttcaaactccttaagggaaggggactgtcatatctttgcatcctcggaagatatacaaagtgctttgtacctaggcagcaccaagaaagatgatattctcgattttggattgattcctcagttaaatctgtttgtaactttttgaagaaaatatactacaagtatctaccataccccagtgacctgttcagaatgcttgtatgagagagctgattctgtaactcgaagttgatcaagaatgggccagggcatgacctggagggaagaggaataaggatctggaaaccagagtgtcacagtggaagaagaggggatcgagggagaatggagatcctaaccagaggcagggggaggaaggccaggcgctgcactttaggcaggtgtaacacgaggccccaggcagagagagggcctggaggcagggtgagtgagtgtctgtagtgggttgactgtttgcctgttgacagggaccttcagcagcaacttttggggcctgagggagagggttgaaggataaactggttgagaaagtaggcagggccccaatcttgcagggacccaaaaccaagcagaaccttaggccccagggaacgaggaatgcgtcagttcccagcactgggcggatgcaaaaatgcctggctgcccggccaccctgctgttattctcttgtcagggctcaggactgacagccaacccagcttcatatcttagggggtcgcccagccagggaacccaaggtgttgctagagttgaggggtgggaaaaatatggttggagcagttctttcacagcctggggtaggtggcagttttatgaggtcaacacatctggaaaatgtgtagggaccatcagaatgcgtagataaaccctacaaaccaacctgtcatggctgacttgtgtgccgaagcctaagtcactgccatactgaactctgtggcagtagaagatttgcagtgtcctgtggctgacagatgtggtatgcttctcagtaataatcagcggaaaactaggattgcaactcagcccgtgactgatatggacggcgtctttaaagatggtctggtgcagtgtctagctttctggcagaaaaaattctaacctgtggcacagtgtttttcttttatctttggaggatcactgacctgcaagggtaagaaaataaagtaattgaaagctcataaaaagacataactcatgtcagttttcaacatagcattttgctttgaattttcttccttaaaaacataacatttggccgggcacggtggttctcacctgtaatcccagcactttgggaggctgaagcgggcggatgacaaggtcaggaggttgagaccagccttaacaacatggtgaaacgccatctctactaaaaatacaaaaattagctgggcatggtggcgcatgcctgtaatcccagttactcaggaggctgaggcaggaggattgcttgaacccgggaggcagaggttgcagtgagctgagatcgtgccactgcattccagcctgggtgacagagagagagactccgtctcaaaaaacaacgacaacaaaaaataacgtttattagattgcttcctcattattacttctaaaaacagacttattaagaagaaaacagaccatagtttcctcatttagctaacacttattgacagtgctaataaggaaatgcatatttaaggttaggaattacagatagtgcagaaaggtacaaaatgaaaagtgaacgtttcttttgattctggggaaagtgttacccagatatgtatatatgcacttatttatgggttattttttaaggggaaaggaatatatactacatgcattgcatgcttttgcttttttagcctaattaatcccagagatgcttctttatcaccacgtacagatttacctgattcttctgaggagctgcatggtattacgtagtatgtgtttgctgtaatttaaccagtcctctaatgacagacatttatgtccagcatttttcttccctaaacagcgcttcagtgatcattaatacaagctgatttggaaaatcgccacttctgaaggtagatggtataaactaggggtcagcgaaccttgtcaccaaagggccagatagtaagctttgtgggccaggccgtgtgatctgtgttgcagctattcaccattgcagttacagtgcaaaagcagccattgctgcagaaacagaatgtggcatatccatacaatggaatgttattcagccataaataggaatgaatactgacacatggaacaacacggatgaaccttgaaaacatcctgccaagtgaaagaagccggacacaaaaggccacatattgtatgattccatttttatgaaatatctagaacagacgaatccatggagccgtaattcagattggtgatgccaggaactagggagaggggtgtattagtccgttctcacatgctgtaaagaactacctgagacggccttggccaggcatggtggctcacacctgtaatcccagcactttgggaggccgaggtgggcaaatcacctgaggtcagaagttcaagaccagcctggccaaaacagtgaaaccctgtctctactaaaaaaatacaaaaattagtcaggtgtggtggcacacgcctgtaatcccagttactggggaggctgaggcaggagaattgcttgaacccaggaggcagaggttgcagtgagccaagatcgcgccattgcactccagcctgggcaacaagagtgaaactctgtctcaaaaaaaaaaaaaaaactactacccgagactgggtaaattataaagaaaaggggtttgattgggtcatggttccacaggctctacaggaagcatggctcggcgaggcctcaggaagcttagaatcgtggcagaagacaaagggaaagctggcacgtcctacatggccggagcaggaggaagagagaacaaagggggaggtgctccgctttcagaccaccagatcttgtgagaactcgattggaacagcatgggggaagttcacccccatgattcagtcacctcccaacaggcccctccttcaacatgtggggattacaattcgacatgagatttgggtgaggacacagagccaaaccatgtcatgcggccatggggagcagctgcttaagtggtatgggtttccttttggagtgaggaaagaagagtttgaaactagataggggtggtgattgttcagtgttgcagatgtactaaatgccactgacttgttcagtttaaattggccaattttatgttatctgaatttcacctcaataaaagaacacctagttcactcccaggagcaggggaaaggataaagcagccagggtcaccatgtaaaggcataagcatggctgtattctgctacattgtattataaaccttatttacagcaagagaaggcatgcctgctctggcctatataatctgcaaaaaaaaaaaaaaaaattttttttttttttttttttgagatggagttttgctcttattgcccaggctggagtgcagtggctccatcccgcctcactgcaacctctgcctcgcgggttcaagcgattctcctgcctcagcctcccgagtagctgggattacaggcatgcgccaccatgcccggctaatttcgtatatttagtagagacggagtttctccatgttggtcaggctggtctcaaacacccgacctcaggtgatccgcccgcctcggcctcccaaagtgctgggattacaggtgtgagccacagtgcccagccaaaaaaaattctatagtaatgcaaaggttagattagggataggtataggattgagatccaaggactcaagttggggaaacgaatttggaggttattgcaatagtccagttgcgtttcttcatttcaagggaggtcagagagcccgctgagaaactggtggaacaatgggactcatctccatttccaccccctaatgtacttaaaggcacatgcacgtaaatgttgcctatgaaaatgaccgtccacaattctaagttgagagactctcttctggttggataaaacgagagtgcaaactctcatcaatagacggaagactgaaaataagccattggaattttccagtaagtcactgatgacctcggcaggaacactgtccccgtaataatcgcgcctcaagctcagttgtagtgggttgtgagtgtatgaggattcaagttgtgggggcagaattgtagacttaacctctcaagaaggttggtgttgaaaggaagaaggaagcttagtaagcatgagcatgaaggctggtttaatagaagggaggggttggagcatgtctatggactgagaaacaggccagaaccgagaaggtgaagatgcgggaaagtgctgtgggcgggccacggtggcagcagataggcgagggtcctccctggagaaggagaggggacatttagaatggaactgataggcacctataggtaaggttactggtcgaaggaagagagctaacttggcggagtcgtgccctttaggaaataattgatgagaacacctgctgagaaaaagggaggtggctgtggagccacgggcttaagagaactgcagaggttcagggccgctgctgtgggcaaggatttctgagtccctggcggccgatgttgaatatgattgatgagttctcaggactccttcagtcaacgaatatttcctgagtgcggtccctgtgccatggggttacccatctaagaatacacattgagctcatgcttttctaatttttcaccaagaatgttgtaagagagactgtgagatgtgtgactaattcatctaaacagcccaacactaatattacagaatgggtttaagtgggttcagcagattgattcttgatagtttaacgccactgcacaataaaccacagtagtttagtcaaatgaacaatgagggtaacttttacacaattactgaaaagttagcctatgccaaaagaaaaggtttctacacagataatttcctatttcctctgaagtttccgtgaatcttatgggattctgcagttagactggatatgtatttctgctcactcttctcaccacctgttttgtttgttttaagtaaaattcaggtccataagagcaaaatagagctctatgggctcaggaaacacagtcttctcagtggaggttaagtttggggcctcatcctgaggccgtgaccgttcatggacccagtgaccaactctgctaacagaaaggttttcaccatgcaatgtaagaagctgttggaattcccagatagagcattctcgatacttaatatctacctcccatttgttgtcctttttgctgttgaaattcaacttccacccttctcttgtgaatgatccaactggttccatgtattttctgggatctgtagtccactccccaaaacacaccttgttaaaaaggtgattgattttaattggcctcttataaggtaaattaaaaatcattaattctaaatcaaagcaattaatggtggcttatgcctatacagtcccagcttacttgggaggctgaggtgggaggatcacttgaggccaggagtttgagatcaccttgggcgatctcaacatagtgagaccctgtgtctaagaaaaattttttaaataaaataacgaactgggcatggtgatacacacctctactcccaggactttgggaggctgaggcaggaggctcactcggggccaagagttctggaccagcctgaacaacatagtgagacccctatttctacaaaacaatttttgaaaaaaattagggatgatggcacaggtctgtagtcccagctactaaggaggctgaagtgggaggattgcttgagcccaggaggttgaggctgtagtgaactgtgatggtgccactgcactccagcctgggtgacagggagagagcccatctctttaaaaaaaaaaaaaaaagaaaaaaaaagaggggggggtgtgggcaaaaaatgaaagcattcattctcaaatgttcctctccctcccccttgccccccccctttttttttttttgagacggagtcttgctctgtcgcccaggctagagtgcagtggcgtgatctcagctcactgcaagctccacctcccacgttcatgccattctcctgcctcagcctcccaagtagctgagactacaggcgcccgccaccacgcccggctaattttttgtatttttagtagagacggggtttcacgtgttagccaggatggtctcgatctcctgatctcatgatccgcctgcctcagcctcctaaagtgctgggattacaggcgtgagccactgcacccagccttgtttttttttttgtttttttttttttttagaaaaacggaaagaacatggtaaaagggcattctctgaggagaaagtcctttgcctttaatttcttgaataaatcctcttagattgtctctgctggcatgttgttagaaccatctcctaatggggatgtatcccacacttactgttagttttcgactttcactgcctattagaatcaccttgagagttttaaaatcctgatgcctgatgtctgggctgcaccctataccaatcagaggtttttccctcctgacaacaaatatatggggacttttccaataccacgtctctgattccttgccaccacttggctgtgctacagtctggttcaattctggctctaattagcatcagactccacagtttgaagggctccgtctcacaaggctgcccttacttcagataccagctgcaagcactgggtctccagtttacccacacttctgtccaacgtggctacaaactggaggttcccacaatcttctaccaagtttgatgatttgctagaacaactcactgagctcaggaaaatgctgtactattttgttaccagggatgcaaggaacagcctgatgaagaggcacttagggcaaggtccagaagtgtccccagcacaggagctcctgtccccgtggagtcagcatgcaacccccttctggcacagggatgcatttgcctactcagaagctctctgagtcccatcatttaggggtgttcgtggaggttccattacataggcatgattgattacatcgttggccatttgtgattgacatcagtctccagtttgtctcaccacctcagaggttgggtttgggggctaagagttccaactctgtaatcacatggttggttccttctggagaccagtccccatcctgaagctatctagggccccactgagggtcacctcattagcataaactcagatatgtttatgctaggggcttaacaaggggttttttatgaataacaaaagacactcctattagtaaggaaatcacaagagttttaggagctttgtgccaggaactggggacaaagacaaatagattttttattataccccaactaactaaatcagaatttctgggagtaggaaacgggcatctgtaattttaaagctcctctaggtgattccagggtgcatctaactttgagaaaaatcgttccttggcaatggttttataggcttagcattaaaggaaaaaaatatactaaagctttggccctaactctgtaatcatctaacgtgttctttttgcccactacacagacaaaaccaattcactgagacagcgttattgcagtagagaaagagtttaatgcagagctaaccaagcagaaggacagaagttgattactcaaatcagcttcccagaaagcttggtttttcaaggatagtttggtgggcaggggcctaagtaatgggtgctgctgattggctggagaggaacccataggggtgtggaaaacagtctgtgtgcactgagtcagcctctgggtagggggccacaggacccgctgagtcatgagtcacaggtctgggtcaaggcagttggttgccagaatggaaaaatctgaaaaaacatctcaaaagatcaatcttgacttctacaataatgatgttatctataggaacaattggggtagttagaaatcttgtgacctccaaaacactggctggttatcctctaactgtgtacattttagcagaattcaagccccttgcataatcctaatctcatgggatttcattagttttttttcaaaggtggtttcagtccctgagcaaggagggggtttgttttagggaataactattatcctggcttaaaaattaaactgcaggccgggcgtggtggctcacatctgtaatcccagcactttgggaggccaaggtgggcagatcacgaggtcaggagttcaaggccagcctggccaagatggcgaaatcccgtctctactaaaaatacaaaaattagccgggcgtggtggcatgtgcctgtaatcccagctactcgggaggccgaggcagagaattgcttgaacctgggaggtggacgtttcagtgaactgagatcgtgctactgtactccagcctgggcaacagagcgagactccatcttaaaaaaaaaaaaattaaactacaaactaaattcctcccatagttaatttggcctgtgtccaggactgagcaaaggacagccagcctgagaggctagaagcaggatggagtcagccatgctacatttctctcgatgtcatcatctttgcaaggcagtttcaccctagtccaattaagttgggatctctgagaatgaagcctaggtaaggtatgacttaaaataacccacatgcttttaatgtgcaaccagggctgagaagcaggtgtaaggtaacaggaaaccttcacgtcagcacagctctggagacacttggagatagggaatgagaactcaagggaaatgactgcctggagtggcccaagtggggttcattataaagttgtaaataaatccaggagaactcattactgttacaagcaagagcagccagggcaaagacgtgagaaaactccaaaagaagaagggatgccagcatagaagctggaaatgggttagtatgttattttgggatttgtagatgagagtttcaaaggctgggtgaacagcctatttcaaaagccatgaagaagctggataagatgatacagaagaaaagccattgctttttgttgttgttgttgagacggagtcttgccctgtcagtcaggctggagtgcagtggcgcaatcttggctcactgcaagctccacctaccgggttcacgccattctcttgcctcagcctcctgagtagctgggactacaggcgcctgccaccacgcccggctaattttttgtatttttagtagagatggggtttcactgtgttaaccaggatgctcaatctcctgaccttgtgatcctcccgcctcggcctcccaaagtgctgggattacaggagtgagccaccgcacccgccgaaaagccattgcttttgtaacagtcatgtcccagggtcattgatgggttcactagagtatgtagagtagaagccaggttctaggaccttatttgaggctacagataccaggaacttgttaatgaaagaaaggtgcaaactaacacaggagaaaactagggagggcgtcaacatcaagtgaaggatcttgaggtttcattttataattagtttatgacacaaggagaggaccccaggctgatgtgtttaaaggcagaaggaaaggtgcctggagaaaggaaaagaggtttgaagatgctagaaaaagaggctgttgtccaccaaccttgttacaactgtgtgttgaggcctattgtccttcctcaggctgtgggatggggtggaatgcagaactcaggcagaccgggcgtggtggctcacacctataatcccagcactttgggaggccgaggcgggtgggccacctgaggtcaggagttcaagaccagcctggccaacatggtgaaaccccatctctactaaaaatacaaaaattagctgggcatggtggcgggtgcctgtaatcccagctactcgggaggctgaggcaggagaatcgcttgaacccaggaggtagaggttgcagtgagccaagatggtgccactgcactccggcctggatgacaagagagaaactccaactcaaaaaaaaaaaaaaaaaaaaaaagcagaactcaggtatcagtttccaaacaaagcaagtatcaaaagctgtgttttgtgactgggtgagaaagaagacccaaaacagacacaaacagatttgtgcctgactggttcttgtggttgaccctgggtagagcggtctcaccctgtgacacctgggtgtcagctttagttctcactgagtacctcagacagtttactctgtcaactcgacttcacacaagtcccctagcccaaagcatggttatgagacaagtgcctgtccttgagctgtttgttaccagtttgcaatgaggtaagtatgacattgagaataagaattcagacttttataacatttggtgttgccatgacatccagttatactgttaatgggcttaaaaatttaattttcctagtaaatcatttttgttgtattttgcaaaagcttttgtctgtgacacattgaaaatgaaaaaaaaaaagttctgcaccacagagagtttgagaagcagtgttccagccctttccctccaatttgactgatgctctgtgcctttcttagggaaattctgtagctaccacttaccttcactcaggagtctgtgctggattttcgccacctcttggatgctggcatttgctttcatggatggatggatggatggatggatggttggatggatggatggatggatggatggatggatggatgnnnnnnnnnnnnnnnnnnnnnnnnnnnnnnnnnnnnnnnnnnnnnnnnnnnnnnnnnnnnnnnnnnnnnnnnnnnnnnnnnnnnnnnnnnnnnnnnnnnnnnnnnnnnnnnnnnnnnnnnnnnnnnnnnnnnnnnnnnnnnnnnnnnnnnnnnnnnnnnnnnnnnnnnnnnnnnnnnnnnnnnnnnnnnnnnnnnnnnnnnnnnnnnnnnnnnnnnnnnnnnnnnnnnnnnnnnnnnnnnnnnnnnnnnnnnnnnnnnnnnnnnnnnnnnnnnnnnnnnnnnnnnnnnnnnnnnnnnnnnnnnnnnnnnnnnnnnnnnnnnnnnnnnnnnnnnnnnnnnnnnnnnnnnnnnnnnnnnnnnnnnnnnnnnnnnnnnnnnnnnnnnnnnnnnnnnnnnnnnnnnnnnnnnnnnnnnnnnnnnnnnnnnnnnnnnnnnnnnnnnnnnnnnnnnnnnnnnnnnnnnnnnnnnnnnnnnnnnnnnnnnnnnnnnnnnnnnnnnnnnnnnnnnnnnnnnnnnnnnnnnnnnnnnnnnnnntgtgggtgggtgggtgggtagatggacagatgggtggatagacggatggatggatggatggacggacggacagacggacaaatgggtaggtgggtggatggatgattggctggatagatgggtggatggttgagttgataggtgggttgggcgggtgggtggatggacagatgggtggatggatggatggacagacggacgggcagatagatggttggatggatggatggatggatggacagatgggtaggtgggtggatggatgatttgttggatagataggtggatggttgagtggataggtgggtgggcggatgggtggatggacggttagatggacggatggatggatggatcgatggatggatcgatagatgcatacatacttacatacgtacatatatttgtggctgtccctgcaagtttttttccgttgaggtatacacgagcacagccctccatctgtgttggcagtcagcttctcacagttacacttggccccactttcactcagaagcccttgttctctggcttctttgtattcacctatttattctgtggatatacatagtgttggggtagtggaaacactggaagcttggcagtagtttctcaaggattgaagcttgtttctttagatctgaggtagatatgactagggggaaaaacaatggagagataaaggctaccattgaaaacccttagctcctatctgtgcaattacaatctgatgctcaggaagcccttttctgggtgcacaaatgtaaataacctacaagtcttgagaaacaggtctcctttacgttcacagctgtgttcctaagaattcccaagaatcacagctccatgtcccccagctaccagcctaggttgttggcctctctgtccacattttacctttgggcagtgcttgccagttgatgtgcaataacagagtaggggtgttgaactgccattctctctgtctccagtgaaaagacccacttagccctggtcagtctgcctgtgagcaaagaatttcctactcataacagattgggtgagttctgctccctggtgttgctcctggccggtcttccaccactggcctagttcagctccctgttacatctcagtgctattgcacagcctcctttctggtatttttttctctagtaagcttcttgagggtcagggttgtatctccatcagtcagtcattcttatacatctaggacttagcccaatgcctaacacatagtgtccagttactattaaataggcaccctttgtcctattgcaacttttcttcctaaagcaaacatctaatcatgttcggaaattctcatgatttttttctttgattacgtcctttctctacttcctctacacccctcaatctatagttcagcagttctcaacctatttttatcatcttctatcagaactctaaagacgaattatatttacatgcagagagcactctgtgaacaaatatgtattttgacagaaactcttaaatgctgaagggaatgagggctctgagataatgtcgagggcacatcagttatggtgatctatggcataggatggagagcctgggtgtgggggaatgcacatgagtaacttccattttagggtaacttccactctgctttatttaaaataattttcaaaatttgctcctgtgaggccgggtgtggtggctcacgcgtgtaatccctgcactttgggaggccgagatgggcggatcacctgaggtcgggagtttgagaccagcctgaccaacatggagaaaacctgtctctactaaaaatacaaaattagctgggtgtggtggtgcatgcctgtaatcccagctactcgggaggctgaggcaggagaatcacctgaacctgggagacagaggttgcagtgagctgagattgtgccattgcactccagcctgggcaacaagagcaaaactccgtctcaaaaaaaaaaaaaaattgctgctgtgattagttacaagtcactttaagtgttgattttgaaccaattttagatttatagaaaagttgcaaaaataatgcaaagagctttcttatttccctcaccctagtttccctaatattaacatcttaccactgtgttccttggactatgtatttgtgtattttttaatcctccgtcaactcaagttgactgaatactcactttttactactaggactttaatatttaattgaataatgacaaagatatttaacttttgagacttttgagttccatgtacttgtattcttttatagcttgtctataccacttttagtacagtgacttccaacatttttagatcatgcatcccattagtaggaattatgagcaaccctctcgaatatttttataattgtatctgaaaaattatatatactactgttctatatattaggttgcttctaaaaaggctgagagattaagaagtaaatgcagcatattaatggaaattttagtattttctttccacattccagtgaatcatcttgtacacccaagtttgcagattattggcttgaattacgattttggcttaaaattctccctcccttcctgacagaaatggaacctagtgaggaaacgatcctgttatgtatattgttttaacattgattatcccggactatgtaacataggaattttccgatgtgcaatttggaaacagctgaactgcttttgagaattttacaaaccaagtttacttgaaaactttgtgattaattaggcaaaacaatttctcttaaagcaaagctatggactgtgtttttcctggtgttgagaacattcgttttatagccagggattttagagtcttcatgctacaacaaaggcttttttcagatctaagcacagtatgaaaaataagacactttgcaaggtgcttgggaaagttctaagcagctcccaagtggggaagcctttgttctggaggaagaggcctgaattcaagggttaatcagagagacattgagaacatcattcactgctagtataggtcagagagaaaagttcacatctgggtgttactgaccaccaagcactttcttgtggtcctttcagaagtgatatattgttaagtatcccaagagtacaaacctctagggtagatttattggaggaaaatgctccttgtccacatgataaagtatatatttgtttgccttgaaacacaggtaggtaagaattatggactttgcagtggttgttatttgagcaaataatgctaacaagtaatacttcctaagtgttcaaattagcacctaacacagtgcctggtgtattgtaaatgtttgttgattgcccattgagtaaatgagttgagattttttgagactacgtggttttgctttgtaatcatttgttaaactgtacacataagttttgcttttctcttcgtatgttacatttcatgataatgtttttaaacattttaggaaaaaaatgtaatgaagttaatacatggagtttgtttcttttagaagtttatggataatatgcttacatttcttttgtcaagttgaaacgtaaacattagagtgtttgcttgtcaacacatggaatttggtaattaatttatatttggaaaacccattccgattttgaacatttgaaagatcaaggtttccaagtttatcttgctaacagccaagaacagctgcactatgcgtagcttttcagatggcttctctgtgacatctgtgaagatagacaactccagtaactgagcgtgcctgattgcatggcacgttaccgcgttttatgacgtgtgggagccagtctccactgtaatggaagagaaatgccgatttgtacaaaaacacttatttgacttaaatttaagctctattagataatgaatgttaaggaaggaaacgtacaattttagcaaaaagtgtaaaatttgctatttaatttttacttatacatgctttgagaataaacagatgattctttatcagcagatataatttgaaatagaaattaactcaatcataagcaatgatgacttatctggtagtgatgttatgaccatcattagtcaggaataaaagagaaattcagaatccatgccattcatgcaagcatgaaacagagtggaagatatttgggtgggatgaaggtggagggagcaacagctgtacagccatcgcatttgtctgttctcttgccaaagcagtttttggatttcttgcccttgcattccatttctccctcccccacccccaatcctttcgtacttacgattcataggaaaagacaagatcaatcttttaaaaatcagctggctaattagaggtgaccatagggcagtttctaagtttatagatgttccgatgattaactgtggcaaaggagatttctcttacttttgtacagactgttttagttttcactaataaaagcattcacaagggaggaaccactgacctggctttttttccccccagtgcttccaattagggatctattatctcattccagataattggaaaaggatattcaaaacacgacttcatgtaaatatggtttttgcctgcattacattactaggagttctgaacacatctggagcgaaggcggcctcagggacattaaagtgtgctgttttggttggcacagtgacataatagtatatgccaatttgtaatggcttttggaaacaggcagttttaaactctccctgaacgattcccctgagaaattattcaattaagtacaactaaaattaatgtttagcattttttgtttaaataaaataggcggctataaagggaaatccgtgattcatgctgtattcttctcatttaactccaaaatcaagctcctaagacataattgagtgtcctggaatcagtgccttttccagaagatacatagttgccagattctccttagcactttcatagtatacaaatgattctgttactatctagacagctttaaacaccaggtgtttgcctagtttctacgcctgcaggcaccacgggggaaggcagaaaccggaaagactcctttctctcctaagttggtgcttcccaaacttaatgggcataggtgatatcttgttaaaatgaagatttgatttgttagatttgaggtgtggagcctgagattctgcatgtctaaccagctctggtgggggcgggggcagggggttgggcagtggctgctgctggctgagtaccatacttggaatagagaggttctgagcagtagggggggtagggagaacctgggcttaactctgatttccagtttgtggcttggcctgagtgcattccagtaggtacgattctttcttctgttcctagtgcacgtctgtcctaatttctcagaatccccagttctcctggacctgcataggaccctcacgtagacttaggaccctcacgtagacttttctggaagaggatgtttctgattcattaatcacaggtgtaatggcttccgtttttgttacatgtcttcctgaaatccagatacattgtctaccccattttctctgttccatctttttgtagctgtgttataaagaaaaaagttaacctgtcattccttagtctatgttactaaacacgtaggccagagccctggtgagtgaaaggatgtatgagtaagcatggctttgtggtttttatccaagcatcattacttccaaggtttggcttctcagctcttaggtccagaactttgatggtcagtttactcaagggtggtctgattgagacatggctaaaaatccacactaggtgaaagctcttgaaagactgattcataacccagggtggtttttatccatatatgagatggtattctacaagaaagactatgatgttcatgactccctcactggctatccctttcctggggataactaatttatagttggagaattactagatggataaagattgagacatccttatagtgaccaacgcttacacccttctgatcttcccgccacaaatggagtccaaagcgctgtttcctccattcagtatggtgttcgccagacatttgagaactaaactctgatttttttatcttgcccaaattcctatataaggggtctggggagtcatgccccataaatcataaattctcatcagacgggttttatttttatatatatcgtgacttaactttccaacctgcctctggcgtaacattacaagacaaggaagaaaatcaaaatattttaccccaaaacatgtttctttgccatattttgaaatggccctgcaaagctgttccttgtggggggaacatttgcatctgtaaaaatctccattaacatagctagaccttctttttccagaccctcccaatcctaaagagattaactaagatctgaataggaaacatttgtcatctcttgtctctaagggcagctactgtaagacttcagaagaactttggtctccacagtctttatcttaacctgaatatttgctgtctatcaatcccaggtctttagacaaactcaaccaattgtcaaccagaaaaagtttaaattcacccatagcctggaagctgtcccgccccctccaaccccaccccctgctttgagttgtcccgcctttctggaccaaaccaatgtatttcttaaatgtgtttgattgatgttttatgcctctctaaaatgtataaaaccaagctgcaccccaaccaccttgggcacatgttcccaggatctcctgagggctgtgacacggccatggtcactcatatttggctcagaataaatcccttcaaatattttacagagtttgactccttttgtcaacacatttctattgtttggttgtggtttttgttgttgtttttaattcaagctctccttctttttgtctatggtttgttttttctatctccctcctattctttgtaaaatacggtgctggggccaggtggggtggctcatgcctttaatcccagcactttgggaggccaaggcaggggggatcacttgagattaggagttcgacaccagcttgggcaacatagcaagaccccgtctctattttaaaagtcacatatattaaaaatatagttctgatcatggcatttgcttgcaaaaactttccagtgcttcttcattgccgaagcagtgcttctgaggccttcgtgatttctttcatattgacctgtttattattcagttaacattcttctttggacttaattttttaaaatttaattttcacttttatcagaataatacctctgaatagtatgaacaatcagaattaggcagcttaggagaagcagctctcttcatcagccctccttgcctccaagtcttacccctcagaaccagtgcttatgattcttttagtggtttatggtaaagtgtctatagtccaatatacacttgacccgggagctatgcagctccacttatacatggatctttttcaataaacatattggaaaaattttttggagatttgtgacaatttgaaaaaactctcagatgaattgtatagtctagaaacactgaaaatttttaagaaaaagttagctacgtaaaaatgctaaaaatatatgcagatgctcatctattttatcatttgctactataaaatatacacagatctacttgcaaagttaaaatttatcaaaacagatgcacacaaacacagatcatgtatggcatccttcacagtggacagaaatgtaaacaaatggaaagatgcagtattaaatcatgctgcacaaaatgaactgtagagcatactgtgataatgtagtaatttcatagtcacctcctgttgctattgaggcaagctcagatgctgtgagtatccacttaaaatgctgctctatgatgttaatcatctctgcctgagcagttatcgctccagtaaattgtataccacagtacaaaaaaagtggccccttgaacttctctcttattttttgtgtttagtgcaataatataaacactgaacaacaccatgggacccatacaatgtgatactagtgattcaccctggaaatgctcccaagaagtaaagttatgacattacaaggaaaagttgaattgcttgccatgtactgcagactaaggtctgcagctacaattgcccacaatttcaagataaataaatccatcataaggataattataagaaaaggaaatacatgaagccgtcactgcagctatgccagcaggtgcaaaatccttgcacttataccttttaatctcatattgaaaatgcagctattctgtagtgcaggattgctataagaaaggcatatctatacacgctaatgtgatctgagaaaaagcagtgtcattctatgacaacttaaagcaaaaggaaagtgaaggatctgatctaaagctggagaatttaatgccagtaacggatggtttgataatttcagaaagaggttttgtttgaatcatgtcaagatagtaggtgaagcaacttccatcaaccaagaggcagcagacaagttccaagatgtcattaagaaaattatcaaggagaaagtatatctgcctgacagattttcattgcaagtgagtgaccaattctggtggggggaaaagccaaacatgacatttactagtaaggaaaagaatcaagcatcagaatttaaggcaggaagggttaagctaactctacagttttgtgcaaatgcatttgggcttatgatcaggactgcccttatatctaaagctgctaacctccaagccttgaagcaaaaagttgctcatcttttcgttgtacaagaaggcctagaaaacaagagccccttttccagatcgatttcattgatgctttgtccctgaagtcagggagtaccttaccagtaggggactgccttttaaagttcttttgatactggacaatgcccatggccattcagaaccccaaaggttcaacactgaaggcatcaatgtgttctacttgcttccaaacccaaggtctctaattcagactctagatcagggggtcacaaggacctttaagtctcattacacgtggtactctacagaaaggattgccaatgctatggaagagaaccccgatagaacatcttgaaagtctagaataatgacaccattgaagatgctattgttatgacagaaaaagctatggaagccatcaagcccaaaacaataatttcctgctggagaaaactgtgtccagatgttgtacatgacttcacaagatttacaacagagccaaacaaaaaaatcatgagagagactgtggagaggccaaaaaaaaaaattggggatgtgggtggaggttgaagggtttcaagatagggatcttggagaaaatcaagagctaacagacaccacaccagaggaattaacataagttgacctgatggagatgtctgcttccaaaccagtgccagacaacgaggaagaagacataaaagcagcagtgccagaaaacaaactggctaaacgatctggcagaagggttccagggattcaagatggcttttgacaggccaggcgcagtggctcacgcctgtaatcccagcactttgggaggccaaggcaggcagatcacgaggtcaggagatcgaaaccatcctggccaacatggtgaaaccccatctctgctgaaaatacaaaaattagctgggtgtggtggtgtgtgcctgtaatcccagccactcgggaggctgaggcaggagaatcacttgaacctgggagtcagaggttgcagtgagctgagatcacgccactgcactccagcgtggtgacagagcgagactccatccaaaaaaaaaaagactacttttgacttcttttatgacatggacccttctgtgataatgtgcactgaaactaaagcaaacagtggaagaaggattggtatcatatagaaacatttttagagaaatgaaaaagcaaagaagtcaggcaaattacagtgtatttccataaaattacaccaagtgtgcctccctttcctgcctccccttctaccttcttcacttcctccacctctgccacctgagacagcaagaccaaccccttttcttcctcctcctcagcctactcaatgtgaagataacgaggatgaagacttttattatgatccacttaataaattggtaatatattttctcttccttatgattttctgaatatttccttttctctagcttactttattgtaagaatataatgtataatacatataacatatacaaaatatgttaattgactgtttatgttatcagtaaggctttcagttaacagtagacggttagttaagttttgggggagtcaaaagagttgtatgtgggccggatgtggtggctcactcccgtaatcccagcactttgggaggccgaggcgggcagatcatgaggtcaggagttcgagaccagcctggccaacatggtgaaaccccgtctctactaaaaatacaaagaattagccaggcgtggttgcagactcctgtactcccagctagtcgggaggctgaggcaggagaattgcttgaacccgggaggcagaggttgcagtgagccgagatcgtgccactggactccagcctgggcgacagagcgagactccatctcaggggaaaaaataaaaaaaaaaaagtgatgttcaactttgctgggtgtcggcaccataacctccaagttgtttaagggtcaaatgtagttgaatgtctatttctaaataatatgctgctatttcttaaatgttttcagtcttcgacatctgttgacttcctcctaaggaagatgttaatctaacttgaagtaagtctacacacacacacatttcctacttatgccatcgcacacacatgtcagtgttttcagtgttgaatcagtgtttattgttctatgattatgtaaatgtcattcacaactgagccatggtgtgtactgcaattagattttatttctttatgcccttttctctaaagtaattgcttctgtttaaaactttgcatagttgtctttatcgatactttcaccaccagtcccccatacctgtgatagaattgtgaaattcctctctagattgatatggtgtttgtaggtagcctgtcagtttcgtcttttgattggagactcctccctcccctgattcctttatctccttggtccagtctggacagactcttatggagtgtccctgtaccaccaaatccccttatccctacaatgccctttgtctcttttggatgtcagtcctctatatgatgggtttgtgatgttcatgtcaggagggctgtggcgaggcagtcaccagaccgaagctatgaattcgtgaagctctgctcgttgtctgctatgagctcacagttgggatggagcacccttggatattctccgtatccatagtcactgatacagcctggcattagcaggaagaagaaaaacacacaagcacccaggattctggagcaaccctttcctcttgcattttccctctatcgccctctgctgcgaaagttaagtttagcatcatgctcactgcaaaggaggaattcttagagttcagccagttagtgcagagtaggtattgaagggtgaatttggagctgagaggtaattaattgttaactgacatagaggaataaaatacaatgcaaagtgtcggtctcttgatacattttataaaattgggacattttcaagtcagcaattgtttaatgagtgggacgcccctacctcatttttgttgcactgtattatgtgtagtactttgtatttggatttcttctctatgcttggaaagaaatgcaagcagcagtgttggaataaaatgagatatattagtaaatgatttaaaaatatattaaaaaggctgggtgcggtgactcacgcctgtaatcccagcactttgggaggccgaggcgggcagatcacctgagatcaggagttcgagatcagcctgaccaacatggagaaaccccgtctctactaaaaatacaaaaaatttgccagacatggtggtgcatgcctgtaattccagctactcaggaggctgaggcaggagaatcgcttgaactcaggaggcggaggttgcagtgagccgagatcgtgccattgcactccagcctggggaacaagagcaaaacgctgtctaaaaacaaataataataaataaataaataaataaataaacaaaatacaagggctattgaaaacgtacatataatcagaaaatcaaagatacatgggccaactgtggctctaagagacctgcctgtaaatccctgcctctggaaattgctggtacagagctcttcccttcacatcccccctttagaagggtgaaacgcacctaaaaaaatatgtctgaagtgtgaagactaggtggaaaatggtagataacttttccacaaaggaggaatgctctcttgtaaagtagagaaaacctcttcaagttacttgtttttttaaaacaagagtacatggttaactttggctttctaactgacagatgtcatggaactcaatctgtcagcatctcagtcttacccaactatctgggcttcgtcagagatctcctataagaaagagaaatatggagaaaccaaggtgatgttcctatggaatgagaagaatgcagactatatttagtctggagttagacctgaaatttgagacaggagaggcatgagcttctgagtaaagcattcagactgaaatccagagacccgtcttctcctgccctagcacttattagtgaggtaacttggacaagttacgtaatccatgtgggcctgttttgacatctataaaatattctaacagctccctgtatatttttccggattgacaggagtatcagatgagacaataaacaatttgtaaaatggttagagtgcttcaaaattgtattaccatcatcataactacttttaaaactattcatttatatgaaatcgactgaaaacagagtataagacctaacttagaaataacataagtttatgaatttcataaaaagctagtctgttttgttgagatacaagaggaagaacccagaaatagcattctagactttctcaatctctaattatttttagatttaaatactttgttctaactataagaatttgaaattagaatttgctctaaatattcaatagcaggggcagatatggcaatgtaaggctgtgatcctgttagcatttctgagtccagaaggaaaggaagtttctcaggctgacatatcctaagatctggatttgaaatgtaggctatttttcaaagagagcagagttctactagttcgggtctagatatttcatgagagattctctagaagctggaatgataaaatagagatataaaaactgtacagcattttctataattgtgaggggggaaacgttagcaaatgaccttggctcacagttggaggttgtattctgatccaagacttgaagttagataatccatgattgtaaccaacaagatacaacagagcaaaagtaaccactgtacatttttataacaattgaaataacatagttttactttaatagcatttaaataattccactgactcggccgggcgcgggtggctcacgcctgtaatcccagcactttgggaggccaaggcaggcggatcacctgaagttggaagtttgagaccagcctgaccaacatggtgaaaccctgtctctactaaaaatacaaaaattagccaggcgtggtggtgtgtgcctgtaataccagctactcgggaggctgaggcaggagaatcgcttgaacctgggaggtggaggttgcagtgagccgagattgcaccattgcactccagcctgcgtgacagcgcgagactccatctcaaaaaaaaaaaaataaataaataagcctggtgcggtggctcacacctgtaaccccagcactttggaggctgaggcaggcggatcacaaggtcaggagatcgagaccatcctggctaacacggtgaatcccgtctctattaaaaatacaaaaaattagctgagcgtggtggcgggcgcctgtagtctcagctactcggcaggctgaggcaggagaatggcatgaacccgggaggcggagcttgcagttagccaagatcgcgccactgcactccagcctgggcgacagagtgagactccgtctcaaaaaaaaaaaaaataataacaacaaattaaataaataaataattccactgcctatgcagaagcccccaagttattataaaatgtatatataacatacaggcacactcaactggatcataaatttggcctaataagctaccatgttcattttagtaactattcattaaatatttacttaatattttggaagacacttatggagtaaacttgaatgatctcatctttctttctttctttcttttttttttttttttgagacagagtctctccctgttgcccagactggagtgcaatggcgtgatcttggctcactgcaacctctgcctcccgggttcaagtgattctcctgcctcagcctcccgagtagctgggattacaggcacgcaccgccacacccagctaatttttgtatttttagtagagatggggttttgccatgttagtcaggctggtctcgaactcttgacctcaggtgatctgcctgcctcggcctcccaaagtactgggactacaggtgtgagccaccgcacccggccggatctcatctttcgaacaaagcaaaacaaaacaggacaaacagggcaggcttgggatgtttgagctgacgcccactttttctttcttcgacatttctttctgaatgttgtgagaaagctgccagaatcagacaggttgcactacagacccagctttgccactcctcagctctgtcactttgcgcaaaccacttaaccttgttgagcttcacctttagtaacacttgcctcacatgccagcctaaggatgaatggaaacagtaccttgctcataggagccactcgggaattgttatgatcccttagtatgttctcactcttccatgtaaatagggatgctgtgagaatggaagaaatgggcctgctgagattttttggaacctgaggttcatgtggatatatatatagtggaaaaatcagttggcgacatgcctgaatctattgctgcaccctttcctgttccatttatcattttctctgtccgtatgtgaatactgtactgtcttgattactgtagctttttttttttttttttgagctggagtctcactctgtcacccaggctggagtgcaggggtaccatcttggctcactgcaacctccacttcccaggttcaagcgattctcatgcctccacctcccgagtagctgggattacaggtgcacaccagcatgaccaactaatatttgtacttttagtagagacaggatttcacaatgtaggccaggctggtctcaaactcctgaccctaagtgatccaccagcctcggcctcccaaattactggaggttccttaagtgagcactgcacccagccagatgactgtagttttataggaagtcttgaaatcagatagtatgactttattttttagaacagttttagatttacagagaaattgaatagatagtacagagggttcctgtatactccacatccattttcccctgtagttaatgtcttacattagcatgatatatttgtgcaattaatgggccgatattgatatattatcattaaagtaagtttattaatattttcttaattttgacccaatgtccttttcctgttctaggatacggcattatatttagttgctccatctccttagtttcctctgagctgtggcggtgtctcagacttcccttgtttttgatgttgacagttttgtgggggtaatgctcaggtatttcgtaggatactacacagctagaatttgcctgatgtttttcttatgataacactggggttatgagttgttgggtggaagatcacagataaagtgtattttcatcatatcatatcaagatatgtcacatactgtgaatgtgatttgtaactaatgttgacctcgatcacctggctaaggtggtgttcgttaggcttctccacctcgaagttactccttccccatttccacactgttctttgaaaggagtcactacatgcagcctacacctaagaaagagagagttacactctttcttccttgacagtggagtatttacataaactagctggagatttgtctcttcgccttcacgtattattcaatcatgttattttgtttgttctttcttttttttttttttttggagacagaatctcactctgtcccccaggctggagtgcaatggcgtgatctcggctcacggcaacctctgcctcccgggttcaagcgattctcctgcctcagcttcctgagtacctgatattacaggcaactgccaccaagcctggctaattttttttctttgtactttttgtacctttagtagaaacggggtttcaccatgttgaccaggctggtcttgaactgacctcaagtgatcacccctcttgacctcccaaggtgctggaattacaggtgtgagctaccgtgcccggcctcaatcatgtatttttatcaatatggactcatggatatttattttatactttgggttataattcaaaacaattttgttgttcagaatcttccacctttggttatcgagaactcttccagttggcttctgtactcctctgacatacaatgtgggtttgttctcaaatccatcaccacatggattgttgtagcctcatcctcttgcttatctgtagactatcattccaacagtgagagtttggctcccactatctgctattcatgtccttaattggttttgttgttgttgttatttttcaacacggagtcttgctcttgtcacccaggctggagtgcagtggcacgatctcggcttactgcaacctctccctcccgggttcaagcaattctcctgcctcagcctcctgagtagctgagattacaggcacccgccaccacgcccagctaatttttgtatttttagtagagacgggttttcaccatgttggccaggctggtctcgaactcctgacgtcgtgatctgcctgcctcggcctcccaaagtgctgggattacaggcgtgggccaccgcgcccagcccatgtccttaattgtttagtgccaatgtacatgtatagcggtgtcagaattgttaacctgtacccctgtgggaaacaactttaccaactagaattcagggcttatgtgcaagtcccttcgcttttagtcttatagatgccactcatttccaaagctacttaggtcagcaccttctcttcctacctcattcagtgatgttgttgcatacatttgtaatgcagtttgatgcccttatcacagtctgcatttattgctggaatctccagtcttctaaatgattgtttttttaatgtacattcattaaggttcactccttgtgctgtacagttcggattttgatacatgcataatgtcacctgtctatctttacagtatcatatagagttgttttttttttttttcagatggtgtttcactcttgttgcccaggctggatggagtgcaatggctcgatctcgactcactgcaacctccgcctcctgggttcaagcgaatctcctgcctcagcctcccgagtagctgggattacaggcactcgccaccatgcccggctaattttgtatttttaatagagacggggtctcaccatgttggccaggctggtcttgaactcctgacctcagatgacccgcccacctcagctgacctcagatgacccgcccacctcagcctcccaaagtgcgggattacaggcgtgagccactgcgcccggcccatatagagtatttttactgccaccccgcccccccaaattcctatgcttcctcctatttatcactcccccctttctcccaaactcctggcaaccactgattattttaccctttctatagttttgcctttccagaatgtcatataattggaatcatacaatatattgtacctttttatgcacacaggttgctaagaaacacatgttgataatctgtaaattatttcattcagagctgagcacattatcatcaggattccagtcttctaaaataatggaaaatgttacttttcttttctttcttttcttattgttgttaccttagtaagcaaaggttttgatgtggcttacatttttttaaagtaaacttttcattgaggggctaggaaaactgatgaggtctttatttattgcagctattgtagggttgtttaacgcctaagtaatgtaaggctttttgcactgtgtcctcaaattagagctgttctacatgttttgtttttatgctgatgataatattttaaaattaaaagaatattctgggtcatctgggaggactaattgtgtctggctatacaattccagcccacatttgaacttctgggtataattgtcttggatcttagtcatttttggctgttgagaaaagaaggtatacttaatatgtaatgaagtatttgcttccaagagaaggccaaagcctgtcactaggcaccgtataaaggatgccttcacagttgacataaagaacagcaggacaaacccaaaggacctataccttagcctgtaccatatttgtgcatttttttgttttgttttgttttgtttgagacagtcttgctccgtctcccaggctggagtgcagtggtgcgatctgggctcactgcaacctctgcctcccaggttcaagcgattctcttgcctcaggctcccaagtagatgggattacaggtgcctggctgattttttttatttttaccatggtggccagtctggtctggaactccttacctcaagtgattgatgtgcccgcctcagcttcccaaagtgctgggattagaggcatgagccactgcgtccagctgccatattcatgttttaagcacaatttaggattcccaaaacacgcattgtcttcaacattaaattattgtggttaaatagaatttgggttttgtagttttcatttttatatgaatatttgttttagcactataaagagctataaacataatgaatatatacttacatttatatttaattaaataaatacagtaacatcaatactgaggggtgtggaagaatttgtttaaactttttttttttttgagacggggtcttgctctttcacctgggctggagtgcagtggcgcaatctctgctcactgcaacctctgcctcccgggttcaagtgattctcctacctcagcctgccgagtagttgggattacggcgcccgccactacgcccagctatttttttgtatttttagtagagatggggtttcatcatgtcggccaggccaggccaggctggtctcaaactcctgacctcgtgattnnnnnnnnnnnnnnnnnnnnnnnnnnnnnnnnnnnnnnnnnnnnnnnnnnnnnnnnnnnnnnnnnnnnnnnnnnnnnnnnnnnnnnnnnnnnnnnnnnnnnnnnnnnnnnnnnnnnnnnnnnnnnnnnnnnnnnnnnnnnnnnnnnnnnnnnnnnnnnnnnnnnnnnnnaattcctcaaatttggcagttgttgttatggttttaaataatatgagcttttcggccaggcgcggtggctcacgcctgtaatcccagcactttgggaggctgaggcaggctgatcacttgaggtcaggagttcaagacgagtatggcgaacatagtgaaaccccatctgtactaaactgtcaaaagttagctgggcatggtggcgggcgcctgtaatcccagctactcgggagaatcacttgaacccgggaggcagaggttgcagtgagccaagatggtgtcactgcactccagcctggggcaatagagtgagacttagtctcaaaaaaaaaaatgaatttaaataaataaataaataatatgagcttttggtaatacactagtccagacttggctgttttcccattcccacactttgacatgtatacattcctgcaattcagacactttgctctctctccccatccctcccacatccaaagccgcgcttagcatggttgacactgactgcccagtagcccatccagtagacatggcaaattccacactcccttccttgcggcgctgccctctgtgacaacagtgtgggttttttctttgttttgtttttgtttttgtttttgccacttgctttgcttctattgtttttcctcctcttgttctttacatactgtgttctcttagattctacctttacctgtatctctcttgtatatttttaaattttaattcttaaattaacacaaaacaaaattgactgtgtttgttgttctgtgaatttttacacatgtgtaggtttgtttagccactacacaaatgggacccagaaccattccattgctccagaaacttccttgtgtttcttttgtaaaccgaccatactctcacccattcctaactcctgacaaccactgactgacctgtcctctgtcactaaacttttgtctttgggataatgtcatataaattgtatcatatatatgaacttcttagtaccgcttttttatttttctattttgttatttactgtagctttttgtatagattgttttagtggtaactagggatgacaatatacatacttaaaaatttacagtctacttagaatcagtatctaatcttttcacatggagtgtatcaaccttacaccctataggcccatttgcctaccctgctctatggtatataattgtcttatgtattatacttacgtgcattgaagatcagacagtatgagtttggttttcatccaccaaacagagaagtcagctggagaatatttatccaaatgtttaccatttctgctgttcatccttcgtttcaggtttcctactggtatcgtttttcttctgtctgaagaacttcctttagctgttctcttagagtagatctgttgacaacatattttcttagtacttcttcgtctagagtatctttatttcacctcggtgctgaaggatagttttgctggttatagaattttgtgttgatagctcttttctttcagcactttaaaactggtgctatacttccttctggcctctgatttttgatgagaaatccagtctttgaaatttttgttcccctataaagcaatgtgttgtttttctttggttgtgttcaattatttttttctttgtctttagtgttcagcaatttggatatgatgtgttgtggcctggacttctttgtgtttatcttgtttggggtttgctgagcttctcaaatatgtaggtgtatgttctttgccaaatttagaaaactttcaaccattatttgttcacgtattttttctggcccacactcttttttctctcttctgagactccagtggcatgaatgtttgactttttcccattatcccataggtccttgaggctctattcatttttattggaactatcttccagttcaccacctctttcctgtatcatgtccattctgctattgatcccatccagtgagttttcaaatttggttattgtgtttttcagtttcaaaagttgcatttggttcttctctatattttttgtttctttgctgagactatatttcaagagtgttcaccattacttcttggagcatttttatttttatttactttgtatttttgaaacagggtctcactctgtcatccaggctgaagtgtagtggtgcagtcacagctcactgcagcctcaacctcctgggctcaagtgattctcctttcttagcctgctgagaagctgaaactacagatgcatgccactatgcccagctaattttttattttttgtagagacaggttctcactatgttgtccagactgatcttgaactcctgggctcaaacaatcatcacgattcagctcccaaaaatgcctggcccagcatttttattatagctgctttaaagtctttgtcagataactccaacaactatgcttcttagcaatggcatcttgttgtcttttcccaggtttcttatgcaacttgaaattttccggatgttcatatgctgcaaaattttgcgttgtatcctggacattttgattattattttatgagactctggctgttggtttaaatcctacagagatgttgatattttttattttagcaggcaattgccctggttgagttgaggccacaggttccaactaccattgaagaagttttcaaagtctttccagtactgtttgggtctgtcccacaggtgcagtagccagtgaccagactgggagttgggtggttttctctcctgtagttcagctctcaatgtctacgtatactatttggggtcagctccgtgtatgcacttctcaaaggagaatccaggacttcatgaacaactttaaggggttgcttttctaagctcctcccagtctgtgatcttcctggtgcattttggctcctgaggctccctttttatttctccagtgtgaaatctaggactttagttaccctactctgccatatgcttcccatctatatagcaatatggtttcctttttttttttctctctctctttttctgtaacccaatctaagtctgtggcttttttttttccctcatctttttattttaaaggtttttctaaagctacagaaaagttaacagtatattcttcaggcatatctggtcacccttcatttactagattcaccagttgttaacgtttagccacatttgttttgcttttttgttgctgcatgagtgtgtgtgtgtatttatgtaccttttccccccagagcgaattattattatttaatatttttaaattcttttgagatggagtcttgctgtgatgtccaggctggagtgcaatggcatgatctccgctcactgcaacctccacttcccaggttcaagcaattctcctgcctcagcctcccaagtaactgggactacaggcatgcaccaccatgtctggctaatttttgtgtttttagtagacagggtttcaccatgttggccgggctggtctcgaactcctgacctcaagtgatccaccagcctctaccacccaaagtgctgagattacaagttgtgaaccaccgagcccagcctgtgaatggtttgaagtaaggtgagggtgtctcgtaatgcttctatatactttggcatctgttcctaatctatctcctaatattcttctgtgtaggttgttttcctatataactgcagtgtcattagcatatccaagaaacttaactttgatatggtaataatgactaatatggagtttctatttaaattgctgccattgccccaataaagttttgtcacttttttttgagggggtgctccagcaatcagattacagattgcgtttaactgttttgcctctttaatgtcttttaatttaaaatatctcccccttctttttttttttttttttttgagacggagtctcgctctgtcgcccaggctggagtgcaatggcgcgatctcggctcactgcaacctccacctcccgggttcaagtgattctcctgcctcagcctcccgagtagctgggactacaggtgcccaccaccatgcctggctaattttttttttttttttgtatttttagtagagacagggtttcactacgttggccaggctggtctcaaactcctgacctcgtgatccacctgccacagcctcccaaagtgctgggattacaggcatgagccaccgcaccgaccctgtgttacactttttttttttttgagacggagtttcgctcttgctgtccaggccgtagtgcaatggcgcgatctcagctcactgcaacctctgcctcccaggttcaagtgattcttctgtctcagcctcctgagtagctgggattacagacaaccaccaccacgcccaggtaatttttgtatatttagtagagacggggtttcatcagattggtcaggctggtcttcaactcctgatctcaggtgatccgcccacctcagcctcccaaagtgctgggattacaggcctgagccactgcgtccagactcctgttacacatttttaagcctagatgagagaccatggtttatggtcaagaggaagtcggaaaggagcctgtgttttttgcctaacctggcccatctggctgtgtataaggtgtgagcgagtgtggccaaggggaatttctgccaggcaaaggagctttccctgtgtccccaaagcctgggtggttcccagaggctccactttgatctgcgggagttccttgcagctccctgccataggatgccataggcaaagcattacctttcctttaagaagtcacagattggtttttccttgtgtccctgttctctggaatgtatcttttcctagtgtacggtattatcagaggtcaccaccaccccccatttttggtttccattgataaatttgagtatgatatcaattatagggaacggagggaattaaactaataccctcaagaaaaactctatcttcactatagattttttttaacatttgtcttcaaatattattaagaacataagcaaaaagcataataacataatgactttactactgccattatgagtccgttatgagtataaaaaggcaccaaatgtatctgaaaatatatagcaaactctctccctatatatagaatgtattgaggctgtaattgagagtagaaaaatgatgaagtattattggagtcgggtattttgacatcatataatatttcttaatccttgtgatgctgtcattttgtggtatactttacgttgttccattttgtccattctgtgctggaatgtcactcgatatctcagattaacatgtgattgaaatataagctccttcgtgaaaccaaatgcaagtactgaccaggaagcagggtatcagtttctctttggaggctctacagtcaggaatctgaactagtcagctggttgtttcacaacctatactctgaaacctgtatttaatttgctcttaatagactgtggttagggaaattcccaccttggtagtgcctggtctgcagagtgggaattccccaaggctctctggcctaggaaatcttctgaggtcataactgacaagtggaatgaatcccatcaaaccaacagtggcagtataagtctattaaaaagtaatttggcaatctgtttcaaagtttatgaggcagtcataatcacactttgttaaggaaatgattaaaaagaaccaatgataatggaggaaagaatttatagactcattatttagaaatatagaaacattctaagtatccaacaatgggctattatttaaggaatggttattttatggaatgaatattttgtaaccatgagaaattataactgaagactttgtagctacatgaaaaaatacaaatgatatcattagatgggggaggcttatatattgcaattaaatgaaaatgtatggtttttttttttttttttcttttttttgagacagagttttgctcttgttgcccaggctggagtgcaatggcactgtgttggctcactgtaacccccgcctcctgggttcaagcaattctcctgcctcagcctcctaagtaggtgggattacaggcatgcaccaccacacccggctgattttgtatttttagtacagatggcatttctccatgttggtcaggctggttttgaactcccgacctcaggtgatccgcccacctcggcctcccaaagtgctgggattacaggcgtgagccaccacgcccgaaaaaatgtatatgtttatgtcaaattgtagtgaacacatgggggaattacactgttgttatactggggtatttggataatgtttactttttcccctcgcatttataaactgctattgaataatttttataacttaaaaagtagagttgtttaggccgggcatggtggctcacgcctgtaatcccagcactttgggagacagaggtgagtggatcacctgaggtcaggagttcgagaccagcctggccaacattatgaaaccctgtctctactaaaaatataaaaaattagctggtgtggtggcaggcatctgtaatcccagctactcaggaggctgaggcatgagaatcacttgaacctgggaggcggaggttgcagtgagccgagatcacaccactgcactccagcctgggcaacaagagcgaagtaatgtctcaaaaaaaaaaaaaaaaaatagagttgtttagaaacaacaactaataaagaggagaggtttaccaaccaaaatgaaaaacttcgttttcggtctagattaaaacattaatccctacaagtgttgactactggttttcattgatctaatctgctacagatttattgatttacctctaagtcatattatgaatatttataaacttacaaagaaatctatctagaaacccagttaacatataacatccgacatactgtatttcttgtcagacaaggaatattttgcacttgattttcttatagtaacagaggctattagccctgaattttgtattatgtattgtggcgttgatgcatcacgcaatactgattgtattcggttgcgtgagaacagtgtaccaagctcagagtcaactacaaggccaagtacaaagcatgattgttactgtggactgtcttgatagagaatgaggcacagatcataaaaatgcccactttttggccaggcgtggtggctcacgcctgtaatcccagcactttggaaggccaaggcgggcggatcatgaggtcaggagatcgagaccatcttggctaacacggtgaaacccgtgtctactaaaaatacaaaaaattagccgggtgtggtggcgggcgcctgtagtcccattactcgggaggctgaggcaggagaatggcgtgaacccgggaggcggagcttgcagtgagccgagatcgtgccactgcactccagcctgagtgacagagcgcaagactccctctcaaaaagaaaaaaaagcccacttttacatatgctactatatataaactcagctgtgttcaatgctgatgagacaaagactgaagctatgtgtccaagtcctcccatcacgtttttaggaagaatactatgcccagagcatcaggatgtcacaagatctcgaaatcacttcctttgagcgtttgctaaagtttggatctaagtatctttaacctagaggagaagaccaaggagatatatgaggaaaattatgaaggaaagaacactgatattgtgttggtctagaaatacttaaggggtgcctgtaatttcagctacttgggaggctgaggcaggagacttgtttgaacccgggaggtggaggttgcagtgagctgagatcgcgccactgcactccagcctgggcaacaagagtgaaactctgtctcaaaaaaagaagaggaaaaaagaaagaaaaagaaatacctaaggtagaagttgagagcaggcagaattttagctcagaataaaggactttataattatcaaagtcaccctctaactcagccatggaactgattttctcatgagtttccatgttaccagtctctgggagtgtttggtgaaagattaaccatcccactgccagggatgttataaaaggggaaggaactacaaggtgattgcatgactcttgcaggtctgaaattttgttattctaaggcatttgttttgtcttgcctgcctgcctgcctgcccgcctgccagctccctccctccctgcttccctccctcctgacttcccttcctcccttctgtgtgttttgacagctgtacccatttgcgtgaatttgtatgacctttcgaacatttccatcctcccagaaagtttcctcatgtccctttctagtcaagcaccccagaggcaaccactttctgatgtctattttgtaggctaggtttatccttgtatttcttataaatggaatcacaaagcatataatgattgttttcttatttttagccaacaaaactttttgagatttagacagttgtggcatgcatgagtagctcatgctttctattgccgaatagtattccattaacagatataccccaatttgcttttctgttctcctaatgatggatatttgggttgtttctagtttggggccctcatgaataaggttgctatgtatatttttgtacaggctttttttttttttttttgagaaataggcttttatttccgtttggtaaatacctaggagtgagccaggcatgatggctcatgcctgtaatcccagccgaggcaggtggatcacctgaggttaggagttcaagaccagcctggccaacatggtgaaaccccgtctctactaaaaattcaaaaattagacaggcgcagtggcgcgtgcctgtaaatcccagctactcaggagggcgaggctggagaattgcttgaactcggaagcggaggttgcagtgagcggagatcgtgccactgcactccagctccagggtggtaatagagcaagatgccacctcaaaaaacaaaaaacaaaaaacctaggagtaaagtttctgggtaagatggtagatatatggttaacttgatgagaattgacaaatacttgtacagcgccctttgtgccatattttcccccaacaattagtattgtaagtctttagtttgcacactgtagtgagtgtgaagcagtatcttattttggttgaaatttgcatttccctaatgacttaacaatatttgagctgtttttcatgtgtttattggccatttgtatatcttcttctgtaaaacatctgttcagatcttttgcctattttaaagttagcttttctttattgttaatatgtaggagatctttatatactctagatacaaatactatgtcagatatatgttctacaaatattttctaccattctgtggcttatttattaatttttgtaatagtatctttggatgaacagaaaatttctcttgatagagaatgaggcgtggatcataaaaatgtccacttttacatatgctactatatataaacagaactgtgttcaatgctgatgagacaaagactgaagccatgtgtccaagtcctcccattacattttaggaagaatactatgcccagagcatcaggatgtcacaaaatctagaaatcacttcctttgaggatttgctaaatcagattgaccaatctcttttcttttgtggatagtctttttatgtcctgtccaagaaatttttgcctacctactccaggctataaaaattttctctcttttttttttttcttttagaagctttacagttctaggttttacagttaagtctatgaaccatcacaatttttttttttttttggtatggagagaaaagggttgaggggttttttacttcctcatacatatatccagtttttccagcaccatatgttgaaaagaattttctttcctttgttgagaattgagcacgtgcgtgtgtgcatgtacacacacacacacacacacacacaagtctatctggactctgttttgttccattgatgtgtttgtccttattctaatatcagactctcttgattagtatatatttataataaattgtgaattttggtaacataatacctccaacttgttttgttctgttttgttttgttttgttttgtttgagatggagtctcgctctgttgctcaggctggagtgcagtgggtgcctttcttggctctctgcaagctccgcctcccgggttcatgccattctcctgcctcagcctcccgagtagctgggactacaggagcccaccatcacgcctggctaattttttgtatttttagtagagacggggtttcaccatgttagccaggatggtctcaatctcctgacctcatgatccacccgcctaggcctcccaaagtgctgggattacaggcgtgagccaccgcatccagcctgtttttctttgttaagattattttggttattctaaataattttctttgtaaattttagaattggcttgcaggtttcattttaaaagcctgctagaattttgattaagattgcattcaatgtataaaattctgtacgatatctgtcaattgaaaaaaaaatgaaccagtatctttaaaataccgtgttctctcttataaatgagcaaccaatatatgaaaaaaaaaaaaataacaaatgagggtgaggatatgtggagaaaaaaaggaactcttttatactgtaggtgggaatgtgaactagtacagctatgatggagaacagcatgggggttcctcagaaaaccacagatagaactaccatatgggtcaggccagttctcctttttttaggccttctttcatttctcccagcaatgttttatagtttttattatagaggtcttacacatcttcagttagatttatttctgagtatgtaatatggcttttgatgccgttataatggatttttttacttttattttttctccgttctttatcactggtatatagaaatatattgccttttactattgactgtatgtgcaaatttattagatttacttactagttctagtagtttttaaatagactttatcgttttctgggtgtacaatcatgtcatctgcaaatgcacctttacagctccctttcatacctttttgctttcttcccccctgccttattgaacaatctgggacttctaataaaatgttcaacagatgctgtcagaatagacgtcatagccttgttcctgatcttagataaaaaatgttccatgttccacctgtaagtatgatgttagctctgagagttttaaatatagatagccttcctcaggctgaagaagttccctttcgtttctattttgctgataatttgtatcatggatggacactgaatttcgtcataccctttgtctgcatttattgagatgatcatactattagctccttgagtctgatcattgatttcacatctttcttctttactaatatatgcatttagagcactaaacttccataagtcgtgctttagtagcatcctaaaaacttttgtgctaggttgttgtcttgttctattcaagctgctatattaaaatgccatcaactggctggcttataaacaatagaaattctcaccgttgtggaagctggggagtcaagatcaaggtgcctacagatctggtgtctggtgaggatctgtttcctggttcatagacagctgtcttcattgtaacttcacatggtggaagaaatgaggatgctctctaggaactcttttataaggtcataaatctcatgcatggaacaggattcgttcattcatacgggctttactctcatcaccattcacctcccaaaggccccacatccaaatgtcatcacactggtgatgaggcttcaacataattttgaaggcacaccaacatccagtctatagcagttgtccttctttctgctttctgctttctcttgtggtttcatctttgccctgtggggaaatcagaagtgttttccttaattttcaaatatgacagaatttcccatttttgacatgtgtcctttcatcatgatgaaaagttcctttttatgtctaataatactccttttcaagaagtctgtctggtctgatattaatatagctttgccacctttctcatacaaacactatgctttatagtgagtttcatagcaaagtatatagttgtgtcatctttttttaaaaatcttgctgggggagggatagcattaggagaaatacctaatgtaaatgacgagttgatgggtgcagcaaaccaacatggcacatgtatacctatgtaacaaacctgcacgttgtgcacatgtacctagaacttaaagtataatttaaaaaagaaaaaaaatcttgcgtgataccctttgtcttttaattgaaaagtttagtctgtttacattaatgtgactattgatatagttgaatttaagcatgccagatagatattgtatttctgttcctttcatcccatctatcttttgttcctctttacccctttcctgaatcatacatttttagtatgtaattttatttcttctgttaatttttattttaaaactatacctcttggcagggcatatgtgtgtgtgtgtgtgtgtgtgtgtgagtgttttcttggtttcttttttaagttattgctttagagctgagttgttcgatacatgtagctatttatattttaattcattgaaatatgagagaattaaaatatgttctgagtattgtatagaaaatgaattaaaatgaatcaggactagaaacaaggataagttaggacattgtttgtttgtttgtttgttttttcccccaagacagagtcttgctctgtcacccaggctggagtacagtgatgcgatctcacctcactgcaacctccacctcctgggttcaagcaattctcctgcctcagcctcccaagtatctggaattacaggcgcacgccaccatgcccagctaattttggtatttttagcagagaaggggttccaccatgttggccaggctggtctcaaactcctgaccttgtgatccgcccgcctcggcctcccaaagtgctgggattacaggcgtgagccaccagcccattcattgtctttatcttttcatatttattttatcttgctgtatacaaggcattctcctaggggtgggaggtataaggatgaataaaaattagtttgtatcataatcttcctgttaaagacatgtaaacaaatcgatagaatataactatacggtctataaataagaggtttgtaggaagtgctgcaggaggcaagaagcaggagcacccaactcctttgtgcctttcagatactattctttttgcatgggttgcctttttcctgctttttcacccatgtcgccttcagaatttagctcacacatcattctggaaactttatttgatttccttgtttgctttacttaatgctttaagaaaaatggtgactggtattgaacagcacatctccaaagcagtcactataaaaacaggaaggagggagaaggagggaggaaaaaaaaaaaacaaaatgaaaaatataatagtcataaatcccttgacagagatatgttctgagaaatgtgttgttaggtagttttctcattgtgcgaacatcatggagtgtactcacacaaaactagatggtaaagcctgctgcatgcctaggctatatgtatggtatggcctattgcccctaggctgaaaacctgtacagcatattattgcatgtaagcagttgtaacaagatggtaaatatggtcgggtgcagtggctgacgcctgtaattccagccctttgggaggtcgaggtgggtggatcatttgaggtcaggagttcgagaccagcctggccaacatggtgaaaccccatctctactaaaaatacaaaaatacaaaaattacgggtggtgcgcacccgtaatcccacttacttggaaggctgatgcggaagaatcgcttgaacttgagaggcagaggttgtggtgagctgctatgacaccactgcactccagcctgggcgacaagagtgagactccctctaaaaaaaaaaaaaaaaaaaaaaagtttctgtatccaaacatagaaaaggtacagtaaaaatatggtattataacattataatactgtaccacttatggtactactgtcgtagatgtggtcggtcatcgactgaaatgtcatgtggcacatgactatataggctcactgtaagaaattcaggccaggcacagtgactcatggttgtaatcctaacactttgagaggctgacacaagaggatctcttgaggccaggagtttgagaccagcctgggtgacatagcagggcctggtctctacaaaaaatttaaacaataacctgggagtggtggcacatgcttacagtctcagctactcaggaggttgagatgggaggattgctagagccttgaagactgcagtgagctattgtggtaccctgtatccagtctgggtgacagagcaagaccctctctctcaaaaaaaaaaaaaaaaaaaaaacacacagaaattcaaacaacacagaaaaatgcaaggaagaaggcagcagtcacacaggatcccaccatctagaaataatcattagtagcattagattaatattatccacatatacccctataggtttgtaaatataaaaagatggatacaaataattttacatagttaagatcgtactatactatatatgctattttaaatgttgtgaagggctcaatttcacttaaaaagattagaattaaaaaagaaatgaatttcacatcaaggattcttttctttttttttttgagacagagtctctctctgtcgcccaaactggagtgcagtggtgcaatctcggctcactgcaacctccacctccctggttcaagcgattctcctgcctcagcctcccgagtaggtaggattacaggcatgcgccaccatgaccgattaattttgtatttttggtagagacggggtttcaccatgttggtcaggctggtctcgaactcccaacctcaggtgatcctcctgcctcggcctcccaaagtgctgggattataggtgtgagccaccgtgcccagcccacatcaaggattctttacaagagatagtaattactaaaagatccctcaagcttaacaaaaaacattaaagttttggtgattttaaaaggctacaagtttctgtatgattaacttttcaactgctcgatatgcctcgttgcgagagatgaagaaattagcactttcaatttcttttcaccttccttccccactcgcaaccactgactaatttttcagttggaattacattgtactgttgtgacctttctgtacctttctgttatctaatccacgtatttgtttactcttagtccagtatttaaatggatttggttctctccatcatctctttatttatcttttgattggctagatttcttcatcatgtagttttctcaagaagggcccaggtagtccctgaagtctactgtgccgtctgttcctttttttttttttttttttgagatggagtcttgttctgtcacccaggctggaatgcagcagcgtgatcttggctcagtgcaacctctgcctcccgggttcaagcgattctcctacctcagcctcccgagtagctgggattacaggtgcacaccaccacacccggctaatttttgtatttttagtagagaaaaggtttcactatgttggccaggccggtctcgaactcctgacctcaggcaatcctccctcctcagccttccaaagtgctgggattataggcgtgagccaccgtgcctggcctgtctgttcctttatacttgaatgacagcttggctaggcataaattcggcaggtcatgctttctttcctctgaatgtggcatttctcctgtctgctggaattgtgttaaatcagttttcttctttactactgcttttttttttccttttacaatcagaattgcagttttcaaagaatcgacatgagttctgtaccttttcagttactgcactcgagatcattattgctaggatgaacaaccacagctgtgatactgtgatgtgaaccggggtatttcaggaatagtaatcatgtatgtttcctttctagagataattgacgaccttgccaacctagtggagaacacagatgaaaaacttcgcaatgaaaccaggcgggtaaacatggtggacagaaagtcagcctcttgtggtaagagatagctacgttatggctctgtttctgtcatagcttgtggatttactctgctctgagtttcctgtttgtctaattactgtggggatttggttgctcttctgatacaggcagttccatttgatgaagcactgaaattgctaaacaatggttaaatctggtcaaaatgaaatggagttcaaagggcatatcattcattgtttttttgttgttgtttttgtttttaatttaaaagtcctttctgtgtgtttacagagattaatggtttgggaaattgtataacattatactggttggcgggttttaaaggggatctcacttgcttttgtgccgtcttaaaataaccacaagcttaattgagttcaaatcctatgtttagtgatggtatctttgtcaagtcaccttacctcttgataccttgtatgtaaaatggggattcatatgccaagataagaatcgcttggagggcttgcttaaaatactgatcctgaggccctcccctggggattctgattgagtagatctagggtggagttcaagaatgttcattatttaacaagtgtaccaagcagttctgctgcaggtgcttgttctgcagaaattctgatgcagacttttgtgaggtttaaattgtgtattgccggtgcacagtgccttgcccaaaggtacgtgatgataaatgatgggaatagcagtagtaatcacagtaattgtttttgggtgcttcgtctcacaagggtgcaccaagattataaagctgacatatttatgaaaactagaatcacaggccacctgcagtggctcaggagtttgagaccagcctgggcaacatagcaagacctctctgtctctataaaaaatttaaaaattagcagcctgggcaacatggcgagaccctgtctctactaaagatacaaaaaaatagccagccattgtggtacacacctgtagtagtcccagctacttgggaggctgaagagggagaattgcttgaaggttgcagtgaactgagattgtgccattgcactccagcctgggtgacagagtgagaccctgtctcaaaattaattaattttaaaaattagccaggcatggtggtatgtgcctgtagtcctagctgcttgggaggctgagacaggagaatcacttgagcccaggaggctgaggctgcagtgagccatgattgtcttactgtacttccacttgggtgacagagtgaaaccttgtgtctttaaaaaaaaaaaagaattacaaaagcaatttaaaaaaaacctagagatctgagaacatactttgccaaactttcagcctttttaatatgaaaaatgtaatggatcctctccatctgtccactttggaagctctgggcaagggtccctgagatgtgcagcttcagaagcatcaccttccctggctgtgtttgctcagtaagaaagaaggctagaacaatggggtgagagagggtcaggcacatagagactctgcaagctcagaggtagtggagccccatggggtctccttgagaccctttatcaccactgtcctgcccgaccatcctgccctgtgcttctggtcctcagtttttgctttatcaatcttctcccataacttctggccacagggactttgttatctatgatagatcctgaaactttaaagatgagagatactgtgtccggaattggttccttcaggtgggttcttggtctcgctgacttcaagaatgaagctgtggaccctcgcagtgaatgttacagttcttgaagatggtgtgtccggagtttgttccttccgatgttcagatgtgtccggaatttcttccttccggtgggttcgtggtctcgctgacttcaggagtgaagctgcagaccgttgcagccggtgttactgctcacaaaggtggtgcggaccgaaagagtgagcagcagcaagatttattgtgaacagtgaaagaacaaagcttccacagcatgtaaggggacccgagcgggtcagggttgctgcctcaggtggcctgattttattcctctctttggctccgcccatgtcctgctgattggtctattttacagagtgctgattggtccattttacagagtgctgattggtccattttacagagtgctgattggtctatttttacagagtgctgattggtgcgtttacaaaccttaagctagacacagagcactgattggtgcatttttacagcgtgctggttggtgtgttttacagcatgctggttggtgtgtttataaacctttgtctagacacagagcgctgattggggcattttttacagagtgctgattggtgcgttttcaaacctttagcgagacacagagcgctgattggtgtgtttataatcctttagtgagacagaaaagttctccaagtccccacccgacccagaagtccagccggcttcacctctcaatatgagttcacttccacctctctcttaatctgggcctcagtttcctaattataagaaagcggagaatttggttatcaaaattcagttgtatggactatgtaaagtgtccagtgctggccacctcccccagctttccatacgtatgtgagaggtgccagagcatagatatcatgagagtgagctctagagcctggcctcacacccgagcttcacgaactctctctagctgcgtgacctcaggaaagcctaaactcccttttgccacgattttcccatctttgaaatggggataatagagatatagacctcaaaggattgttatgagaaataaatgattgcgtgtatgtaatatatatatgtatgtatgtgtatgtgggtatatatgtatatggttggtgcaaaagtaaacgtggtttttgccattactgcaatgactttggcaccaacctaacatatatatatcacttaaaaccatctttggtacattgtgtgcggtgagcaagtactggtattagctctcgttactatatgtctagagcaggaagacatacaatgttatatatgttgtttttgttgttctcagcaattatgttgctagtttggaatgaatatattcatagacatgttggcaagtttttgtgtttgcaacatagtaactcagcacatgccactcatgaagtcataatgaatgtggaatatttcttacactgttgccagtttttaatttgatgttaatatctggtgtgtagtatttttacccagaagtgtcataatgtcttctgagctggactcttaagtgttgttttttgaaaatagaaaagaatttaaggaatcccagaagtactaaaatacgtttggaaaacttgtgtccatattttaaaataactatacatttatctcatgcctcattttatttaattatatatgtatatattatctgccacagaattatatgtaatgattcaaaagggagaagttcatcagtatagcagtgttaagtagatactgaaaaaagaaaattcttctttttttttttttttttttttttgagacagagtctcactctgtcaccctggctggagtgcagtggcacaatctcagctcactgcaacctctgcctcccaggttcaagtgatttctcctgcctcagcctcctgagtagctgggattaaggcgtgcaccaccacacccagctaatttttgtatttttagtagagatggagtttcaccatgttgcccaggctggtctcaaactcctgacctcaggtgatctgcccaccttagcctcccaaagtgctgggattacgggtgtgagccaccgcgcccaacctctttattcttttaatggaaatactttagagatcattatttctgttatttcttcaattctttttgtaatatttacttaataattttatcagtattatggatcaacaaccaagtaactgtacttatttcctatgcctgatacctttacaggacaatttttgcattttatatatgcatttgttgacatgcagtgctagtttttgcatgtcgatgaaggtcagcatgtggtctctaaagctgtacgggggtcagtcaagtatttaagcctctcaggaatttccttttaagccttcaactgatcaatattatgcctgtgaacacaaagcatattgtggaacttactgagtaggtctagcaactcttggcaaaattaacctgacctgtttaaaaaaatttcttttggctgggcatggtggctcacgcctgtaatcccagcactttggaaggccgaggcatgtggatcacctgaggtcaagagttcaagaccaacctggccaacatggtgaaaccccatctctactacaaatacaaaaattagccaggcgtggtggtacacgcctgtagtcccagttgcttgggaagctgaggcaggagaatcgcttaaacctgggaggcagaggttgcagtgagccgcgatcgtgccgctgcactccagcctgggtgacacagtgagactccatcaaaaaaaaaaaaaaattaattgtggtaaaatatatatagcataaaatttaccatcttaactacatttaaatgtacagttcagtggcattaaaaaaaagaaattctagagatagagtctcacttcgtggccgaggctgtccagaacttttttttttttttttttagatagagttctgctcttgttgccctgactggaatgcaatggtgcaatctcagctcactgcaacctctgccttccgggttcgagcgattctcctgcctcagcctcctgagtggctgggattacaggcatgcgccaccacgtctggctaattttgtatttttagtagagacagagtttctccatgttaatcaggctggtctcaaactcccagcctcgggtgatccaccctcctcggccttccaaagtgcttggattacaggtgtgagccactgcgcccagccactttttttaacatcccaaactgaaatttatccaagacaataattccctattcctccctctttcagcccttggtaactacttttctactttctgtctctgtagatatgattattctaggtacctattgtaagcgggatcatatgtatacttttatatctggcttatttagggtgatgtcttcaagattcatccatgttgtagtgtgtatcagaatttcattgctttgtaaggctgaataataattccattttatgtatatatcacattttgtttatccatttgtcagtggacacaggttgttccaccttttggctattgtgaataatgccaccataaatgttgctgtacaaatagctgctcaagtctttccttttttgtgtatatatacagaagtggagttgttggataaaatggtaattcagtttttaaatgtttgaggaaccttcatattagcctggcttggttttgctttcagcctctaaactcttaggtactttccagtattttctttttctttttctttttcttttcttttctttttttttttttgagatggagtcttcttgctcttgtttcccaggctggagtgcaatggcatgacctcagctcactgcaacctccgtctcccaggttcaagctattctcctgcctcagcctcctgagtagctgggattacaggcatgcaccaccacgctggcgctaatttttgtatttttgttaaagacagagtttctccatgttggtcaggctggtctcgatctcctgacctcaggtgatctgcccacctcagcctaccaaagttttgggattacaggcgtgagccaccgcgcctggcccgcttttctgttttttcctttgaaaaaaaaaaaaaaaaaaaatgagggctgggcgtggtggctcatgcctgtaatcccagcactttgggaggccgaggcgggtggatcacaaggtcaagagttcaagaccagcctggccaacatgttgaaaccctgtctctactaagaatacaaaaattagccaggcgtggtggtgcgtgcctgtaatcccagctagttgggaggctgaggcaggagaatcgcttgaacccgggaggcagagattgcagttagcttttatggtgcgactgcactccagcctgggcaaaaaagcatgactccatctcagaaaaaaaattaataaataaaaataaaaataatttttttaatctgataaagccagacacttctgtagcctgagaggggcaggcaaatggggtggaaatttagtccctgggcacccactctaattaggaaatgtcatgggagacccttcccacaagaaactgggaccccaaagagctacaccctcagagtaaaagtgaaccagaactaaacttaccatggggggttgtggaaagggcagcgttggcactgagcagaataggagaagaaaaagacgggagggaaaatacagtattgacaacttgtggtcacagaaaggcccacatgtgaatttgccccctggacatacatactcagggtagaccgggaaacatcataccatgaatttggtttgaggcagactcacctgttatagctcgaggtgcctggcaaaaacaaatgaaatgcctctggaggaaagcatattctaggatgctaggagccaactaaaaataaatttctaagggcaatgaccagcacatagtcaaatatattctagcatacccggaaacagcacagcatgagtgaggaccagcaatagaccatggacatgaatctgaacagaattgcagtagtagaattatcagacgttgattataaactcaattccactttttaaaatatattttaaaaatgacaagcttgaaagcatcttaagaaacccgaaaactataataagtaacacagaaattttgaaaagggaccagatagaacttctagaaataacaggtaactgaaattaaaaaatccagtgaacatatttggtatcagcagaagaaagaatcaaccagaggacaaaccagaagaaagaaaaaaaaaaaaagcataatccatttgataaatgttagcatcttgaagagaatgcccaaatgctaggcagttaaattatgatcttaataagaaaggcgtttgaggggcagagggttggtgcaagagcttcgagatacagcgaagagttaaccacctgctcttctcaagtgcaaagccacattggctgttttatatatgaacacatacaaatgcataatcaaactgcaagcaaggtgtactttaactatagggggtgggaattaagcagcccagtggagtgtaactcaattaccattcacagggcaattctatcactgtttaagaggacttgggtgcagtgtggatagcagccgccacatcatcattttacacaaaggagtgtaaaaataggttgtgaatcatgaaatggccttttgtttcgctacccttggcatatcttccttgatgggccgatgtatcagtcatagatgcttgagcagtgagagaatttctagttatgaatacagactgaactgcaaggggccacacaggagagaggcccgatgatgaatttgtttgttcagttcttaacaagggattcaagtacctctttgtgaacctttcactcaggagcacaggctttaaaatttttaccgagatttttgtgtggattttcctcccttttcctccctcaaccccaccccaatgatagcatcaagtagaaaacaatactgtttttttttttttctagcttctaaatgcaaattagactgatatttttccactggtacctctatgtattttcagatctgttacttccattaaggacatttacataaaagtaggatctttgtaattgcagtttaaatattcagtgtgcttggtcctcattagaattcaaaatagagccttgtctgagtctgacagagggcgccaattgtgaaagaccagactaagaattctgaatgactcgggtggatgtacagtcttgcttctcagcatattgactattacgtaatgttgtctaagcacgtttattgtgattttagtagtgtttcagtgatgtggttagaaatcaacccagctgacattgcattaatgctgtctcaatcgacgaccattggatctgccttcagctcatctgaatgtgatcttcttagggaggtggggcaggaccctggttaagagtagtagcatgcagcacaggtgtggcgtccgacagtcctggggcacaatttgggatctgccacttacagcctgggtgacttagagagctgcttgccctctctaagtctcagttcccttcactctaaaaggaggatagcaattagtagtacatgtgattgttctgtagactaagtgagaacagttaggtggcacaatgactagtactagtgagtcctttataaatgccagctatgataagatgtggggtttaattcatttttgttttttgagatggagtcttgctctttcgcccaggctggagtgcaatggtgtgatctcggctcactgcaacctccgcctcctgagttcaagtgattctcctgcctcagcctcccaattagctgggattacaggtgtgtatcaccatgcctggctaattttagtattttttagtagagacggggtttcaccatgttgcttaggctggcctcaaccccccagcctcaagtgattgcctgcctcagcctcccaaagtgttgggattacaggtgtgagccaccgcacctggcttgctttttttcttttttctttcttttttttttttttttttttttttggtacagggtctgtctggtctgtcatcctggctggagtgcagtggcactcactgcaacctccacctcccaggcttaagtgagcctcccacctgagcctgctgagtacctgggactacaggcactcgccgtcatgcctggctaatttttattttattttttatagacaggatttcaccatgttgcccaggctggtctcaaactcctggactcaagcgatctgcctgcctcagcctcccaaagtgctgggattacagatgtatgacactgtgcctgaccaacatgctttttatcatattagctcttttgaaccttataaaacataggtaagaaactgagttctaagtagtcttgtttatttaacagactttagagctacttttgtctctcagagaattatttttaatcttttaccacaagaataagcaattaatctggaacaaagaaggaactatgccagttcctttatttatcatgctgtttatcaagaatatttctatctggctattgtttttacttcttctttcccttatcatggttcattgaggtaagctagttaaatctcttggcccctttttctttacattcttgtgtgtctgtctctgtacccgctgtgtcatccttaattcagtatcaatggagaaatgccttgtccttcatcagtgcctatctgccttcaaaaccatcttgtcctcaagttttcccattcatctgttctcttcttcatccatgccagcacagatagtggatatcatctgtgtgccaggtactgggctaggaactggagctaaaaatgtagataggactgggcacagtggctcacgcctatagtcccagctacttgggaggctgggatgggaggatcccttgaacctaggagttcaacgttgcggtgagctatgattgtgccactgcacttcagcctgggcagtgatgagatcctgtttctttaaaaaaaaaaaaaaagggtaaaaggtagataggacttaagagtataggagagaggggacacatgctgtaaatcactaatgactgcaggtagtacagacgggtctgagtcagccaagggctcagaggtttccaagaggctgcaacacaggagcagaggtctgaagaattagtaagacaagctgcttctgagtttggtaagtgaaaagccaaaccaaaataagcagggagtatatatactatggtcccacttaaggaaaaggagggagggaggacggaaagaaaaggaggagagagacctgcatgtgcagtgttggttagagtctgaagagaggtgtggaggggcacgtggtcaccattggtgatgtgggaatggcaggacatgggtaaggcagggggctgggtgttgggatcatcaatgttttcttttgtttgtttgtttgtttttgagatggagtctcgctctgtcacccaggctggagtagagtggctcagtgcaagctatgcttcctgggttcatgccattctcctgcctcaaccttccgagtagctgggactgcaggcaccccccaccaggcctggctaatgttttgtatttttagtagagacggagtttcactgtgttagccaggatggtctcgatctcctgacctcgtgattggccctcctcggcctcccaaagtgctgggattacaggcgtgagccaccatgcctggcccatcaatgttttctttctatttgttcgtattctctctcggtgggggtgtatccctttttttctttaaagttaattttaatttttagggaaaaatacttatttgcctaatgttttattactcccagtcatcttttctgcaagtaattttttacaagattatgataatactgtatttttaaatccttcttttggctgggcatggtggctcacacctataatcccaactctttgggaagctgaggcaggtggatcacctgaagtcaggagttcgagaccagcctgaccaacatggcaaaaaccccgtctgtactaaaaatacaaaaattagccagg

SEQ ID NO: 2809 - DNA, 578 bp, Homo sapiens
ctgattatagttctgaggccctagctactcactttgcaaactccaggctccggtcgcgcacgggacgaactgcggggagtgagccgcgcgggccgccgtagtcagctgctaagagcaggaagagtccgagcggcgggcggagtctgcaggatggcaccggacccctggttctccacatacgattctacttgtcaaattgcccaagaaattgctgagaaaattcaacaacgaaatcaatatgaaagaaaaggtgaaaaggcaccaaagcttaccgtgacaatcagagctttgttgcagaacctgaaggaaaagatcgcccttttgaaggacttattgctaagagctgtgtcaacacatcagataacacagcttgaaggggaccgaagacagaacctcttggatgatcttgtaactcgagagagactacttctggcatcctttaagaatgagggtgccgaaccagatctaatcaggaccagaagtctaggatggttcagaataagcttctagaagaattctgtttaaaaataatgtaagtactgtcaaggagaaatgactcctgtggagtgatttgaaga

SEQ ID NO: 2810 - protein, 119 aa, Homo sapiens
MAPDPWFSTYDSTCQIAQEIAEKIQQRNQYERKGEKAPKLTVTIRALLQNLKEKIALLKDLLLRAVSTHQITQLEGDRRQNLLDDLVTRERLLLASFKNEGAEPDLIRTRSLGWFRISF

SEQ ID NO: 2811 - DNA, 1456 bp, Homo sapiens
ctgattatagttctgaggccctagctactcactttgcaaactccaggctccggtcgcgcacgggacgaactgcggggagtgagccgcgcgggccgccgtagtcagctgctaagagcaggaagagtccgagcggcgggcggagtctgcaggatggcaccggacccctggttctccacatacgattctacttgtcaaattgcccaagaaattgctgagaaaattcaacaacgaaatcaatatgaaagaaaaggtgaaaaggcaccaaagcttaccgtgacaatcagagctttgttgcagaacctgaaggaaaagatcgcccttttgaaggacttattgctaagagctgtgtcaacacatcagataacacagcttgaaggggaccgaagacagaacctcttggatgatcttgtaactcgagagagactacttctggcatcctttaagaatgagggtgccgaaccagatctaatcaggtccagcctgatgagtgaagaggctaagcgaggagcacccaacccttggctctttgaggagccagaggagaccagaggcttgggttttgatgaaatccggcaacagcagcagaaaattatccaagaacaggatgcaggccttgatgccctttcctctatcataagtcgccaaaaacaaatggggcaggaaattgggaatgaattggatgaacaaaatgagataattgacgaccttgccaacctagtggagaacacagatgaaaaacttcgcaatgaaaccaggcgggtaaacatggtggacagaaagtcagcctcttgtggtaagagatagctacgttatggctctgtttctgtcatagcttgtggatttactctgctctgagtttcctgtttgtctaattactgtggggatttggttgctcttctgatacaggcagttccatttgatgaagcactgaaattgctaaacaatggttaaatctggtcaaaatgaaatggagttcaaagggcatatcattcattgtttttttgttgttgtttttgtttttaatttaaaagtcctttctgtgtgtttacagagattaatggtttgggaaattgtataacattatactggttggcgggttttaaaggggatctcacttgcttttgtgccgtcttaaaataaccacaagcttaattgagttcaaatcctatgtttagtgatggtatctttgtcaagtcaccttacctcttgataccttgtatgtaaaatggggattcatatgccaagataagaatcgcttggagggcttgcttaaaatactgatcctgaggccctcccctggggattctgattgagtagatctagggtggagttcaagaatgttcattatttaacaagtgtaccaagcagttctgctgcaggtgcttgttctgcagaaattctgatgcagacttttgtgaggtttaaattgtgtattgccggtgcacagtgccttgcc

SEQ ID NO: 2812 - protein, 217 aa, Homo sapiens [sequence omitted]

SEQ ID NO: 2813 - DNA, 39329 bp, Mus musculus
  misc_feature (1)...(39329): n = A, C, G or T/U
ttctttcttccttcctttctttctttctttctttctttctttctgtctgtctgtctgtctgtctgtctgtctttctttctttctttctttctttctttccttctttccttcctactttctttctttcttaaaagatttatttattttatgtatatgagtgcctgtagctgtcttcggacattcggaagagggcattgtatcccattacagatggttgtgagccaccatgtggttgctgggaatttaactcaggacctctagaagaacagtcagtgctcttaaccgctaagccttctctccaggccccaatgtgtgttttctgtgtgaccttgaggtgtgctaactaacttcccctgagtcttagtgaataattgagtcaaccgcaatacctgagttctgattactgcagagtcgtgggaagtgctctgaatgctgctgtcagaatcctaacacttggagtcccaccaaacagagaccaggcccttggcagccctgagcattcagacataaggatacatacgagggacgtggttccaagggccaccaggttcgggtgacagtgaaggggctacaacacatagaaccctctcagccagcactctggtaacctgacacttgactgagaaccgaggtgggggaaggggtaagtgtccaatctgatctacacttgaatcccttcccattcccatacatcctaggcctattcctctgagcccgggtccaaggactcatcccactgaaccttttggaggtgagctgggtcatctctttgaagagaaaggtggggccatggctggtgtcttcttggaactccagttctagactctacctcaggtagcaggactgcaggtaagcatgtacccccatgattcaaatgggaaagctgaggtggggtgaaaggcgagggaatgagagaaccccacccgtgtgcctgtggaagggactgcggcccctccaaagctcggagtaaccagcagggtctgactttcctttggatctttaagtcctactgtggcgaccccgcaagcctgagtcaggtacccgctgctttccctaagcgtccagacacgggatactggggaacatgggttccggggcccgactctaaaagcacctgggatgctgcacggagacgctgagtggctttgagctggcagctcagctcctctgttaacccgtccctatgcctctctgatcgggaagaaactttgggccggcgtccccgctcccgggcctcgcggagcccactcaccagcgcaccagctgccagcggttctcccccggcgcccggcggcccgccatgcctgctccggccgctccctgcgctgcggaggcagctccagctgcagcaggaccagtgcccagcgcgctagcagccttggggacaccgcgggacccagtggcgctcatctttcgggcggccgtgtgccccaccctcagccgatccgccgggtcaccgcgcttctctgctgcagcgcgccggaccgccctgtctccctagcctctttgccggcccatggcctcaccctgccaaatatctgggtttctttggagcatcgagccgagagtcaggttctcagagtcccttagccccgttgtgctttgcccctttaaacagtgtgttctacttaccataaacattaggcatttaaaaacaaaacaaaatgaaacaacaacaacaaaacaacccaaattctctcaaatgcctaaaataaaagcaaatgtgccatatgaacgattaaaatattataatacagaggtaattaaaacagtacgatgccatcagggtagacactgtccaccctagcccagccccatccaagcagtcacccttccatctaccccagattcaattcgttgctggagaagttccgagactagcctggctgaccggatcagaagctccaggcaacccaaacccggtttaaaggagctcagttagaaatgtctgtagagccaggcattgtaggtttttttttcccctgtaactgcagggctcaggaggtagaggcagaaaggtcagtagttcaaggtcacccttatctacatagccggttgaaggccagcttggtttacctaagacctgtaaaggaaggaggggaacaaccccacccccacccccaccccaatcaaagaggaggaggaaaagaaggaggggggaatgcttatagagtcctcccatattagcacaaaatctgttttcctttgttttgtgtttctaaatggtatcttattatataggctgccctcaaacttttggcagtcctcctgcctcagtctccaagtgctgggattgcaagagtgcaccatcacactgggaaaccctttgactttacaggggagaaactatacagcaggaagcacaaagtctggttcccctgtgagatcctggagctaacatctagtgcaaacatgctttagagagagagagaatgtccaaagaggagcgagagaggaggatggagctgagaagtctttgcctagcatctgcaaagccannnnnnnnnnnnnnnnnnnnnnnnnnnnnnnnnnnnnnnnnnnnnnnnnnnnnnnnnnnnnnnnnnnnnnnnnnnnnnnnnnnnnnnnnnnnnnnnnnnnnnnnnnnnnnnnnnnnnnnnnnnnnnnnnnnnnnnnnnnnnnnnnnnnnnnnnnnnnnnnnnnnnnnnnnnnnnnnnnnnnnnnnnnnnnnnnnnnnnnnnnnnnnnnnnnnnnnnnnnnnnnnnnnngaggaggaggaggaggaggaggaggaggaggaggaggaggaggaggaggaagaagaaatttccagggaaagaccggcatagtggctcatgattttaatctcagaatgcagagacagggggaatcactgtgagttccagaccagcctggtctatatagtaagaccctatttcaaacaaacaaataaaaatgtttccagggattgacctgcttgctactgacctttgccattctgtccataggttccacctccactatacgttaaaaaccaagattacaaatgtgggtccgatggcatgcatctgcactcctgggtacttacaagactgagacagaatagcttaagcccagaacttcaaagccagtctggacgatagttaagaggtttttattttcttaatatcaagggtccataaatcctaaggatccccacccaggatccccacagcatctcaagtaaacagtggcaggaagatacacatacccacatgtcagcactgcaggaataccatccaagggaaagaaagaaagaaagaaagaaagaaagagagagagagagagagagagagagagagagagagagagagaaagaaagaaagaaagagaaacaagcacagtggtttggaagcagagtgtctagcataggggctgacaatttcttctaagcatcttttctttaatcttgtccagtgaaattaacctgtagactaaagaaaccaaaaagaaagtctaagatcagtgggtgaaagtatgtcgagtgtgtatgtggttgtcctgtaatctcagcactagcaaggctgaggttgaattgtcttgagtttgaggttagcctgagctacttttgtgagttctaggtcatcctgggctatggtgagagaccctgtgtcaaacggaaagggctagaggtgtagttcagtttggcagagttcttgtctaacatgcactaagcatattagacaaatctagcactgcataaaacaaggcctcgtggctcatgcatgtaatcccagcatctgggaagtggggggcagggtgatcagaaactcaagattattctcagctacgtggtgagttggaggctagcctggaatgccagaaacccagagttaaaaagaaggcaggagggacaaacattaaagatgggggaaggggaattatagttttaattatgagcacatcctactctaagatgtcctagcctgggagcatgaggacctgagttcaaattttcagaatccacttacaaagctgggtgtggctgcacgcacctgtaacccgatgcttgggatagggtgcagagtcgggatggaggctgtgacttgctggctgccaactcagctgcagattgtgtaggagccctccctcaggggagtcaggcagaaagggatagaatggaaaacacccagcttcctccacccaatgcacatgtgcacacaggaatacaaagaaacaggcacgcaaaataattatctacaatatgtacacaatcacacctgttacctggaaggtgaaattacagcaaaccctatattctttgttaaagatgtacaaaaaaaaaaaccaaacaaccaaacaaaaaaacagcaaaaaatgagctccaggttcaatgaaaagacttttcctcaaaaagacaaggtggagtcctgaagaagagatggctcagtgattagcattgctagctgctcttccagacatcctgagttcaaatcccagcaaccacatggtgattcacaaccatctgtaatgggatctgatgcccttttctcacatacaagtatacatgcagatagagcactcatatgcattagttaaataaataaataaataaataaataggtaaatctcttaagaaaactacaaggtggagagaagactaagggaagcatcctgacaacttctggtctccacatgtgctcctcaaacaagcacactctcccactcctcacacatttatgccccctcatgcataagtgtgtaacagttgtcatgaagaggttgcaggattgcaagacttctccagcgaaggtattttaaaaaaaaaaaattctcctcaccctagagaggacaccaacagaccaaagaagtaatcccacctaagtctagcttagtgaaccaatgaatgtcccagggctctttaggtgaccataagggaggagttacttacaggtgcgtgggtcacaacttatgaaaactcacctgaaatgccctgcaccacttgcaaacagcttggctaatgggagagttttcttgccgaggcaattgttactgcttcaacaaccttaaggagaggttttgtgaatcttgtaagtttcaggaacttccgggaactcttaaatttctttagcttcttccatattataagcctcccttctgaagggaatgcttccacaatagtatagatgcataaacaaaagtcatagtaaaacttgaaaatgtcgtactatgaaaattatgtaaaccatcatgttcatgaaaaccctagaagaggggtcacatgtgcagctcaatggtagagtgtttgccttgcatgcccaaggccctagggctggtccccagcacccccaaaaaagaaaagaaaggcgaaacttgacaatacacaaaagtaatactctagtagctttatttttgttgctgtgccttttaatctgtcagggtagaattagtagctataccttttcatcacagcactgaggaggcagaggtgggcaggcaagccagtgctgcatagagaaacctccatctcaaaagacattaaaaaaaatggaagtaagaagtggtatacctaagggaagagatacattatgtgtaatgaagctagtgaaaattgggaaaagaaagaaagaagaccatgtttatactagagcaccaagaatttgggaatcagttgtccaagagcaaagatactgacctaaaattgagtgattccaggcataggcaggtggacaccgtgggattctttaaatagagctcagtcaagtgaacaccaggttgtggggtgggaggtgaataaaaaacatagaaaaatgatatgcatgtgtaagaatgggaaaaggtacggtggaagctcctgatccacctgccctgaatggaggagttcatggacagggttgaagtcaaagggatgagtctgagactcaactctgatctagaacacatatctccatcattatcatcaccatcattatcattgtcatcatcacagtctccaccatcaccaccatcatcaccatcatgatcaccaccactactgccatctcctcttgacgagctagtggtgggccaggatggatcagagactcaagaaagttagagctgaaggcattcaagtccttgcacactttgcccatcaccactatggtgctttcaaccacagccgggttcatatctccgggaggcccgatgctgctgctgcaggttaagctttcttaccactaggtggactagggctgtaacccaggctctgctgtttccccaatgtgatgttttgggtaatctcctttcagattccttttctccatctgcagataggaattgcctttgccataggaatcttccaaagtttagaggaacctgcatagataaagtgcctcgctcagaatactttctattctaaggtggcttatacacttctgtgtgctttttctttcactttgctatgaacttaacttcaaaagcaggaaatttttaagtatttaacagattctctggcacacacatattgctctgtaaatgttcattgttgtcactgttgctgtgggcacagtcatcgcagaatgacctcgatgtctctaggcctcctccaacctcaccctgctgtgcacacagctttgctcctattactgtgtagcagctgatgggttctacagctcctccaaggaaacggctctaagaaacccagccctagagcccaggtcctggctctttcatggtggtctcctgctcctgacttcagtttctttgatgggctgttcattgcttgggtgctcttatatgttatttaggactttgcaggcaaatgtgttgtgagtttctatagggcagctgtagaggactctcatatccagtgggtcctggttgaacctggttagatgcaaggactctgtaagcaacacattttgtctcatggttgcagcctggatggaatagggttaccactcaaacaagtccctatggctgtttgctttagctgctaaaagccagagtcccaggactcatctttatccagggcaaggagaacatctgggagttggtcatagcaatcctttccacatatctctctctctctctcattctctctctctctctctctctctctctctctcacacacacacacacacacacacacacacacacacacacacactacatttgaacttcacctcacaacattttgaaatttctgttttttatttcattttatgtgtataggtgttttgcccaagagtgtctgtctgtctgtctgtctgtgtatcacttgcatgcctggtgcccgtgatatccaaaagagggtgtcagtttccttaaaactggagttacagatggctgtgagctgccgtgtaagtgctgggaactgaacctgggacctctggatgagcagccagtgctctttaccattgagccattttccagccccttatatttttatttttattttaagcatatacgtgttttacctgtacaaatgtctacgcactatgtgcatgtctggtgcctggggataccagaggaaggcatcagatcccctggagttggagttacagatgattgtaaactgccatgtgggtgctaaaccagggtcctctggaaaagcagcctgtgctcctaaccactgagacatttctccagccatcccttgagatactttttgagatttgggggggggggttgttttgttttgttttttattttggagacagggtttctctgtgtagccctggctatcctggaactcactctgtagaccaggctggcctcgaactcagaaattcacctgcctctggctcccaagtgctgggattaaaggtgtacgccaccaccgcctggcttgagaatcctgttgatagatgttgtccttcccagcttattgaagaagtgtgattctaagggttcgggggtacagtggcttatgcctataattccagcaatccagagttgagtcgagattaccacaagttcaagaacaatttagcttctgggtcagactctgtctcaaaaacaaaacaaaatgaacaagcaaaaagaacaggaggaaaaggaagagaagaagggggagctcagagaagctaagagttttctagaattttctagaattattcagctgctagaggtagtatagctaatatcagagtttcagattctttcataccatgtcttttggagacggaaaacattttttaaagttctgatacctcatacaattgagtgcattagttagtttatcataatctgtatccccacaggagaccctcacagcttaggaatgctgtcctgtaagggcaggaaggaattgagaacaggacccactggccttcccaaccagaaattacttacgcatgctgaaaaccagcctagagcagagctacaaactacagatcatgtgaggttcgaacaaaacacaagcacctattaaatacaaagtgccagtcaaaacagctaagactttcaattctgccatgagaagctaaagtttttattcattgacacccaagtccacttaagcctaagagatttacaagagagctgagtgtggtggtgtatgcatggaatgccagcactcaggaggctaaaacaggaggatctggagcttaaggtcagcccaggctacaaaatgagttcaaggccagttaggactaagtgacaccttatttaaaagaagaagaggaagaggaaggaagaagagaaaataatcttgagatggtaatgcacacccttatactcagaactcaggaaacaggcatgaggatctctgtgaattcaaggccagcctggtctatgaagcaatagagttccaggccagcaagagctacacacatagtaacgccttgtttaaaagcaaaattaaggccttgtagaaatttggctcaacaagaaagtaaatatttggcttgtaatggagtgaggtattccagaccaaactttaggtctgagtccttaaagaccacctctcccttcagcatgataaggtaggattggaaatgtgttgcctttgggaactccgagcctcctgaacccctgtcatcaaccatcatgtgtacaggtgtctagtgagcccccacactatagtgagcactgtacaggtattaactcatttaattctcacaacaacccaatggtgcactccatacaccaccatctctccagagaagagaaagatgctgatggtgccagaactctaagatgagcagagtaactctagaaatctgtttacagaagaaaggaaaaggaggaggaggagaagaaggaagaggaggagaaggaggaggaggaggaggaggaggaggaggaggaggnnnnnnnnnnnnnnnnnnnnnnnnnnnnnnnnnnnnnnnnnnnnnnnnnnnnnnnnnnnnnnnnnnnnnnnnnnnnnnnnnnnnnnnnnnnnnnnnnnnnnnnnnnnnnnnnnnnnnnnnnnnnnnnnnnnnnnnnnnnnnnnnnnnnnnnnnnnnnnnnnnnnnnnnnnnnnnnnnnnnnnnnnnnnnnnnnnnnnnnnnnnnnnnnnnnnnnnnnnnnnnnnnnnnnnnnnnnnnnnnnnnnnnnnnnnnnnnnnnnnnnnnnnnnnnnnnnnnnnnnnnnnnnnnnnnnnnnnnnnnnnnnnnnnnnnnnnnnnnnnnnnnnnnnnnnnnnnnnnnnnnnnnnnnnnnnnggttcccctcccccgccccagcctcccctccccccgccccgcccacggcccctccccgagcgccccaggtccctcccttcccccttatctctcccaccccccgccccctccagctcgttcgccagttccggtcacgttgctgggtgtttacgcccgaagcctgccctaggccccccacctctgcgccccggagccccccagagccctggagtccgcaccccacagcctcgcagcagttgatggcgccgcagccgggccgcgctctgcggatccatgagcgcagctagcgcgggagaagagctcttccagagacccagcgaggcccgggccgggcccggcggctctctcgggtccgcaggtgagcaggccggcggtgggtgtagagggtgggcgctggctgggtgatcagggtgatgaagagagcccctgagctccggctccgcctggagggctgcgcggggtctggcaccgcagcgcgcgagaggcgggcaggacgcgggctgctggcagaagttgtcctccgccgccagacccgagcccttcccggcattggcagggggtccaaagcagtccagaccaccattcgcaccgttctgcctgctcttcgtatcctggctggttcctctcttccctataccctgtggtatccataaccctcaaccctgccccccaccctgcagaccccctagttctgggtgtcaaattcgaggcataaactacagagcatcaagattgaaaggtgggtcaagtttttcccgacaccccactcccatgtacctgaatcctcagcaatgctgaggttggggttgtgggatcttcagtggagcggggagccagagttgaggggtgtctgggaggagggactctgtagtgcggaggatcacaggtccttagagaatgtctctgctaccagcccccaccttgcagacagagtcccagacacttgtcaaaggccagatcttggttccagactcgtcctcaggagagccaaggacttagagggggtggcagagtaattattttttaatacgtgtactcacttgccctggtgattcccagtaagactcaattcattctctcggcttcactcttggctgtgtggtttgtttcttgcaaggaattcccagagtccaaactgcccgcaagaaggctctaaaatgcaaaggagaagtcagatttcaggagacagaaactgggtggagtgtaggaagctagggcatggctgtacagggagagagtttatctggagagcaagaggtagaatccaaaaaacaacaacaaaaaagaggtttagccagcagatgtaaagtgtggctgccttctgaggagctatgtgttacagggtgagtgcctcaaagtgtctcctaggtgtcagcacagttgtgcatgtccggcaaagggctttacctctctggggtcctgtttcttcatctctggagtggatgtactagtaggaccatcagtgtacagatgagttagtgtgtatggagctgaggacggtactgagagttagtgtgtgctagcatttgtgcctgggtcttcaggcctggacctaggaaggcttctgagatctgtgctcctcttgccatgggcttctgagtcagatgatgaagaggaataatgactaagaaaaataaagaacatatagattcgtttatccactcatccataactcagcctctcccagctcatagatctactttggctttaggaaacaacaaaaaaattagcatttacctagaaacaaggagccaaggagatatgcattcttaaagaacatcaagaatggtatagagatattcgttgaccggacagatgtttttggctccaaagaggaaaagaagcagtcagagtgaaattgaaactgggacaagacatcagtcaaggcataagacggggcacatggaaactccgtgggatacgagagcaggaggctcccaggggccaggctgatcctctcccacatgctacgctggcttgaaggaaggatggggcagaaaagaactggggagcaaggaacaagctgaaaggtggaggggctaaggagaagtgtaaacatctcagggaaattgaaaattcactggggtatggttggcatatgcctgcagtctcagcgttaaggatgctgaggcaggaagattgctatgagttggaggccagcctgggttatatagcaggttcttgtccatcgtggactacagagtgaggccattttaacaacaataacagctatacgtaagtagttaataaaaatagtttcagacttttacttagcgggcatcttttcttacttaaaagtttatcatagtaaggaccactaaagggaactagagagctagctcagcatataattcagaagacagtctgagtttaatcccagatcccaaaatggcatgagagaactaaccccccaaaattgtcctttcacctctccatgttcacagtggcatgaggggacctgtgcccccactcacccacacacacagagtacacctatgagaatatgtgccgtacatttttttttcaaaataaaagatcactaaaagtgaagccagctgtgttgtcacatacaaacaggcttttaatggcagcgctcaggaaacagagataagcagatctctgtgagttagaggtcagcctggtctatatagataaaccctgtctcgaggaaagaaaagcagagagagaacagagccactattcctaccctctggcttctggacccctcccttttcgatgctgaattctagagctctgtagagcaaaagttgaaaatcattggcagaaatgactcaagtctagagtggtaagattctgcgcttcctgtggtaaattgaacccaaataactgtaagaactgaggaggagagacattgagttcgctatgctccatgacagttatgggcagatgggaagggaaccggaaacccagagactagcaggagctgacttactcaccacgagcaggaggcagggccgcagagagacagaatggttgggaccagtaagatggcttagcaggtaagggcactttctgcccagcctgatggtctgaattccatctctaggactcatgtagtagacagtatgaatggatcccctcagttgtcctctgatatctccttttgtatgctgtggcgtgcatgagcttgacacatacatacatacatacatacatgtaatttttttttaatttaaatcagaattgtgccagcatcagaaggttcctgtgccagttgctttgctgatggctgaggccttttctgccagctttcccaaagggaagagatatctgtacctttcagacccaagagatatgtgtcaacagtgtttggaattaactataaagtttgcaccttgtatcacatccattttactcttggtgatttttttctgtttggttggttggttggttgttttttgtttttttgcgggttttgtttttgttttggggtgtttgtttggtttggttttgattttagtttggtttggtttgggctttgttttgttttgttttattgagacgtgttttttctgttgcccaggctgccccagaactctatctgtagacctggctgaccttgaactcagatctacctgcctctgcctcctgagtgctgggattaaagttgtgtgcaatcgccgacctcagtgactttttacatcttgttgtatttattctgcgtgcagggggtaagtgggagtgcaaacatgacatgcaatgacatgcctgggaaggtcagaggtcagctcgtggaagtgggttctctccttccaccatgctgactccaggtcttacactcatgccatcgaggtgggtagcaagcacctttacacactgagccatctttccagcccttaggtgacctcttgttgttgttgctgctgttgttgttgttttgtccagctgtaaaattaacatgagaaagaactagggacaccaggagtggaaatgtagaagcaacacagaccttgcagttgccaggaccgtagacagagaaaggcagaggatgtgaggctcagctgggttcagggagaagaccgagctggcaccaccaacccttcagctgctgctgcctgcttagactacatctaggacacaagcttcctctgatgcccagcggttctaggactgcacatatgtcatggagacctgctattttcctgtcccctttccgacggacttgcagctcctctactacagagttccggctgttcctagttccctctccccactctacctcctcccctcccccaaacaatccacacagtaatgcctaaaaatgaagacttgccaagattgtttgtgacccagatttctgccctaagaagaaagagcagcctgccttgttggaagtgaatggtcgaggccatccaggaaagaacaactggctggctccgcctccttgggccagcttccaggctccagggctatctggaaaggactttcacccttcacagttgtctgtgtggtagtgagcggcaacagacattttctctcttcctcctagggtaggcccccacacctccatcccgcaggtctgcacgcagcacccacacagatgtgagaagttaagaaacctggaatgctgttctgtgatagagcgtgtgtgcggccctagaatcacgggttcttacccacgtgtgcatgtgcactccttgaggtgcacacaagcccattcttcccactccagacatacagtttcagaagcatataactcacctggttctcctgcgtcagcacccagagtatgaggtagtctacctagaggcaggtggatttccgagttcgaggccagcctggtctatagagtaagttccaggacagccagggctatacagagaaaccttgtcttggggtgggggaggcaggaatgaagtcctacctgacatctatttcttccctgagggccctaggggatgtcaaacgtaattgtgtctgtcttcatctgcactgccatcagtctatgaactcccccagatctacacacttgtgcactctgcaccatttaccgagtgattcctatttgctacatactgggctaggcactggggagctggggaaaacaaaacaagagtccttcattttctgttgctaacagtctggcaagggaaacagactgtcaacaaacgtcccggacactcgtgtgccggggagttcaggaaagagtagtacaagggacaggggtgggaaatgacagaagtctctttattttgagtcattggagaagggagggaatgggacaggaggtgagactggtaaaaggcattctgcctgagaagacagtttatacaaagaaccccaggcgagtaggcttaggccagcaaagatgccagcagtgggagaccaagagacaggagcagctgaccagaggcagatagtgcagggtttgattaggacttgggtttttgccccactctgcactgcctcaaaccccaaaagcctaagatcagtccctgggatcctcacggtggaacaagaacacccatgctgtagcatgtataatcagtaaatgaatggagtctgtaaaggaaagagttggtggtggtggcacacatccttaatcccagcacccagaggtagaggcaaatggatctctgagttcgaagccagtctcgtctacagagcaagttccaggatagccagggctacacagagaaaccctgccttggagacaaaacaaaacaatacatacccacaaaaaggatgccaaagagatggctcagctataaaaggtgtatgtaaacaggtttagttcccagcacctgcatatgagctcaactgacacagcattagctttagggcaactagcaacttcttctggactccacaaagacacatgcggatgcacatagttaaatttaagtttggggttggtgtgtaatgagttttgagttgaggacagaaagttatggcagccttaggtctgtggacaggaagatatgacagccttaggtctgtggacaggaagatatgacagccttaggtctgtggacaggaagttatggcagccttaggtctgtggacaggaagttatggcagccttaggactgtggacaggaagatatggtagccttaggtctgttgtcaggaagttatgacagccttgggtctgtggacaggaagttatgacagccttgggtctgtggacaggaagttatggcagccctaggtctgtggacaggaagatatgacagccttaagtttgctgaaggggctgtggctccttggtgaaaaagaatggggcagggcagaagcaagaagccaggtactgcattgtaccagagggaagctggtgacttggactagggagataatgtaatagatctaggataattttattgtgtggctcaggcttgaaatcaactcaagaactccctaccttagactcctaaatgttgtggttatagacatgtgctgccactggcagccagagtgatagggtttttttgaacgtcaaggtcctacccctagatgaagagcaacaggcaatcaatggctgccaagagagggagaatcaatcttctcttgggatgaaccccatgataaattatccagtcccaagtgatcagctcgaaacgcatatacataagagcaatactaaatgcgctcagtaaatttttgtttgtttgagttggggtggaaatgatgtaatacagtactcaagcatgaaattataaaatataaaaacacttaattttaaaaaaacaaaacaaaacctgtatttcaggcctttaatctcagtacttgggtggcaggtagatctctgtgagttcaggtccaacctggtctacatatcaagttccaggatatccagggctatgtaaagagagacttgtctcaaaaaaacaaaacaaaacaaaacaaaacaatggaccagtggtagaggcacacgcttttaatcccagcacttggaaggcagaggcaggcggatttctgagtttggggccatcctggtctacagagtgagttccaggacagccagggctatacagagaaaccatgactcaaaaaagaggatgaaaagggatagagtggcaagatggcccaacaagttagggcaatggccaccaagcctgacagcatgacttccattccagaacccagagaggtaggagagaaccagcttccataagttatcccagcctcccctgtacaaacacacaaaatgaaagaatgcaaaagatacttctttttttttaagattatttattattatatgtaagtacactgtagctgtcttcagacacaccagaagagggcatcagatctcattacaaatggttgtgaaccaccatgttgtggctgctgggatttgaactcaggacctttttggaagagcagtcagtgctcttaaccgctgagccatctcaccagccctcaaaagatatttcttaaagagtaaataaagttattaactcactgtttctaaggaacaggagtctggtggtttttaactaggttttcctttctgagttaatttgaatggctcatctgatacgtcacgtcatatccataattgtaattagttcaaagtcagttgagtaggaaatgtgattatatctgcaaaatccttccatcttatttcttactgttttgtcttgttgaggtttctcctaccatctttttgggttctggtgttttgagacagggtttctctgtgtagccctggctgtcctagaactcactaagattcaactccctctgcctctgagtgctgggatcaaaggtgtgcaccaccactgctcagctgcagggacttttttatgtctatccctatgtcctcttcccagactaatgcttagcaacagtagacggacggacggacggacggacggatggatggatggatggattaaaatagtcgaccaagagccgggcgtggtggtgcaagcnnnnnnnnnnnnnnnnnnnnnnnnnnnnnnnnnnnnnnnnnnnnnnaaaaaaaaaaaaaaaatagtcgaaaaaaaaaatagtcgaccaagttaagacagcctactcacacagagatagacagagaaagaaaaacaaaagaatataatactgagttatttttatccttttggcttgtcttgtttgtttgtgaggtgttgtcttgtgtagtccaaactagccatgagctctttgtgtagcccaagatgaccttgaacttctgaccctcctacctctgcctccctgagtctaggattacagtggtcatgcactactactagtacttcacatttcttgtctcctttaattctcacaggtattctaggactgctagtacatttactcactaagacattttaattttattttgcctgcatgtatgtctgtgtactcttgagctgccgtgtaggtgctgggaagtgaaggaatccaggtgccctggaagaacagcagatgctgtaaaccactaagccatctctccagtcctttcaacctccatttgacattaggaaaataatatctcccggagagtagctttcattctcagaaccaacacagaggttaactaaaagagccaggattcaaactcaggcctgtttccagtgtaaacatgggtattttctttgaattgaagaacccggacatctgtattcccagctacctgggagagagaggctgtaggatcacatcagcttataaagttgagacctcccggtatcatataacaagacgccatctcaaaaatcaaaaccaaatccctggtttcctgtctcagaaacaagcaaacaaaggaagacttggctggagagctaggtgtgccccacctctgagctcaggagacggcctgatcgcctcagtgttagtagtttgaatgtctatagggctgactgggaaagtgattggcaaaagcgggatcatgtgtcatttcttgaacatacacttgataagtaagcatggcgtgttctccataggccaaagggccaccctgtgctgaaataaaaagactggtatgttgggttagtggggccaggggtgccagggaagagggcccagacaggagcctagggaattgaggttctaagaaggacctgcttggagtaaccttaccaatgaaaactccacacagaagagatgtctgttttactgcctccgccctctcaccatccatggaaatccccagagtgagtggagtgaggtccttcagaagttcaaggaaagcccagcatagtgatgtatgctttaatcccagcacttggaagacagagacagggagaatctctatgagttcgaggcctgcttgttgagttctgagatagccggagctatatagtgagaccttgtctctccctttaggaggagagacttgtgatgtaatttcatagtatagtgtttgtctagcaggtacatggtgccctgcgaagtctccagctcagcaaaaaaataagtaaacaaacaaacaaacaaaaaaaccaactgtaaaattttggggagggccacgcacttgtagtctcagctgctcaggaagctgaggcaagaggatcattggagccagcctgggtttcataatataagcttgattacccagaagtaaatacacagcttagggaatggctggcagacaagaaatgggctcttagtcctgggccccagagctcttccttccacctttgcttttctgggatgctaggccccactgcacagtcgctgggaagataaggcagggggaatggggaggcagggcctacaagcctggtcatgagtaggatttgggtgcatgctttcctgtccccaggtttccttggggatccacagtttgaggcttctgatcttagcccctgttcctctctatagactgactccacctcccgctttcagcccacagaggcaagtcagtaaacacttctcccttcagctccccctcccctctctagccaggcacagcaatgcatacctgtaaccaaagcgctccaaaggcagagatgacgagatcgtggagaattcaaggctgacctggcctgcctatcaggcccctgtctccctgtgaattgaaggagcctcatgacttagatgcatgcgggcatcataactggaacagatttcagggtcagctcccttattttacctatggaaagccaagacctcagagagggagaaggctggccctgcaggacatatctagatagtaaaggctatcaagtcatctacctgtctttgccaatttctgctccatttgtctgtctgtctgagaagcagaagagttaggaaaatgtagccagcactgccacctctgcgcacctctgcttttaaatgggagtaacaacctccctgaccggcatgctcactcagtgtccgagaaagcaagtagagaaacctaagagtggcggaatcctctccctagagaccagaggacctagtgtgaaggacaccacaagatctgaaggtggggcaagacaaatagcctctgaagatgtgctttcacattgtcttccacccaggtggggcccaggcctgggttgccatggataccgtgtccctggagcatcagatccagagcgtgcaacgccacatcagcttcctgaaaaaggagcaggtggccctgcttcgagacctgcacctggagatcctgaggctgcagaaacgctgctcaggtgaggcgaatactggccgctgggtgactggagtaaggagagggtcaccatcaccagttttgctagtgggatgctctccttaagtccctgtgagcctaacaccagttctgtcttgtctctttctggatgagaattaagacttggggtagagagctggagagacggctcagtggttgaaagcactgactgctcttccagaggtcttgagttcaattcccagcagccacatggtggctcacaaccatctgtaatgggatccgatgccctcttctggtgtgtctgaagacagcaacagtgtactcacatacattaaataagttaataaataagtaatactaaaaaaaaatgacttggggtggagtgaattctagggatgaggtgaatatggtagtacttgactgtaaccccagtaccaaggaagtagaattaggtctcagctccatactgatttctaggctagcctgggctatgtagccctgtccctcaccctctcctgctcaccacagctaaacattttaaggctgaggtagtggctcagacttccaggaaccaattctaggggacgcctgtcctttttgagttcattaagcacccgtcgtccttcatgaatcccaggctgggaaacacatggaccagtggatattagtgagatagggcagagtatagctcagtgttggagcacttgcctagcatattcacaaggccctgaattccatgccaggcatcacaaacataaaataatcatatatctagctggacatgatggggcacacctttaatcccagcacaagggaggcagaggcaggcagatctctgtgagttctagaccaccttggtctacaaacggagttctaggacagtcagtactattactcagagaaactctttctcaaaaaaaatcaaaaataaaataaaataataaactaagtatacttcagaaaataagagggccgttgaaagtccaggatgctaatccagtttgagcaggatgatggagattgagcacctccatgccaggagggaacttgtcatctctttggaggttgagtagaatgcagacatcctgacaggtgatgggagaaaagaagtgaagaaaccattccatatatgggccagcacagcaaaaccaggaagtagcacaaagctatgcttagaagagactatgagaagtccggctagagccagatcctggagaccctgacaagtacatcatgagtttggctcgttcccttggtcagtggagaatcggtgaatgagatttggagcagatgggtgcttcttcagcagcagctcagcagcagcagaggtgaattgtgtcagagggagtctggatatgtgtggcagagaggtcctggggagtagtgggaaatagcttgggggaaaggtccctctgattacatctgtgagcagagaagaggcaggcaaagaatgactggaaagtccaggcttgaacctatagcctctagtacccaggcctttcagaggcaccactgtgacccaagtgctcatgtgtctacaaatgcaggccttgtgggtgtttgttgattttttttttcttttcttttttttttttttttgtttttgtttttttttttttttaatttatgttttgttttgtttttttgagacaggatttctctgtgttgtcctggcagtcctggaactcactttgtagaccaggctggcctcgaactcagaaatccacctgcctctgcctcccaagtgctctgattaaaagattgcaccccagacccagtttttgattatgaaagtgataaaccaagacccagggggaaaacatcatacaatacatgttagtgccacagccaggattaaaaccagcactgtgccactttctgattgtgctctatctgtcctttgcccagaggcctagaaggcttcagggaccccactggcttctcatggtaacacagaacataagcagcctggcctcagcctctttgcacatgcagatcccgttgccgttttctaagataggctcctggccatctgaccacccagtgacaggatggccctataggccgctctttcatcacagtgacagtatcagaggaaaacagactaaaaatcttactgcagatcctctcttttcttctcaactttccctgattctaagaacctggtccttccgttctggacacaggatagttcccatgacaacataacaggcgggatcagagggccttacagtccccccaactgtcaagtgagtctaggctcaagcctcctggttattgattaaggagataaaaataactctggtcttgtctggaactgccactctgggggctgagatgaccgaatcaggccctccttctagcagggaggggcagggaaagcaggggaattggggagagagactgaaagaggacccagcaggccaggctgcctggaagacaagtaaagataaagaagatggagccaggtggtgatggtgcatccctttaatcccagcacttgggaggtagaggcaggcagtctttaaatctggtttacaaagcaagttccaagacagccagggctacccagagaaaccctgtctcaaacaaacaaaacaaaaaaagataaagaacgtgagatttggaggtaggggtaagttccatgggctgtggggacagcctggacaatgataagtgccctgtgctggtctagccctggctaaatcctctatttcttttcttctcgttgcattctggcaccagtcccatgtaagagagatgctgttttgctcccattttccaaaagaaaaaactaaggttcagaggagtatccttgctggccagggtcctaccatgaattgctttcatagagtactcatagaatctacaaggactcacattagaagatggacggagaaaggtgggagaaaccagtgtggtggctcacaccgttcctctcagcattcagaaggcagaggctggatgaactctgagtttgaggctggactggtctatacagtgagttccagaacagccacggctatgcaataagatcccttcttagccgggcattggtggcgcacgcctttagtcccagcactcgggaggcagaggcaggcggatttctgagttcaaggccagcctggtctacagagtgagttccagaacagccagggctatacagagaaaccctgcctcaaaacaaaacaaaacaaacaaacaaacaaacaaaaatcccatcttgtcttagttagggttttactgctgggaaaacacaccatgaccaaggcaaatcttataaaggacaacatttaatttgggctagcttacaggttctgaggttaagtccattatcatcaaggtgggaacatggcagcatccaggcaggcatgatacaggaggagctgagagttcttcatcttcatctgaaggctgctagcagaatactgacctccaagcagctaggatgagggtcttaaagcccacacccacagtgacacacctacctcaacatggccacacctactccaacaaggccactccctgggcgaagcatattcaaaccataacacatctcaaaaaaaagaaaaaaaggggctggagagatggctcagcagttaagagcactgactgctcttccagaggtcctgagttcaattcccagcaaccacatggtggctcacaaccatctgtaatgggatcctttgccctcttctggtgtgtctgaagacagctacagtgtagtcatagaaataaaataaatcttaaaaaaaaaaaaaaagaaaaaatgggggagtgggtcccacttggggttctgtttcctaatcttaagccctgtggttaatggttgaaagaaaaccgccctagagaagttagtggcaaagccaaggtcccttaggccatttcataggccttggaggaagggcaagttggtccccaagagtcctaagggtagaggcatcagagggctcccagtggccccagggagaaggttcaggccccggccatagctaaggtactctcttgtgtcccagcaacaagtggcctccccagagaatacagttctagcaaactctggtccctaagagcattttgaggagagaagaagggtaggccaagggcacaagcctgactgtaggtatgctgggcactactcccagagatgtgccactttcttccagctcgaaactttatccctgggggactggagagatggctcagcagttaagagcactgattgctcttccagaggtcctgagttcaattcccagcaaccacacggtggctcacaaccatctgtaatggaatctgataccctcttctggtgtgtctgaagacagctacagtttattcattacataaaataaataattcttaaaaaaaaaaaaaaaaaaaaaacctttatccttgaaggtacatgcaagtgctcctagtaggccctcttgactcccggctccctgctgtccttttccctgcatactatccccagtcatgtccaaactggaacccagagcaggagttctaagcatctgtctgtcactgagctgtaaacccctgatccctagttgttctgagctctgggagttggggctgaaaattgctatcacacagttgctctgagagatgaggcattgggggcaccaaagaataagtataaggaaaataagttctttttgggtgcccaggaagaacttgttcctatgccagagaccttggtgatggcattccttagcttggtgcccctgaggagcccctcccctgcaacatcaaaccaaaggctggtatattgtccaccactagatggcactgttctccttgagcccttcttgcctggtggtcaaatggggtttgggaaactacagagatcttcaggcggtaatacaagtacaatcctggccatgaaattagtgtcacgtgttcagtaaatagcttctgcctatttctgttgtctcctgagcatttcttggcattgtggcattcatcagtcaactaagcttgcatgagccacgaccctgtgtttacaagagtcctccacaaccatctaaactggcgtcatatcatcccttaaaacaggcaaatactccctcatccccaaaacaagacaggctcttctgtccacagaggtggtctctgttccccatcctaggaacaaaacctttgctggaaagatccctgggcctagaaacccaggcctaggctctgcctttagtagggctctttccctggctgggatgtaaggtagttgttgtaggtagttgtaggtggtggtgtagttgatgcctatggatctgttcttctttaatggagttctgatttttttatctgacatgcacacctacttgtgcacacacaaactcctctattctctcttccctagagctgacccacgacctggagatgagagaggtccagtctcaccaacaaggtaagaaaaatagctctgggctgtggcgggaggcacagaaggttgagtttctgcaagcactcttttttttttttttaagatttatttatttatatgtaagtacactgtagctgtcttcagacactccagaagaaggagtcagatctcattagaatggttgtgagccaccatgtggttgctgggatttgaactccagaccttcggagagcagtcgggtgctcttactcactgagccatctcaccagccctctccaagcactcttaaaatgtcttatatattagtatggaatgggacacatggaagcctgagagtttctgggagtcagtcagctctctgcttctaccagttgggtcccagggatcaaactcaggtcttcagacttgacagcaagcacctttacctgctgagccctcttgctggaccacatttgactactcactatgttgtcaaggatggccttgaactctgcaacttcctgcctttgcctccaagagcaaaaaaggaagctgcccaacactgacctctggcttccacagtgacacaacaaacataaacatatacacacactgcacacacatacaaacacataaatgacataatgaaattttaaaagatttttaagtctcacttgggccgggcatgtgctacacatctttaatcccagcactcaggaggcagaggcagacagatctgtaaattgtaggccagcctggtttacgaaataaattccaatatatccggggctacataaaagaccctgtctcaaaacaaaaatgaggaggtgctgtagcagtactgagtgacaagattaggtccagatttaatgtaggaaagaagaacgtcagctgggagacctggagctgggtcgtcgggctacctccatgttctagcagtcttcagaggactctggtagaatcgctcaagagaggcagaggggtgcctgaggcttcaaacagtttcttcatcatactatatcaaattcaaggccagcctcaactacccaatgacaccctgggaccatctgttttgtgttgagatactgcctcactctggagtcccaaatggcctagaaattactgtgtagagcaggttagcttcaagttcatgaccattctccggcctcagcctcccaagtgctgatattacaatcataaaccactatgtgggtgccagaagaattcataagaattaacagaaacctggacatgagggtgcacgcctttagtcccagcaggtcaccggaagagacaggaggatctaggtgagctccaggctagcctggtttatatagcaagttccaggccagccagtgctttatagtgaagtcattgtttcaggagggaggagggaaggaagggagaaagggagggacagagggagggagggagggagggagggnnnnnnnnnnnnnnnnnnnnttatggttttccctaatggttccctatcccattactccttccccttttggctaacaaatacagaaaggctgatagtattatagtcagacaacagtctgcattaaacttaatggatcatagaaacaaaagaatcagaacctaggctggagagatggctcagcagttaagaacatggactgctcttcagaggtcctgagttcaattcccagcaaccacttggtggctcacaaccatctgtaaggggatctgatgccctcttctggtgtgtctgaagacagctacagtatactcatgcataaaataaatgaatgttttaaaaaaaagaataagaaccttagatattttcagttggttagtggagtcctcctccctcctcttcttcttccttctccttccttttatctttcctctcccttcttctactttctctttttaaggcaggatttgatcatttaaccgccatcaccaagtttatttagtggtggatattgaacataaggccctgagagccacagctctaaccagagtcttagattttttttttttttttttttttgagacagggtttctctgtgtagtcctggctgtcctggaactcactctgtagaccaggctggcctcgaactcagaaatccgcctgcctctgccttcccgagtgctgggattaaaggcgtgcgccaccactgcccggcttcttttttttttttttttttttttttggttttggttttttcgagacaaagtttctctgtgtagccctggctgtcctggaactcactctgtagaccaggctggcctcgaactcagaaatccgcctgcctctgcctccccaagtgctgggattaaagaatccctaagctaaaatgttgtaaatcctatagattgcttcgtgaagctgaagataagctagggtacatgggaactcttagacttgaatggattctgcctgcttcttcatatagcactcatgggacacttcttggtgtctctgtgcttgaaggaagggggcacacactcacaaggaggtacatgacttaatactagctttcctctggaaaggtttttggggtcaccagagctcaagccactgctgtataaggaacatattcccctttgcctctgaaatcccagggtatagatggggagtaaagttcagaaggggaggggtcctcatctctgattctgcatgatcacctagggatgcctcagcagtgccatttctaggaccaattccagaggttctgggttagaccggtcagcaaaaaaactcccaaaatggcatctgtgctttgtggaggaaagagcacagccacccactacctcctgagcacaccttctgctactcagcccctgctgttaccatgtcttccgatcacaaggcttttgcacaagccgctctccctccaggagtacccttctccagtggagggtctgttcatcctagctctcaagcccctcttgccctgaagccttcgctgatggcatcacctccacccttagaatcagaatattaatttgtctttctgacacatgtcacactggagacctgacatttgtttatgattatttactacgctgcgccgtatgcttcatgaaaacatatgaatgtttgaggcggaagagcaggaatggcctctgggccagctgggatatgtttcacgcctttgagggcaccatcgccttatttttcccttctccacagaagaggcgtcccgagagctggaggacaagtgccgcgcgctagagtcgcagctggaggcacgggcggcggccaacgaggagctgcggcgggaggtggcacagcgggaggcgctggtgtccgcgctgcgctgcagcctgcgctcggaggagcgccgctttctggaggagctgcggcgccgcagccatcgcgccacggtgctgggcaccgagctgcagaagcacaccgaagcggccgcctacctctcctgccagctgcacgccgcgcgccagagactgcagggcccccgctctggcgccgcggccgcggagccccgggtccgccggcgtgcacaacgggcccgccgccctccggaggcggctgccaagggtccgagccgggactgggcgacctgggaagacgccgatcccatgccggaccccgcgctctttctctacccacggaggccgccgcggcccggcgcccgtggtcctcgccctctgctacgccaggagatgccggaccaagatgccccgcaccccgtgccacaccaggagcccctgtaccaaggcgacccgcaccctgggcccagcgagagcgcagtcgccacgcccagcgccccaggggatcctgagtaggcgctgggcaggccttggcaacagggaaagcaggccgggccaggctggatcagggatggggcggagtccagccggccgatccgccccagctcggccactcactagagccgcccccgcttgtgtgtttccagagatgaattgtcttctccggagagggagctcctttgcagagggaacgccaaagcaatgcaccttttttgtggtggactggcagtaatgaccctaatctgtgtgtgtgtgtgtccccactcccctgcggggggtggagtggagtcctgtctgtccttggaaagctgacaatcccttgtagggcgggagaagtctaagtctgcctactggaaggaacacggtggcacttggcactgctaggccctcaagctccccttccctgctttctccacctcccactaccccccaccccccagccctgcccagccttttgctcgggagaggcaagcttaggagctggctcgcgtactcagagtagctactccccaccccactgataagtccttgaaggtgagcacggaacactttagaatctattttagaagtcacgccctctcagagctgaggtgttcctggtggcagtgattacagagaacagcaaggctagacccttgaagccagtcgtggaagaggacctgattggttcttcccaggtttgtcatgcaggggtgcaggagattggagataggcaagctggggcacagatttgtcttggcaagggtagaagggcctcttacccttctgttcctgaggccaccttagagacttcccagtcctgttagaggtgctaatcttgcccagctttccaaacagctggctgcacccagaggcaggaaggagagcccggcttcttggaagtggcagctattcatagaaacttgatttttctggggaacaaagtaaagtggttagtccttggtggtacccatccctggaaaggcccctaagcctgtagaacctgctgataatggggtgctcctctgctgttgggagtggtaaacagaatggtgaccccttccccttcccaattcccctcactaccaaaggcaggaagcttctgtccagctcatgattgagccccatatcagagccccagaaccccactccaccactcttggtttgacctgctttgagtcctaagtgcctgtgaggtctttcctggggctgctgagagaagttgcctctcttcactcagacactggacccctagcaggtcctggccctggctgaggtaccacatttgtgtgtgtcacccaagccttgaggtgagcagtatgtctctgtagctgacttcttcagtcatggccaccgggaagaaaaagaaatcctgactcatgtcctccactttgtaagaggaagcaggaatttggcaggaagcaaaagacagtgagcacactctaacctgatcctgcacacagacccctcccctgaagggcagctgaggccattgagcagtagctaggcctgggctgacctgtctagcttttgagagctggatggtagaagcagatcccctggggtccctactagggctccaacctctaccccttcagcccagctgcaatacctgtcccacctgtcactccctgctctgtccaccgggaacctgcctgtgtgagggactcctgctcccttggaggtgcctgaaggacaataggaaaggaaagcttccttcttgggtcacctgcacagacctacatctcttgcaaaccatatttttggggtgaacagggtgactttgttaggttgacttttctagggaaagagctcttttcttatccatccacccactaaaagccatagttatccccaactagtttcccttaaactatagcaatagccctcttccttttctcttctgggcacccagggtgttcagctggctctatccaaccccatccccaggatcagacagtagtactctgcctccctttcctcaaatgaccctgtcgtacctcccaaatcctgttcctcggctgacagcggagataatgatatctgtttgtgaggtgtttgaagagcttccagatgaaagggtctaagggcatctgggtaccagtggagatcctggggtgggagttggataatgcaactcttccacaagtgagagagtgacagaaaggcctggtcagacacaggattctggtgttagcagaataccctttccctcttgtggaaataatgaaagattcccttcattggtcaacaggcgaggactccctcaggctctcgccctgggacaggacctgcccttcacttccacctcttcccttcctagatattggctataggaatccacctactggaaggaaaagtcccagccacagcccaggaatgactcggtggccaagaagggaaagggctgtttctcttggttgtacacatccccagggagagactgagaaggttcacgtggacactcaggattcttaggggagagtcccacagtgcaagtgtagacagacccggaaggaagaactgcaatggagtcctacattctagaagccacccagggacaagtgagcaatgcagctcaaggttctgcaccctcatcactatatcctcgccaaggcaacctgttctctgggggaccagttctggggccaagatggggaagcccatccctatacaagcagcaggatagagtcatcctggatggaggtggaagggaaggaggccagagggtgtgtagcgtcttatcatttgggagccagggtctcctgagcaccctctcacactgacgtgccagccttgagtgggagacatacagggcagtcagatcctgctccaaattctctgttggctgcgctttttaatccaatgctttttcagagtgtattcactcacctacagaaatagagccctgtgctttaggggtgactgtcatatgccttattcttaataaaatgtttggaaaacatggagtccattctcacgatgagagtgccgttgcctctgttgcagcagatgtagggtaaggaggtacagatgtgagagagagagtagcttggaaatcagtaggtagagtgaaccaaatgtctgagacccaaccactccctaaccccactcccagacacaccatatgctctttggggcataaggtgcttgctaaagtgatctcatctgctgccaaggcctgccagtctctctctgcatccccccccaacctgaacaaatattgaatgaatggaatcttagatgagaggtttctgagtaggctagagagggatcgttgaaaggatcccagacctggttttggcctgtttgactacactgtcccccatctgatggagctgcaaggagcccagtatcccagagacaagcccttcccatcgactgctaatgggagtcattctgtgagcacagcttcaggagttccgcccactgtcaatgtacatctacgctgtggacagccagaatccgctctgcatcctgagcatgaaaaggaccttgtttctatgtacaacccaccccacccccataattggagccatttcagtctatctggggaacgggaagggaaaggggctgatcccatcatgtggcaaaagtaaggtaggttgcattcaatgggttgaagatggccacaggagtcactccaagacaatgagtcaatcatgggacttttgttgaagctgtatattcaacattccatcttaggcactaaggctgtagcagtgaagcacataggactgttggcaaactcctgcgcagctaaaatgttcgtccgtgaacttggaggtatagtgtgtcatttgccaccacaaggggtaaggtatccagaaaaatgagcatgtagattggggatatggctcagcttgtcggttgcttgcctagcaagcacaaagccccagcactgtgtaaactggacatggtggtacatgccaataggcttagtatccaggaggtaaagcaaatgatcacaagttgaagctcgtctttcagtgcacagtgagtttaaaaccctctactatacacaaggtcctgcctttaaaagggggttggggagctagagagatggctcagcagttcaagtcaagtactgctcttccagaggacctgaatttgagttccagcatccatgtctctggtaactccagctccagaggctctgacacctttttctggcctctgcaagcacagcatacacacacacagtcacacacatgaataaagataaatagtacaaatactttttaaaaggtggaatgaggaaatagctgataacaaagtctgtatccacagattcacaggtctctgaattcccctacacagtaaggcctctccctctctacatagccttagaacgcactatgtagtccaggctggctttgaactcacagagatctggcagcccctaactccccagtgctgggattaaaggtataacccaccatccccagctcacatttgcttttatgtaatcaagattgatttgtgtttctttctcctcttcctcttctttatcttttgtggaactggggattgaatctagagcctggcataggtgctctactattgagctatagtctcaggccattttaatttaaaatttttatttttattaatttttcattagcatttatttggtggtggatttgtttgttttctatttgttttgtttttgtcttgtggctgggtgtcactgtgaagcccaggcctctgtttattcctggtacctaatctcttggaagggtgtggtctaaggaagagaagattcaactcatgataaacacctgcccaagactgggcatcaggtagagtttgagaaaatcagaaagagaaaagggggagaagggggctggctttgggttgacacctggtactaccacgtgccagggctgcttggttaaatccagttcagagccttggtgtgaggtagagatgtgaaaagtcaacatcagataatgttcagatatcattctataaaatgtaacctcattttacagatgggaaaactgaggcccaggacttttccctaccaacatcccagtttcctggcagttcttcatcttttcttcttgatccccaagttcagaaccagagtttaggaggctcatcctgcagtccagggactctggggtctaacctcacctctctagctgcctggggaactccactgggaaagaaggggggaagtgggtgggaccagctgagtagatgcatccatcataacaataattaggaggctttgagaagactaattatgtgggccaggctgtagcctagataaacctccatgtgtatttcttttcttttttttttttttccttcgagacatggtttctctgtatagccctggctgtcctggaactcatgttgtagaccaggctggcctcgaacttagaaatccacctgcctctgcctcccgagtgcttccatctgtatttttacagcatctttgtgtgggcccccaaaacagggaaactgaggagcccaggcatccttaaggcaacctaaagaatggagtggtacattaggactgaaaaggacaagcaaggacatgtggtggatcctaggctgctgaccagtaggccctacagacgctggccatgagaaggctaggggaagggctgctgccactgcttcctcctcctccttcccctcctccttcccctcctcctcttcttcctcttcctcctcttcttcctcctgttcctcctcctctccctcctcctctccctcctcttcttcctcctgttcctcctcctctttccttctatttctgaaacagcatctcttgtagccaaggctggtctatcttgacccgatctcctacctccacgtcccaagtgctaggatctcaggtgtgcacacctgaacactggggttaggaagggaatttctgttggaagtctgtgtggactcaggctggtgggcctcaatcaggcattatgaaaatgatccaaagctctggtcaaaggccaataacgctacaacacacagaggaaatagctgcaaggaaagccaggtattataaacagtggcggagatcaaaggtggcactctgagccaacagcagaactccctcccctctgggagtcttgtagagccccagaagaactgcttggcattccctacacctggtccatccactttgccaacaacatgttaagcacctaacttgcatcagactcggggaagatgctggggatactcagaggctagcctgtgctgtaccacaagatcctgtctccaaggtggggtgtgtctgtacaagtatgctatggaatcccctggtttaggactagagaaacagttcaaaggctttttttataggacccaggttggatttccagcaccagcatgatggctcaaaaccatctgtaacttcagttccagagaatcagacagcaattctaatctcctctggctcctgcaagcatgtgatatacagaaaggacatacatacaggtaaaatacgcacacacataaaataaataaattacaaaacaaatagttaaaaaaactaaatcccctgttttcttctctcaggagtcatgccagtttggccaagccagtttcagcttatgcctttggtcccaaagttatcactattattattgttactagtttgagatagtccaggctggcctcaaactttctatatggtgagttctgactcttggtgttatgaatgtgggcttccaaccacagttgtattgtatagttacagttcttcaaaattctagaatgtcctgggaatgaaccaagtactcctcagaggttggttaaaagaactgtaatataaactccacactgggctattacttagcataaaatgggtcaagaaatctctttgcaaactgatatgtagcaatcttcatattattgctagattaaaaaaaaatcagggtggggctggcaagctggctcagtgggtaaagtgtttgccaccaagcctgatgacctgaatttgacctcccggatctgtatggtggaaggagagaacacacgcctataatttgttctctaacatccactagtgccccacaataataaataaatgtatctttttaaaaaaaaatcagagtagagataatgacatatgtttatctaataaaaaaaagttggggtgtggaaaagatggttcagcagttaagggtactagctgcccctgttttgagacaaggtctcggcatgtagctttggatgccttcagagatccatatgtctctgtctgcctagtcctgggagcaaaggcatatgccaccaggcctgattgcactggctgtcttgcagaggactgggtttcttgccccctatggtggttcacaactgtttataagaccagcccaggcaaaatacccaaacacataaaaagcaataagtaaataaatactctaagtagcccggtagtggtggagtacacctttaatcccagcactccagagacacaggcaggtggatcgatctctgtgagttcaaagtcagtttggtctacagagttagttccaggactgccaaggctacacagagagaccctgtcttgaaaatcccaaacaaataaaaatataaaataatataaaacaaactcttaaaattaagaaagagaatagaatatagaaaaaagaaaatatacatgcacatttatgcataaatactttatatgctatatctctagtaaggtataagaattggtaacttggttggggtggtagtacctcatccctttaatcccagcacttgggaggcagaggcaggaggatctcagagtttgaggccagcctggtctacaaagtgagttccaggacagccaaggctacacagagaaaccctgtctcaaaaaacaaaaacaaaaacaaaacaaaacaaaacaaacaaaaaacaaaacaaaacaaaaaaacccaaaccaaaccaaaccagaacaaaaaaaatagtaagttgggctgtttggatgggcatgaacaagggagggagggaaggagggtaggagaagctggcgagatggctcagtggttaagagcactgactgttcttccagaggtcctgagttcaattcccagcaaacataaggtggctcacaaccatctgtaatgggacccaatgtcctctactggtgtgtctggagagacagagtggcagggcactcgcatactaaaaaaaaaaatcttaaaaaaaaaaaaaaaagaaaagaaaagaaagaaagaaagaaaaagaggaaggaaggagacagacgaaagaagacagacaaaaatttcccctcttgattctcttgcctttacctctcaagtgctggggtttcaggtgttcaccaccatgcctgactgtgtggtgcttatttcttatttatttatttttagaaaagttctcaggctggtctctaacacactatgtagttgaatttctgatccccctgcctctgggattacagacttctgccactctgcttgctagctgctcagtccaggagcaggcggggggggggggggggggtcaggctacctgctgagcaggattcctgacactctatgtcctttttacttgtcggatttggaacaatgtgaatttattatctgtgcaaatttttaagtaaagttggctgtgatggtgcatccctgtaatttatgtcgtgaattccaagccagcctaaactatagaataagacccctttctcaaacaagcaaccaaagaatagtctccacccagaagcactcaaggtgtgccctgaacactcagacagtcttgcagccttgcacaggacattgcttggagctttccaggtcagcaactgcacacacacacacacacacacacacacacacacacacacacacatactcactcactcactcactcactcactcatatacacatgtgcgtacatgccatatatacatacatataattaaaagtaaaaacaaaagcacagggctcagttagtaaagtacaaagccaggcataaggatagtcccctacaattccagcacccaagatggaaactggagaattcctcagatttgttagctagccagccagcttagctaactgctgagctccaagttcagtgagagtgtgagagagaccttactttaagaaataaggtgaggtgaaggacatgcactcactcacacacacacacacacacacacacacacacacacacacaataaaaatgtagtaaaggcaagaacacacaaacatgtatctacacacagcaaaacacctgagattcagcaagatgatagtgatttgctcaagttcactacaagagacaggtacgggttcctagggactgacttccagtccacttcgatgtcaggtccacacacaccttgcttgcctgccttttgtttgtttgtttgtttgtctgtttgtttgttgtgtgttttcttgagactgggtctagccaggaagcccaggctaaccttaaaccctttatattctctccttgccttctgagtgctgggatgacggatggaaacactgagccaggttcctgctgcctgatttctatgtgcacccagcaataaggtcttggtcattcttccaacttccttgtgcaatagcctgaaatcacttctccttagtcctgctcagttctcctttgccctcacataacagtcaagaggatctttctgacacatacatttctctcctccctctcccttcaatggagggttccttcttcttttggcttcagttctcatcatcacatgtgctctaggggcaaactgaacttcctatgtattctattctgacagtgtgttactatgtagcccaagctggtctccaaattcaggtcctccagcctttacctatcaagaactgggattgcaggcccttgtggtcacactagatctctaaaaggaaagcagatttaactttcctttgcaatgtatacaagggtgtatgtagaccgctcccatctcagcctcagattgccagggtccattaaatcctagcaagtgtaaagactgtgtttagtgtttcacaaagggcttttccacctgtgcatggaaggcttaccctgtcccctctctgcctgaacataactgtctggatagacctggtttcaatatcacctgagact

SEQ ID NO: 2814 - DNA, 768 bp, Mus musculus
atgaagagagcccctgagctccggctccgcctggagggctgcgcggggtctggcaccgcagcgcgcgagaggcgggcaggacgcgggctgctggcagaagttgtcctccgccgccagacccgagcccttcccggcattggcagggggtccaaagcagtccagaccaccattcgcaccgttctgcctgctcttcgtatcctggctggtggggcccaggcctgggttgccatggataccgtgtccctggagcatcagatccagagcgtgcaacgccacatcagcttcctgaaaaaggagcaggtggccctgcttcgagacctgcacctggagatcctgaggctgcagaaacgctgctcagagctgacccacgacctggagatgagagaggtccagtctcaccaacaagaagaggcgtcccgagagctggaggacaagtgccgcgcgctagagtcgcagctggaggcacgggcggcggccaacgaggagctgcggcgggaggtggcacagcgggaggcgctggtgtccgcgctgcgctgcagcctgcgctcggaggagcgccgctttctggaggagctgcggcgccgcagccatcgcgccacggagatgccggaccaagatgccccgcaccccgtgccacaccaggagcccctgtaccaaggcgacccgcaccctgggcccagcgagagcgcagtcgccacgcccagcgccccaggggatcctgagtaggcgctgggcaggccttggcaacagggaaagcaggccgggcca

SEQ ID NO: 2815 - protein, 237 aa, Mus musculus
MKRAPELRLRLEGCAGSGTAARERRAGRGLLAEVVLRRQTRALPGIGRGSKAVQTTIRTVLPALRILAGGAQAWVAMDTVSLEHQIQSVQRHFLKKEQVLRDLHLEILRLQKRCSELTHDLEMREVQSHQQEEASRELEDKCRALESQLEARAAANEELRREVAQREALVSALRCSLRSEERRFLEELRRRSHRATEMPDQDAPHPVPHQEPLYQGDPHPGPSESAVATPSAPGDPE

SEQ ID NO: 2816 - DNA, 50057 bp, Homo sapiens
ggaaaaaccggaaccttcgtacacagctggtgcacattcccacacccagcaccaatttatttattttattgtatttcttttctcaaacaaattctgcgacctgtacttcaccattttactcaagggactagagcatccttgaattctggtatccccaagggtgctgaaaccaatcccccaaggatacaaagggacaactgtatatacccttgacgatatgatgagaatggcacccccctggccgggtgcggtgcctcacacctgtaatcccagcacgttgggaggccgaggcgggcagatcacctgagcctgggagtctgaaaccagcctggccaacgtggagaaaccccgtctctactaaaaatacaaaattagctgggagtggtggcacatgcctgtaatcccagctgtttgggaggctgaggcaagagaatcgcttgaacccgggggacggaggttgcggtgagctgagatcacaccattgcactccagcctgggcaacaagagtgaaactccgtctcaaaaaaaaaaaaaaaagaaaaaagaccaaaaagagaaaatggcaccccaccggccaggctcagtggctcactcctgtaatcccagcactttgggaggccgagatgggtggatcatttaaggtcaggagttcaagaccagcctggccaacaaggtgaaacctcaaccctactaaacatacaaaaattaattaggcatggtggcacacgcctgtaatcccagctactcgggaggctgaggcagaagaatcgcttgaaccccggaggcggaggttgcagtgtgcagagatcacaccattgcactccagcctggacaacaagagtgaaactgtgtctcaaaaaaaaagaaaaagaaagaaaagaaaagaaaatggcacccatccctgtgatcctcctccccaaaactcataataccagtttaatcatgagaaaaacatcagagaaatcccaactgagtgagtggcaatctacaaaatatgagcagtactcctcaaaaactgtcaaggtcatctaaaacaaggaacgtctgagaagctttcacagctaagaggagctcaacgaagcacaggaactaaacgtaatgcggtatcttgaatggggccctagaacagggaaaggacattagggaaaattaaagtttaccgtaagtaaaaaaaaaagtgaaagttggccaggcgcggtggctcacgcctgtaatcccagcactctgggaggccaaggtcgatggatcacctgaggtcaggagttcaagaccagcctggccaacatggtgaaaccctgcctctactaaaaatacaaaaattagccgggtgtggtggcacacacctgtaatctcagctactcaggaggctgaggcaggagaattgtttgaacccaggaggcagaggctgcagtgagctgagattgcgccactacactccaccctgggcgacagagcaagactccgtctcaaaaaaaagtgaaagttaacgagaccatttttcttttttcttttctttttttttttttttttttttgagacagagtctcgctctgtcccccaggttggagtgcagtggcgcgatctcaactcactgcaagctccgcctcccaggttcacaccattctcctgcctcagcctccccagtagctgggactacaggctcccgccaccacgcctggctaattttttgtatttttggtagagacggggtttcaccgtgttagccaggatggtccaagagaccatttttcatcagtgagattggccaagattttaaagtttgttaatcgcagcatgagcaaaattgtgaagaaactggcatctcacacatcactggagataatataaaacggtacaacttctttggaggtcaggttggcaatatctttttcaatatgcaaatgtttttaccctgcaatttcactttgaagaatatatccaaccatgggccaggcgcgctggctcaaatctataatctcaacacttcgggaggcaaatgcatcacttgagccaggagtttcagaccagcctgggcaacatggtgaaaacctgcttctataaaaaatacaaagaattggccgggcgcggtggctcatgcctgtaatcccagcattttgggaggccaaagcgggcagatcacctgaggtcaggagtttgagaccagcctggccaacatggtgaaaccccatctctactaaaaatataaaaattagccgggtatggtggcaggcgcctgtaatcccagctactccgggggctgaggcaggagaattgcttgaacctgggaggcggaggttgcagtgagctgaggttgtaccattgcactccagcctgggcgacaagagtgagactctgtctcaaaaaataaaatacaaaaaattagctgggcgtggtggcacgtgcctgtagtcccagttactcagggggctgaggtggaaggatcacctgagcctagcgggtagaggctacagtgagctgtgattgagccactgcactctatcctgggtgacagagcaagattctgtctcaaaaaataaaaaataataaagtatccaaccactatctttgcacaagtatgcacagatatagattcaagaatgttctttgccacaatgcttgtaatatcaaaatgttcaaaatacttgaaagattgtcagtagaggttaggtaaaggaatgatgactcaaggctgggcacagtggctcatgcctgtagccccagcactttgggaggccaagatgggaggatcccttgagcccaggagtttgagaccagcctggacaatatagcaagaccccatctctgcaaaaaaaaagatgtaaaagttagccagacgtggtggctctcgatggtggacctcaactatggccccagctacatgggaagctgatggaggaggatcactcaggcctgggaagtcgaggctgcagtgagctgtgatcgccactgcactccagcctcagtggcgttgtttgagctcctgaatctagctgtgcctgaaacatgaagagctcctagagttttttcagttcagtgagtctataaattccctttttctttgaagctagtttgagtcgatttctacaatttacaagtgaaagaatcctgattcattaaaaaggaaagtaaactgactcagtgggaagtcctagatccaggggccacagctggagcatggctggccatggctggagcatggcatggattgagagggtatctcggcctcagacgtgcaccctgccaggctgcctaaccactcaagtcacatcttcaggaccttctcagaaagatgagcttttatctggggtgaggggtgaccccaaacccaattacggcactaaaaatgattcatgtggctgggtgcagtggctcacacttgtaatcccagcactttgggaggctgaggcaggcggatcacaaagtcagagatcaagaccagcctggccaacatggtgaaaccctctctctactaaaatagaaaaaattagccaggcgtggtggtgcgcacctgtagtcccaggtactcgggaggctgaggcaggggaatcacttgaacccaggaggcacaggttgcagtaagccaagatcacaccactgcactccagcctgggcaacagaggtagacttcatcttaaaaaaaaaaaaggggggggggcgtggccaggcgtggtggctcacgcctgtaatcccagcactttgagaggccaaggcgggcggatcatgaggtcaggagatcgacaccatccgggctaacatggtgaaaccccgtctctactaaaaatacaaaaaattagcctggcgtggtggcgggcacctgtagtcccagctactcaggaggctgaggcaggagaatggtgtgaacccggcaggcggagcttgcagtgagccgagatcgcgccactccactccagcttgggtgacagtgtgagactccatctcaaaaaaaaaaaaaattcaggcatcatcaggtccagcccaagaaacaaccccagcagacagtgccaggggcaagagttgggaggatgagtcaaaacaggcatccaagctctacgccttaaatctcttcctatttcttctgtgaagtgagggaactgatctggaaggtctggggtgctggggtggtcctactttctttatacctctgcctccctctgttccagttttagtccttgtggcagcaaggtggtcatcagtggcccagatcaacactctatggagacagagcttccctgtctcagtggttccagcccagttcccatgatgtcatgtcactgacctgacctaggtcacacacccatacttgagccaggcgctgtggtcgggcgatggaatgctatgtcattttgaggaaagggacactaactgcccacctcccctgaggtaattcaaaagtggattacctctgccaggggcacggtggctcatgcctgtaatcccagcactttgggaggctgaagtgggtagatcgctcgagcccaggagttcgagactagctatggacaatatggtgaaatcccacctctacaaaaaaaatacaaaaattagctgggcgtgatggcccatgcctgcagtcccagctacttgggaggctgaggtgggaggatcacttgagcctgggaggtggaggctgcagtgagccgagattgcaccactgcactccagcctgggcaacagagtgagaccctatctcaaaaaaaagaattaaataaaggagattaattctacttttatctggtttctctattggagcttcacttgaagagtgattccactgctaactaatatacttggaaacccattggcacctcctgctctgacactgtgggattttcggacaatgtgaacttggatgtgtggccacgctgggtggaaccatccaggaaatatgcaaaacagaggaaaagttaagctcctgagcaagacctggttcaaaccttgcctctaccatgcgcttgttgggtgaccttgaatccttttccctctctgaccctcggcttcctcatctttagtaaaatggaggtgctaataccttcctctcagtgtgtgcctgaatcctgactactccagagccacgggaggtgctggggaagcccacgttgctgttattgatgacattattgttcattgtatgcaggctacagaatgtaccttcagaggtgctctctgaccctgctgtgtgtgggatgatttgggatggggaggagtcccaggccgacattctcttttgaatcttggagtcctccgaggtccggggagggctgtgcaggctgccctaagctccaagtgccgccaagcagaggtcaggcccctggctgaagccgtcctgaacattgggacacctggaaccctgggacgtgggttcgggggcccagatcaggtgactcgacagcgctgcgtctgaaaccctctgagcttgcagtccggtaacctgacaccgcaggctctgacttcccagcgggccaggactgcggagggggaaagggcgactgccccgctacacggggacccctcccctgccctggtctcctaggcccccttctctgcgccctgtccccagagtgcacacccccaggggctcctgtgtttcggggctaaagcacccctttccacgcaggggttgggggctgtgggtggtgccttctcggggcccaagtccagagccctgccccgggtggcagaaggaacggagggaggcacaaatgggaaacctgaagggggcgaaggggaaggcggaagccccgtgcgagcgtgaaaggtgaagtgcagggaaagggcgcccccgcgggagggggacggggttcccccaaagcctgacggctcgcacagggtccccgtcgcccatctctttggagagccgcagagacccggcgcggggacgcggggtggtggggaccggagggggtggtggggaccaggcagccggcgcccctccgcccacccgggccccgcagcctcagcccgggacgaaactttgggcccgcgccccgctgcttcccgcgccggccgggcctcggggttcgctcccgcattaggccccgcgccgcccggcgcccactcaccagcgcaccagctgccagcgcttctcccccggcgcccggcggcccgccatgcctcgcccggccgctccctgccctccgcgggccgcacggtggaggaggctcggctgccgcaggcgggtgtccggggcgcgctcgcggggagggcgcggggagggcgcggggagggcgcggggagggcgcggcgctcagaccccgcccctggaggcggctggagccgggtcagcgccggccccgcagaacgggcgggacagcggcctctccccgtccgggtctctccccgccgcgccgaggagccgggtttctggggagcactgggcggagtctggttccccgagtcctactgacgcgcggagagaccaggcggcccattgcctcgttctgtgccttactcccttaggaaacccgttctacccaggaagtgatgcctaaagaagtaaactactcggccgggcgcggtggctcacgcctgtaatcccagcgctttgggaggcggaggtgggcggatcacgaggtcaagacgatcgagaccaacctggccaacatggtgaaaccccgtctctactaaaaatagaaaacttagcggggcgtggtggcgcctgcctgtaatcccagctactcgggaggctgaggcaggagaatcgcttgaaccggggaggcggaggttgcagtgagcagaggtcgcgccattgcactccagcctgggcaacagggcaagactgtctcaaaaaaaaaaaaaaaaaaaaaaaaaagaaagaaaagaaaaaaacgtggataagtattgtcattatattaaagtgaggataggttttttttttttagcatgacatcagtggcagaagccataaaggaagagattaatggatttggctaaaataaaaatgtttaatatctgcacatcacaaaaacacaataagcaaaattaaaaggctaatgtcagccaggtgtggtggtatatgcctgtagtcccagctacttaggagtctgaggcaggaggatcacttgagccaggagttcaagtctgttgagtgctataaacatacctgggaatagccgctgccactccagcctgggcaacatagcaagacccggtctctaaatatatatataaaatatatatatatatatatgtcaaatgtcaaactggtttaaaaaatgtgtgccccatgcgtggtggctcatgcctgtaatcccagcactttgggaggccgaggcaggtggatcacgaggtcaggagatggagaccatcctggccaacatggtgaaaccccctctctactaaaaatacaaaaaattagccgtgcgtggtggcgggcgcctgtagtcccagctactcggaaggctgaggcaggagaatggcgtgaacctgggaggcagagggcagagcttgcagcgagccgagatcgcgccactgcactccagcctgggcgacagtgcgagactccgtctcaagaaaaaaaaaagaaaagaaaagaaagtgtgccccgtgttcatggcagcattattcacaatagccaacaggtggaagcaacctaaatgttcactgatggatgaatggataaacaaaatgtggtatatatatatacggccgggcgcggtggctcacgcctgtaatcctagcactttgggaggccgaggcgggcagatcacgaggtcaggagatcgagaccatcctggccaatatggtaaaaccccatctctactaaaaaatacaaaaattagcctccacctcctggattcaagcgattctcctgcctcagcctcccgagtagctgggattacaagcacccaccaccacacctggctaatttttgtatttttagtagagacgagatttcgtcatgttggccaggctggtctcaaactcctgaccgcaagtgatctgcccaccttggcctcccaaagtgctgggattacaggtgagagccaccgggcccagccaaattgtccattttaaatgtgccatctgttccctgccaggatgctaaccaatacagaactgttacccaaactaaactgagaaagtcagaatttctgactgtcatgaagagatggaggagactctaggccttctctgccacccaggcctcattcctctagctggcattccaggccttgcacactttggcccttaccttccctttaagctatgaccactgtggctgccacagctggactcatgttctctctggcaggcgtgaggatgctgtggttacaagcttgtctctgggccaggctgggctggagtttgaatcctggctctgccatttccaagctgtgtgatgttaaattcaacctcattctctccatctgaaaatgggaataaacctttccaatacgatttatctgaagtttaaatgagatcccattggtaaagtgctcaactcaaagtaatcgtggcttcggaagcaagaggtacactttttctaaactttagttttcttttactttgttacaagtttaattttggaaatggagccagggtgtggcaccgtggctaatcccagcaaagcgctgtcatctcagcactttgggaggccaaggcaggtagatcacttgagcccaggagttcaagatcagcctgggcaacagggtgaaaccccatctctacaaaaaactacaaaaattagccaggcatggtggcacacgcctggagcccagctacttgggaggctgcggtgggaggacctgagctcaggaggtggaggctgcagtgagctgtgtttgcacgactgcactccgtcctggacaacagactgagaccctgtctcaaaaataaaaagaaaagaaaagagagctgggcgcagtggctcactcctgtaatcctagtgctttgggaggctgaggctggaggatcacttgagcccaggagttcgaggctttggtcagctatgattgcaccactgcactccagcctgagcagcagagccagggcctgtttctaaaaaaaaaaaaggaaaaggaaaaaaaagaaagtagaaaaaaggccaggcacaggggctcacacctgtaatcccagcactttgggagaccgaggtgggcagatccacttgaggtcaggagttcgagaccagcctggccaatatggcaaaaccctatctctactgaaaacacaaaaatcagctgggcgtggtggcatacgtctataatcccagctactcggaaggctgaggtaggagaactgcttgaacccaggaggtagaggtttccgtaaactgagatcactccactgcactccagcccgggtgacagagctagactccatctcagaaaaaaaaaaaaaaaaagggccgggcttcgtggctcacgcctgtaatcccagcactttgggaggccaaggtgggcagatcacttgaggtcaggagttcaaaactagcctggccaacatggtgaaactccatctctactagaaatacaaaaattagccgggcctggtggtgcgtgcctgtaatcccagctacttgggaggctgaggcaggagaatcacttgaacccagggggcagaagttgcggtgagctgagatcatgccacttcactccagcctgggcgaaagagtgagactccaccttaaataaataaataaatagataaataaataaataaaagacagagttccaggattcatcctgacacagatcaaagagaagaacatttgagacttggtgataacaattctatccatgtgcactttatcagccccttcacttgtaccttaagacagcctcacaaggatcctgttggcagagtcaatgttactcttcccatttaactgagaaggaactggagctctgagaggctgagtcttgcccagaattacccaagtagtaagtaacagagctggggccagaagccaggttttcaggctccttcatatcacctgtttttggagatacaaaacatacctttcatcattcttaccgatatctcatgaaatggagggaatatggatggttcatcagaactcacactgctgctggagatactgatatgcaggtccaaggagcacagtccaggaatactgccctctaggaaggacagcaagagacaggaagaggggtgaggctggcctttctgttcctctcccaaggatttcctcagacaggatgaagaggggccacccacagtgcagctagtagctagagttcctgcagggtgggatttgagaggcctttgaacaaaattcaaaccccgcagcctgtcaagccacctaagacagtcattcctgcaactctctgtttgtttgtttgtttgtttgtttgttttgagatggagtcccactctatcacccaggctggagtgcagtggtgtgatcttggctgaccgcaacctctgccgcccaggttcaagcggttctcctgcttcagcctcctgagtagctgggattacaggcacctgccaccacgcccgactaatttttgtatttttagtaaagacagggttttatcatcttggtcaggctggtcttgaattcctaacctcatgatccacccacctcagcctccgaaaatgctgggattagagccgtgagccactgagcctggcccctgcaactctttaggattagaattttccaggagcagctaaagctttttagttgttgacacctgagtccagttaacctttggaaagtggggaggacagggaggaaagggacccatagagaggcagggtgccccttgaggcctccccagggcctctgtggcaagtaggtgccgggtctcccagctctgaaggtacagggcttctctgaaaatttggtccaggaggaaaggccagggattatttggctagccatggagtggggaaagccaggcaccaacccattagcctgaatccactcagcccagtcctccaggcagggacaggaatgacttacccagagcaatctctgagccacctgccactcacacaatgctacctcatcccttgtcatgagcacagaggcctaacaagcactcagcagtactgttctgagcactttacaggaaggaattcatttaatcctcacaacaacccgaagatcttatgagctacatagatcatcattatcctcatttacagatgagaccaagcccccggcaggaggaagatattagggcagccacacttttgaggcacacagtgggactcctgaagcctcccacgtttggtgaaaacggatcaacagcaatgcctcgcacgtgttctgaactttggagtttttttgtttatttgtttttgacatagagtctcgctctgtcacacaggctggagtgcggtggcacgatcttggccactgcaacctctgcctcccaggttcaagcgattctcctgcctcagccttccgagtagctgggattagaggcgcccgccactcccggctaatttttgtagttttagtagagattgggatacatacaccatgttggccaggctggtctcgaactcctgacttcaggtgatccgcccgcctcggcctcccaaactgctggcctcacaggcgtgagccactgcgcccggcctgaactttggagtttatcaagaatcttcccttggctcttgggaccctcatagaacttaaagcataataataataataaaagaattttagaaatagggcatcttatcaactgcggcccagagaggtgatgtgactcacccaaggccacacagctagtgagaggtctggggcaggtttgctgctgcctagacacgggacggattcccagcccactggtcagatcgcgcttcgccccaagccttgcctgcgcggctgcgggcgctgcctctccttcctacgccagggcgggaggggcggagcggatcgcggcctggcggcctgggcgctgtccgcggtgctgatccttcgccgcgcccctgcgcgccaaggcaccggcgggttccccagtttgcccttccagctaccagccaaagccagctccgcgagcccagcggcccgctgggggcctcaggcccggttcccggggctctcggggctcccggggttccccctccccccgaccgcgcgccgccggcctcccctccccccgccccgcccacggcccctccccgcccgtctcaggtccctcccctccccctttctctctcccgccccccgcacccctccggctcgttcgccagttccggtcacgttgctgggtgtttacgcctcgagcccgcccccgaccccccttcggcgcccccgagccccccggagccccggcccgactgccccgcagcctcccagcagctgatggcgccgcagccggggcgggcgctgcagatccccgggcgcagctagcgtggggggaagagcgccgcccccacccagcccggcccggacccagggccccgccggccggtgactcccaggtcccgaaggtgaggaggccggtcggtgggcgtggggggtgtgggcgccggagcggccccaggggggagcagcgcggccaagctccagctcccccgggagggctggcgcggggctgggcaccgcagcgcgcgggaggcggacaggactcgcggcgggctgctggcagaagttgtcctccaccgcccagacccgggccctgcctggcactgccgggcgtccagagcggcccgaggtcgagccccgccacctcccgccacgcacacctttatttctgctgcctttgccctcctctctgctacctcgcttccccgtcctccttagtctccacatcccccccccaacccctgccttccctgggagtcatattggaggcataatcagggcagaacctgaagcctgaagggggtggggggctccagtttccccatacaccccattcccgtgtgactggatcctcagctttgctgaggtggagggtcctgagcgcttcagtgcagggggcagccagagttgaggggttcggcggggaggggctccggagtggagaggaccacaaggtccctggggagtgtggctccaccactggccaagcggccccaccttgcagacagagtcctagacatttgtcaaaggctgaatccttgttccaaactccagtccccaggaaagccaaggatgtggggttgagggaccagcatacttattttttaatatgtgtatttacttgccctggtgattcccagtaagactcaatccattctccctgtttcagcagcattcattgtgggcctgttccttgcaagagattcccagagacaaagccttgccctcaggaagcgtatggcttagtacagaagccaggtgcattcaggcacatgcacacacacacacacacacacacacacacacacaaacacgatgaagacttatggctttgcacggaagccaggtgcgtgcaggcatgcgtgcacacacacacacacacagaacaaagagtgataatatggcagactgtggtgctagctgccacccagattccaacaaattgcctggggaacagagaggcgggagagagtcgttccatcttggtgggggatcagggatggcttcatggtaaaagtcacatcagagcaaggccctgaaggatgggtcaggcttcaagaggcagagatagggtggatatagtaagtgaggggatggcctggctactgggctactggaagagtttgtcatcagagcagcaagagatagaatccaaaagagaagaagatcagcctgcagatgtggactgctaaatgcaggctgatcttctcccctttgggattctcttatgagaagccataaacgccaggacgagcacccagtggggtgcttctagttgccaggcactgtagttgcagatactgagcaaactactttacctttctaagcctgtctcctcatcgataaagtggatacattaatagaatcttcaacgtggggttgttgccaagataaatgagttaatatatgtaaaatgctaagaacagtaccaattacttattattataagtattattatttatgcattgatgccatgtccaagaaaggcttcttgagttcctgctttccgactgccccaggcctctgagtcaggccatgaacaggaataatgactaagaaacataaacctcatattgattatttcttttgagatagagttttgctcttattgcccaggttggagtgcagtggtgcgatctcaactcactgcaacctctgcctcccaggttgaaacgactctcctggctcagcctcccgagtagctggtactacaggtgcgtgccatcatgccctgctaatttttgtatttttagtagagatggggttttgccatgttggccaggctggtctcaaactcctgacctcaggtgatctgccccagtcggcctcccaaagtgctgggatgacaggcgtgagccaccgcacctgacctgattcatttatttgttcacttatcgccatgcttgtcctatctaatatacccgcgctgactataagaataataaaaataagtctaacattctccttaaaacaagaaaacatacatacttaaagaactttaagaaaacatggctattgactgttaagaacaacacaaagatatctgttgacttgataaatattttcagtcccaaacagaaaagaaacactaggaaaagctgaaactgggacaagagaacccgccagtgagtgaggggtggcagacaatgcaaaccccaggcaagcaggtcacaagaagtgtggggtctggttcctcttccagcgacctcctctgcttgagggaaagaaagaggtggcagaggccaggggacctggagcagacaaaaagggtgtggggaaggtgagatttagatacccaaggaaatattggactgtaaaagaggttttcaaactgctggttagcaggccaggcgctgtggctcacatctgtagtcccagccctttgggaggctgaggcggatggatcacctgaggtcaggagttcaagaccagcctgtccaacatggtgaaaccccgtctctactaaaaatacaaaaaatagctgggtgtgttgggtgggtgcctgtaattccagctactcgggaggctgaggcagaagaattgcttgaacccaggaggcggaggttgcagtgagccaagatcgagccactgcactccagcctgggcgacagaggagactccgtctcaaaaaaacaaacagctgaagcagggagagaactgtagtttcccacttgccaagtcagttgtaactgggtagggaagtgggtacccagaatctccagaaacaagcaggaagagaggtcattttcagggatcaggagcccggacctcagagagtcccaactgtgccagggtcagaaggttcctgagtctgacactctacccgtgtttggggacctgagcacagaagccttctccaccaacttccccaaagggaaaagtatttgtaactttcagacacatcagagacatgttaaaagtacttggaattaatcctataaattgtgaaccttgtgttagggtctttttaatatttttggtaacaatttttttaaatgaatattttttcatcaagctagaaaattaacaggaaaggctgggcgcggtggctcacacctgtaatcccagcactttgggagtccgaggcaaatggatcacttgaggtcaggagttcgagaccagcctggccaacatggcaaaaccacgtctctactaaaaatacaaaaattagccaggcgtggtggtgggcacctataatcccagctacttgggaggctgaggcaggagaatcgcttgaatcggggaggcgaaggttgcagtgagccgagattgtgccattgcactccagcctgggcaacaagagcaaaactccatctcggggggaaaaaaaagaaggagaaggagaaggacaaggggaagagaaaattaacaggaaaaagaactcagagaaccagaagaaggagggaagcagaaacaatgcaggctctgaggtgctcaggacagtggacagaggagtgtgacctcttccccgagtgtgttcactcaggaggctggacatctagtgctgtgtcggggggaaagatggagctgacagctccagcccttcagctactgttactggcctgggtcaagtcctcgggcatgagcttctgaaggccagatgttccaggactgcatttctgatgggaaaatcggacgttttcctggcttaggccttctgaagtagtgcctgcaactccccagccagacagagagatttttgttgtcactagttcccttccccactctatctcccaccctcccccaaacaaactaaacaataacgtctaagaaagaatatttgccaagatcgtttgtgacccaaatttcctccctgagaaaagcagcctgcctagttggaagcaaatactcaagtcgttctgggaaagcacagaaacagctggttggctcagtctctcacggtggccagggtccagtctccagagctgtgtgggaagggtttttactcttcagaaacatttgcatttcagtggctgggaacagacgtttctctctttatcctaagaacaggcccacacaccttcatcctccagatgtgcgcacagcagacacacagcagcaaagagaatcgggaaacacacacacgtactccttgaggcacacacgcaggctcaggcacacatacagatacgcaagcacacaaaccctgacatagactcacagtcagcagctcacctgtttctcttgagttatgcaccagtgtattattatgtttttattttatcatttttttttttttttttttttgagacagggtctcactgtctgtcacccaagctggaatgcagtggtgcaatcatggctcactgaagcctcaaactcccgggctcaagtaatcctcccacctcagcctccacgctgggaccacaggcacacgccaccacgcccagctaatttttgtatctttagtagagacggggtttcagggtttcaccatgttttccaggctggtctcaaactcctgggcacacacgatctgttcacctctgtctcccaaagttctgggattataggcatgagccactgagcctggttgcaccagtatattgacctgcctacttgacatctatttctccttgtttgaggtctcttgggtatatcacccctaacacatggcatcttgatcttaccttgtgtcaatctgcttctccatcagtctaccccatccccacaacttcacccactctaaagatgtttactgagtacttcctgtttgccacatactgtgctaggtactaaggaaaaggaggaaccaaagcaatgtccttcatctcagttgctaacaatctggcaggagaaacagacaataaacaaaaaccgggggctggaagcaggaggtcatgcctgtaatcccagcacttttgagatgccaaagccggaagactgcttgagaccaggagttcgaggtcagcctgggcaacctagtgagactctggtctctacaaaaacaaaaataaaaataaaaataaaaaaaatttaggccgggtgcagcgcagtggctcacgcctgtaatcccagcacttttgagatgccaaagctagaagattgctggagactagaagttcgaggtcagcctgggcaacacagtgaaactcttgtctctacaaaataaaaaatgaaaaaaaaaaatttaggccgggtgcagcgccgtggctcacacctgtaatcccagcactttgggaggctgaggtggttggatcacgaggtcgggagtttgagaccagcctggccaacatggtgaaaccccatctctgctaaaaatacaaaaattagctgggcatggtggtgcacacctgcaatcccagctactcgggaggctgcggcaggagatttgctcgaacccgggaggtggaggttgcggtgagctgagatcgcgccattgcactccaacctgggcaacagagccagactccatctcaaaaaaataaaaaaaaatacataaaaataaaaagttaatatattcatgtggtaatacattcacggaagaaaaaataatgcagattaagggaatgcagagtaacaaaagcttctattttaaattgggtgatgagagcaagtccctgaggagctgacatttggagagtcctgaatgaaggaggggaataggccttgaggagatcttggtgaagggcattcctggcagaggggacagcatgtacaaagtccccgaggcaagagtgtgctgggcacattcaggaagaagcaaggtcggagtggctggggtggaaccagcaggatgaggacagagggagccagggaagactgtgcaagggctcataagaactttgggtttgttttaaatgtgatggaaagccacacagaggattttgagtggggtttggggagacatgatcagacttatatttgtttttgttattgttttgagacggagtctcgctctgtcacccaggctggagtgcagcagtgagatctcggctcactgcaacctctgcctcccgggttcaagagattctcctgcctcagcctcccaagtagctgggactacaggcatgtgccactatgcccggctaattttttgtatttttcttagagacagggtttcaccatgttggccaggctggtctcgaactcctgaccttgggtgatcctcccgcctcggcctcccaaagtgctgggatgacaggcgtgagccaccgtgcctgacccgacttatatttgttaaaggaattctggctcctgcatggaaaacaaggggcaagaatggaagtgagatgacagtcaggagcctactgcaatggcacaccagaaggatgtttttggcttggacttgggtgatgacgatggagatagtgagaagtgactggctttgggatatgttttttgaaggtagagcaaacaggatttgcagatggattgactatggaatataaagaaagagaggaatcaaacatgactcccaagttttggcctgagcaacagaatgagtgggcaaacagcaatgtggtttatcaagatggcgaacagtggtcaagacctggtttgcagaagggaatgcaagttcagtattgggacttgaaagtttgagggatatcctcactgaatatccaaatggaggtgttaggtcatcagtctagcagccagggaagagttattttggcggtcaatagcatataaatagtatttacagccatgggatgggacaagaacacccagggagtgattatagataaagaagagattcatggtgaaagaggatgaaatggggaaagatctagcaaatatgccttcattcttgggttgcttaagctggaaaactggagatatcttagccatccccctccctatcatcatgaattaatccaatccatctccaagtcctgccagtcctaccactaaaatacacctaggaccactctccgccttcacctccatcatctcatccaggccaccatcacctggcaccttgaccactgctttattcttccagctgacctccccacatccactctgttggctctagattgctctccccacagccgccagagtgatactttaaaaatgcaaaggatagcctgggcaacatagtgagaccccatctctacaaaagtgaaaaattagccgggcacgggggcacgagcctgtggtcccagctccttgggaggctgaggtagagtctcagcatgaacctgggagttggaggctgcaatgagccatcattacaccactgcattccagcctgggtgacagagtgagatcccgtctcaaaaaaaataaaaaatgcaaatcatatcatgttcttccactgcttaaaatcctttaagaacttccaaatttacttaatattaaatgttctttttttttttttttgagatggagtcttgctctgtcgcccaagctggagtgcagtggcgtgatctcggctcactgcaacctccgcgtcctggtttcaagagattctcctggccgggcgcggtggctcacgcctgtgatcccagtactttgggaggctgaggcaggcggatcacgaggtcaagagattgagaccatcctggctaacacggtgaaactccatctctactaaaaatacaaaaaattagccaggcgcggtcgtgggcccctgtagtcccagctactcgggaggctgaggcaggagaatgaggcgaacccgggaggcagagcttgcagtgagccgagatcacaccactgcactccagcctgggcgacagagcgagactccatctcaaaaaaaaaaaaaaagagattctcctgcctcggcctcccaagtagctaggactacaggtggacacctcaacgcctgggtagtttttgtatttttagtagagacacaggattttgccatgttggccaggctggtctcgatctcctgacctcaggtgatctgcccgccttggccttccaaagtgctgggattacaggcgtgagaccccgcacccagcccaaaagttcttaacatggttttcaagacgccatgtgaacctactcttgctaaccttccttcctgcgaccctccttcagtacctttcacctcagcccttactagcagcggcaatgtctgtttctcagacagaccacgtgaagcacttagcagaaagtttgagacatagtaagcgttctgtaaatgtaagctatcattgtgatcacttacttctttcctacctctgtgccttcacagatgctgttccctgttggaggtgctcttcccttcattcttctaagtcctacccctccttcaagtctgtattagttttttatcgctgtgtaacaaattatcataaacatagtggcttaaaacaacatacatttattatcttacaatgtctaagcccaggagtctggctctttttttttttttttttttttttttttgagacagggtctttgtctgtcaccaggactgaagtgcaatggcacaatcatggctcaccgcagacttgacctcctgggcccaagccatcttcccacctcagcctcccagtagctgggactacaggcccatgccaccatgcctggctaatttttgtatttttgtagagacgaggtttcatcatgttgcccaaagtggtgagattacaggtgtgagccactgcgtctggccttagtctaccatttttaaactaggtcctctgctcggggctcttatttttttgttttttgttttgtttgttttttgagatggagtctcactcagtcgcccaggcttgagtgcagtagcacgatgtcggctcactgcaacctccgcctcctgggttcaagtgattctcctgcttcagcctcctgagtagctgggattacaggcgcctgtcaccatgcccagctaatttttgtatttttagtagagacagtatttcacccatgttggccaggctggtctcgatctcttgacctcaagtgatcagcctgcctcagcctcccaaagtgctgagattacaggcataaaccaccgtgcccagcctcagggttttgcctaattaggtcaggcccacccagaataatctccatttgattaaatcaaagtcaactgattggaggccttaattacatctgcaggatccctttacctttgtgtatagcctaatcacaggggtgaaatccatcatacgcgcaggcccacccacactcgagcagagcagctgcataccagaggctgggaatcttggggaccgtcctggaactctgcctgtcacaaggcagaaagttacagcctaaaagttacttccccaaagagaactttcctcacctcaaatctaaagcaggttcccctctttattctttcacattaccttgtaggtctctttagtggcccttatcacagattgtaattctatccttatttgtattatctgtttgacacattatgtgtttgattctcttctcttcaccccgtgagatccatgagagcagggacttcactgtgttcgttaccgtgttccccaaacccaggacagtgcttggcaatagtagatcactaaatgagtgaatgagaaagtgagcaaatcaagacaggaattaacctactcagacattaaatggacagagaagaagaggaagaagggaggtagcattgactgagctacgtcctgtgctaagcactttacatttctttattctatctatctatctatcacctatctatctatctatctatttttttgagacgagtcttgctctgtagcccaggctggagtgcagtggcgcaatcttggctcactgcaagctccacctcccgggttcacgccgttctcctgcctcagcctcctcagtagctgggactacaggcacccgccaccacgcccagctaattttttttgtatttttagtagagacagggtttcactgtgttagccaggatggtcttgatctcctgacctcctgatctgcctgcctctgcctcccaaagtgctgggattacaggcatgagccaccgcgcccagcctgtttgtttatttttattttatttatttattttgagatggagtctcgctctgtcgccaggctggagtgcaatggcgcgatctcagctcactgcaacctctgactccctggttcaaacaattctcctgcctcagcctcccgagtagctgggactacaggcgcccgccaccacacccagctaattttttgtatttttagtagagatggggttctaccatgttagccaggatggtctcgatctcctgacctcgtgatccgcccaccttggcctcccaaagtgctgggattacatgtgtgagccattgcgcccgccctatttatttatttttgagacagagtcttgctctattgcccaggctggagtgcagtggctcgatctcagctcactgcaacttctgccccctgggttcaagcgattctcctgggtcaacctcccgagtagctgggacttcaggtgcatgccaccatgcccggctgatttttgtatttttagtacagacagggtttcaccatattggtcagcctggtctcaaactcctgacctcaggtgatccacccgcctcagcctcccaaagtgctgggattacaggcgtgagccactgtgccaggccttacatttcttttttcttttttttttttttgagacgagtcttgctctgtcacccaggctggagtgcagtggcgcgatctcagctcactgcaagctccgcctcccgggttcagccattctcctgcctcggcctctccgagtagctgggactacaggcgcccgccaccacacccggctaattttttatatttttagtagagacggggtttcaccgtggtctcgatctcccgacctcgtgatccgcccgcctcggcctcccaaagtgctgggattacaagcgtgagccactgcgcccagcccaggccttacatttcttatctcatttaatccttacaactatcctaggatggtaggatttgcagccccatcttacagggggaaggaaaatggctcagagaggttaattttcttgccaaaagtctcacagcaggtaactgaaagagccataaatcagctggatccagcagctcatgcctgtaatcccagcactttgggagaccaaggtgggaggattgcttgaggccaggaggtggacaccagcctgggtgtagagaaccctgtctctacaaaaaattttaaaaattagccaggcatggtggcagtcacttgtagaccttagctacttgggaggctgaggtggaaggattgcttgagcccaggagtttgaggctgcagtgagctaccattgccccactgcactccagcctgggtgacagattcaaacctaggactgttcccagtgtaaatattcgtgtaaatattgggaaccttctctggattcgtaagacttggttggagaattggctctgccaccccttactgagcgtgtgaagcggtacgagagcccttttttgtgaagtggggtggggtggtaatacccgctgaagagtggttggcagaagtaagatcatgtgtataatgttccctgaacatagcagatggtcagcacatgtagccagcgatccccacaggccaaagagccaccccttgctgaaattaaaggcctatttggatggctggacgcggtggctcacgcccgtaataccagcactttgggaggccgaggcgggtggatcacgtggtcaggagatcgagaccatcctggctaacatggtgaaacccccatctctactaaaaatacaaaaataaaattagccgggcgtggtggtgggcgcctgtagtcccagctactcgggaggctgaggcagaatggcgtgaacttgggaggcggagcttgcagtgagccgagatcgtgccactgcactccagcctgggtgacagagcaagactccgtctcaaaaaaaaaaaaaaaaaaaaaaaaaaagaaaggcctatttggttggattaggggggtcaggggagtaccagagaaaggggcccagagagaggagtgccctgaggattggagttctcagggggacctgctcgatgtaaccccacaaatgaaaatctggatttttctgagtcttacatgtaagctagtctggaagggaccatttggtgaacagaattactcatcttactggcctgtctctcccactgcccaggacattccaggggcaggtgaaggcaggttcctccaaagcttagggagtccttggctgagaaagcaggagctctaagtcctgggctccagtgttcgcggtctgcctctgcttgtccaagatgctgattatcacagaacagagtcatggggaagggggcggagccagaagcagcagagctggaaagccaggccatcattaggattcagggatgcatggctctcatccatcactgcaactcaaagttctgccatgggagtcactgcatgagtctctcttcccctctcctatttctcttttttattgtatttatttatatgtatgtatgtattttatttatttatttatttatttattttttgagacagagtctcactctgttgcccaggctgcagtacagtggtgcaatgttggctcattggagcttccacctcccgggttcaagcaatccttgtgcctcagcctcccgagtagctgagattacaggcacctgccccaccacgcccagctaattttttgtatttttagtagagatggggtttcaccacgtcggccaggctggtctcgaactgacctcaagtgatccgccgaccttggcctccaaaagtgctgggattacaggcgtgaaccaccgagtccggcctatggatatatatttttagagacgagatctcactttgttacccaggctggtctcaaactcctggactcacgcagtcttcccacgtcagcctctcagagtgctgggattacaggagtgagccaccacggctggcctatttctttaatttaatttaatttaatttatttatttagagacagagtctcaccctgtcgcccaggctggggtgcagtggcatggtctcagttcactgcaacctccgcctcccgggttcaagccattctcctgcctcagccttctgagtagctgggattacaagcacgtgccaccaagcctggctaatttttgtattttgagtagagacggggtttcaccatgttggaaaggctggtcttgaactcctgaccttgtgatcctcccacctcaagctcccaaagtgctgggattactgtgtgagccaccgcgcccggcccgcctttctcttttacaaagggactccaccacctgccttcagcccagagtcagtgttagtgaaacattcaccagatcttcctcctctgccacttggaggagcctggagccctggactgtggtgaagttgaagtggagttgaactaagggagaataatattcagaacagccatgtagcccttgggctgagatacttgcagggtgtcagaactggaagagactctagggctcactcactccacatctccctcattttacccctgagaaacttgagagcccacagagggaaagggctcacccaggtcacactgctagggcgggaggagcaggctagaacccaggttctctgtctctctactgactttgccactccatttgttttcctgtttgagaagtagaagaggctaaagttatatgggcctgggcacagtggttcacacctgtcatcctggcactctgggaggccaaggcggatggatctcctgaggttaggagttcaagaccagcctggccaacatggtgaaaccctgtctctactaaaaatacaaaaattagccgggcatggtggcagctgcctgtaatcccagctactcaggaggctgaggaaggagaattgcttgaacccaggaggtggaggttgcagtgagccaagatcgtgccactgcactccagtctgtgcaacagagcaagactccatctcaaaaaaaagaaaaaaagttacatgggaacaggagaaggaagccattgccctctgggcctctggttctccatgtgttaaatgagagtaatgatgctttcctgccaactcccctgcttcttcatgaagcctgaatgaaggaatagtgtggaggtgacagcagtggcagaatcatcttcctggtggcaacaggacctagagcggaggagacagtgaaagagctgagggtggggcagcgcagatgggctcagaagaggtgggttcaccttgtcgtcctccctaggtggggcccaggcctgggttgccatggataccgtgtccctggagcatcagatccagagcgtgcaacgccacatcagcttcctgaaaaaggagcagatggccctgctgcgagacctgcacctggagatcctgaggctgcagaaacgctgctcaggtgaggccaggagaggcggctggacgggtggggagaggtcactgtcatcatcacaaccactgtctctgggttgtgcccaccaacagcccccgtgagcctcacactgcaccgattctgctgcctctttttctgattaaggaaactgggacttggggaggtgagatggacagagaagttggaaaagttctagaaacatctgaaagtttcacagcaaagagctctggttagggctgggcgcggtggctcacacctgtaatcccagcactttgggaggccgaggcgggcggatcacgaggtcaggagatcaagaccatcctggacaacatggtgaaaccccatctctactaaaatacaaaaaattagctggttatggtggtgggcgcttgtagtcccagctacttgggaggctgaggcagaggaatcgcttgaacccaggaggtggaggttgcagtgagctgagatcacgccactgcactccagcctagatgacagagcaagactctgtctcaaaaaaaaaaaagctctggttagggagtggaggactcctaggatccaaatcctggaggttcccatcctttccgagtcactcttcaccaagcaactcccagccctcggtctagctagggagacacacaggccaactggtggtattaaggtagagcagaaatcaagcaggacctcatgggcaggagcatgtccagcttgaggagcaggtgctgaaggaggaggcccagcctccgaggctccccagaggagggggtgcttcaactccctggaggctgcgtaacatgtggacatgccaagatatcacaggagaaaggggagtgaagagagtattccagatgaagggaacagcacggcaaaggtcgaaaggtgggaagccaaaagctcatggaaggttctagttgatggataaagcatcacttaaaggagacagataagaaatccagctggaggccaggcacggtggctcacacctgtaatcccagcactttgggaggccgaggtgggtggatcacctgaggtcaggagttcaagaccagcctggccaacgtggcgaaaccccgtctctactaaaaatacaaaaaattagccaggcgtggtggtgcacgcctgtaatcccagctactcggaaggctgaggcaggagaatcgcttgaacctgggaggcagaggttgtggtgagccaagatggttgccattgtactccatcctgggcaacaagagtgaaactctgtctcaaaaaaaaaaaaaaaaaaaaaaaaaaaaaaagccagtggtcctgattcagccatcacagcttcctaaggctccacagacagggtcagccgccacattctaatctcccctgaagattggacgggagcagaggccagcctgggggacaagaatggcccaagtatctcagccctgcctgatgccaccttttcattgcaataacaaaattatgagaagaggagctgggcacggtggctcacgcctgtaatcccagcactttgggaggctgaggcgggcggatcacctgaggtcgggagttcgagaccagcctgaccaacatggagaaaccccgtctctactaaaaatacaaaattagccggacgtggtggcacatgcctgtaatcccagctattagggaggctgaggcaggagaatcgcttgaacctgggaggcggaggttgcggtgagccgagatcatgccattgcactccagcctgggcaacaagagtgaaactccgtctcaaaaaaaaaaaaaaaagagaagaggaaaccctaagacaccatagcagctcctgtcatttctttctgttttgccctaattctgagaacttgtggctctttttaggacacgggccagatcccaaaatgtggagcaggcaggaacagagcgccctcacccacgccatgcttctcagatgggtatgggcctgaaaccccttggtttttttttttactagttatttatttatttatttatttatttatttttatttatttatttattttgagacagggtcttgctctgtcgcccaggctggagtgcagtggcgtgatctcggctcactgcaagctccgcctcccaggttcacaccattctcctgcctcagcctcccgagtagctgggactacaggcgcctgccaacacgcccggctaattttttgtattttcagtagagacggggtttcaccgtgttagccaggatggtctcgatctcctgacctcgtgatccgcccacctcggcctcccaaagtgctgagattacaggcgtgagccaccgtgcctggccttttttttaatttttacaacagagtcttgctctgttgccctggctggagtacagtggcacgatctcagctcactgaaacctctgcctcccgggttcaagcaattctcctgcctcagcctccgaagtagctgggattacaggtgcccgccaccatgcctggctaatttttgtatttttagtagagatggggtttcaccacgttggccaggctggtctcaaactcctgacctcagatgatctgcccaccgtggcctcccaaagtgctggctttacaggcatgagctaccacgcccagccacctctaggttattaaggagatgaaaataactaggctaggctagagcagccactcttggggctgaaatgactgaataaggcctttcccccaaggaggaggtgatgagaagggagaagataaggggaaggagattaaagagggacccagagctgggaggcggttgggagagaggagaggctggtgtaggagctgaagggataggctgcccagggagctggctaaggatgggtgaggactcagaatgaagggcttgagaggtgggtacgttctggggtggcgaagcagcctgattgataagaactgctcacacgcgttcagcaccaactcagccctgggccaagcccgctgtttttttctcatttaatcctggcgacagcctcttggaaaggtgctattgtgcccccattttccagacgagaaaactgaggctcagagaagtgctgttactggcccaaggtcacacagcgtatctgacctcacagcacgctcatctatagcccagctgagatttttatctccctacccccaagtcctgtgttgaaaggctgaagagaaaccacccacagggagttaatggcggagccaaggtatccctgctcccaaatccctgaacctaggccaaggtccctgggctacatcacaaggccttgaaggaggggccagttggtcccaggaagccctggaggtagaagcatcagagtcctcacaggtgcctcagggaacaggttcagactctggtaacagcagaaggctcaggcaccctgagctgcctgcctccaagcaacaaccggcctcctcagagaaggcacctctggcaaagccctgggtctctggaagagccggtgagggcagtgaggaggaggggcagaggggtcacaaggcccctgaaggcgctgctgggtggtggtcccagagatgtgccgccttccttccccaacccccggttcacacctcctccccgtggacaccagactgtgtccctgcaggtgtacacaggtgcccccgagtcggtctgcatcacaggcagctgtggcttctggcttccttctgcccttgtaccagttcttgagccctggtggagttgggggagtgggggtggggctggaaaaattatcaaactcacctgggctgagaaatggggcttgggggacactaaggaatggagactggggggacaggcaggcagaggggtggcagctgggctgcagcacccaggaggaaactgctcctgcaccagtgcccttgagtggctcctaggctgcccgctccaccccctcagtgccaagcccggcccccatcaatagaccgcaccgtcctgctcgaagcccttctccctgccgtggggaatacggcgcaactggggcttgggaaggggcagcgctgatgttcaggtaataacacaggctcagcggtactggctgtcaaaatagtgaaaagcaagtgtccagactggtaagtagccactgccgagcctgcctccagtgccgccaggcagttctggacactccagcggccatcagctaaacacgaaagggtcaaagccctgcacggcaagggtcctccagaactgctttgactggctggcatatcaccccaggaaaggcagatagtcccccagccccaaaacaagccaggctcctcagtcccacgaggggtgaactaaactccgaacccaggctcaaagctggagctgggaagatttctgagcttggagtcaagctggccaggttcaggctgtgccctggacacatctcttcatctctttcccttgcagggttgcggtaaaatagtgtggaggtggcttctaaagatccttattgccactttactgagctgtaattccatgatctctctctctctctctctctctcacacacacacacacacacacacacacacacacacacacacaaactgccttttcttttctttccccccagaactgacccatgacctggaaatgagagaggcccaatctcaccagcaaggtaagagaaggaccactggtggggaagcgtcatggggcccaacagctggagtttttcccagccctttgcaggacccaaaccttctctgtccccagcctagacttggggatagtcactccttggctggtgagcagagtgcaggatgtcagccacacttgcccagtggacgacattgtgaaatgccttgtgcagtgaacaacctgcaccacctcagttgggtgaccttgtgcagtgaacaacctgcaccacctcagttggatgaccttgtgcagtgaacaacctgcaccaccacacatagtagcctgtatccatgtctctgtccaaagtgaggaaagtaaggcatgaaggaaatggtaatgtggctttacttccccttagcctgcttaattccttgctgtgacccacctccccagtccttcccatcctggcacaagtgatcacatggtcagtgtcaagattcactgaactgagtgatcacaggccgagtgtcaagatgcatgtcaggatgggttccttgacttcaaggaacttgttctatacgagaaaagaaacacacacacattagtaaatcctgcattttacaaaagcatgacttcttgccattgtagaaattcctctaaaatatttgtttacttcacccataacatgggggagctgggggagttcaatgggtgtagacttttacttttgcaagattaaaaagttctaaagatctgctgcaccccaacatgaatatacttaacagtaatgaatggtactcctacaaatggttaagatgctaaattttgtcattttttcccccacaattaattttttaattgcattcttgagatctttatcatcagattataagatctcagaactaggactgagtgttacccattgtctctgaagtataacgcacgttacctgacttggagggacacagtaattttttttttttttttttttgagacggagtctcgctcttgtcgcccaggctggagtgcagtggcacgatctcggctcactgcaacctccacctcccgtgttcaagtgattctcctgctgcagcctcccaagtagctgagacaacaggcgcacaccaccatccaccggctaattttttgtatttcttagtagagacagggtttcaccatgttggccaggctggtctcaaactcttgacctcaggtgatccacccgcctcagccttgcaaagtgctggaagtacaggtgtgagccaccgagtctggccaggacatagtaactatttaattaaaaatgaatcacaaggccaggtgtggtggctcacgcctgtaatcccaagactttaggaaaccaaggcaggagaatcacttgagcccaggagttcaagaccagcctggacaaaatagtaagactctgtccctaccatttttttttaatattaaaaaaatgttaaaaggaatcataaaaagtctttcttggccagaagagttcttaagaacagactctcttccatactgatgtattgcttatagatcaaatgctacaggctggaagtttaagctatgatgttaggaaccctagaaactgctttgtgtattcatgcatgaagatcagttacagaccatctaaacacttacgaacttggactaatcctgccctctttagaggacaaccacaggcaacctcttggtgcctaggtggctggaggaaggcagcacatgccccagacactagattaggacagttctgtgacacagccactttcaccccacttactgtcctttgtctgaaagggcttttgagatcacctgggcccaagccactgccccaatccaatgtcttcatctttttgttttttttgttttttttttttgagacggagtctcgctctgtcgcccagggtggagtgcagtggtgcggtctcggcccactgcaagctctgcctcccgggttcacgccattctgcctcagtctcccgtgtagctgggactacaggcgcccgccaccacgcccggctcattttttgtatttttagtagagacgggtttcaccgtgttagccaggatggtctagatctcctgacctcgtgatccacccacctcggcctcccaaagtgctgggattacaggcatgagccaccgcgtctggcctttttttttttttgagacatactctgtcacccaggctggagtgccatggcaccatctctgctcactgcaacctctgcctcctaggtgggttcaagagatccttccacctcaacctcgagattagctggtactacagatacatgccaccatgcccagcttttttgtagagaggggtttcgccatgtcacccaggctggttttgaactcctgagcttaagcaatttgcccccctcagcctcccaaagtgctgggattacaggcacgaccactgtgcctggctctttcaatgggctttgagaactctttctttttttagagacaggatcttgctctgttgtccaggctgtagtgtgcagtagcagaatcatagctcactgcagctttgtactcctgggctcaagagatcctcccacctcagccctcccctgagtcactgggatgagtgtgtcaacccactgggcttaagaactttctttgtcctctttcgttttttttttttttgagacggagtctcactctggcgcccaggctggagtgcagtggcgcgatctcagctcactgcaacctccgcctcccagggtcaagcaattctcctacttcagcctcccaagtagctgggattacaggcgcacaccaccatacccagctaatttttgtatttttagtagagacggggtttcgccatgctggccaggctggtctcgaactcctgaccttgtgatccgcccaccttggcctcccaaagtgctgggattacaggcgtgagccactgcacccagccctctttgtcctcttatcacttggtgattttcatccttccagggtcactctttgccactttcggctgcctacgtccctacactcacctgtgccaagtcctaggatatggtcctgccgagatggagcttccaggaggcaggggtcctcaactcacgctgcacgtgagaaccaccggggaagatttaagcaacaccagttcccaggtccagctccagggatgctggtgcaattggtctttcatagcgcccaggaaacagcactggttaaagctctctgggtggttctaatgtctatccagggttgaaacctgctgcagtggcaaaggccaacaataaacaagtaaacaaaaaatgacaaacatgtggccaggcacggtgactcccacctataatcccagcactttatgaggctgaggcaggaggattgcctgaacccacaagttcgagaccagcccaggcaacatggcaaaacctcatctctacaaaaaatgtgcatgcctgtggtcccaactcctgggaaggctgaggtgggagaattactcaagcccaggtgatagaggctgcagtgagctatgccgctgcactccagcctggcaagagggagactttgtctcaaaaaaaaaaaaaaaaaagggctgggcgtggtggctcacgcctgtaatcgcagcactctgggagtccgaggcgggtggatcacaaggtcaggagtttgagaccagccaggccaatatggtgaaacctcatctgtaaaaatacaaaaataaattagctgcgtgtggtagcgggtgcctgtaatcccagctactccggaggctgaggcaggagaatcgcttgaacccaggaggcagaggttgcagtgaaccgagatcatgccactgcactccagcctgggtgacagagtgagactctgcctcaacaacaacaaaagaggccaggtgcagtggctcacgcctgtaatcccagcactttgggaggctgaggcgggaggatgacctgaggtcaggagttcaagaccattctggccaacatggtgaaaccccgtctctactaaaaatacaaaaattagccgggcgcggtggctcatgcctgtaatcccagcactttgggaggctgaggcaggcggatcacgaggtcaggagatcgaaaccatcctggctaacatggtgaaaccctgtctctactaaaaatacaaaaaaaaaaataagccaggcatggtggcgggcgcctgtagtcccagctactcaggaggctgaggcaggagaatggcttgaacccgggaggtggagcttgcagtgagccaagattgcgccactgcactccaacctgggcgagagagcaagactccatctcaaaaaaaaatatatatatatatacaaaaattagctgggtgtggtggtgtgcacctgtaatcccagctacttgggaggctgaggcacgagaactgcttgaacccgtaaggctaaggttgcagtgagccgagattgcaccacttgcactccagcctggcgacagagcaagactctatctcaaaaaaaaaaaaaaaaaaaaaaaaagacgtgataaaatgccctatggaggaaacaaggacactgactcccttcctgtgcacactggcagctctttcagtcccttgctctctggacttttacacaagctgttccctccgtctgcagcatccttctctcctgtcttcactacttaactcctgtttatccttcagatcttagctcaagtctcttctgctgggaagacttccctgataaggtcacattctccagttacagtcacagcattgactttccacatgtcacatttgcaacctcacacgtatttgtgattatttactatgtctctcccactatgcaataagctttacagagaccgttttattatgcgccctatctccaatacctaacacaatgcacaaagtcagggctccacaaattctctgtggaatgaataaagggccaggaaggggtttgcacttaagctgaaacctgaagaattagagaccaagcagagggtagagtaggtacgagggcggaacaaggaaggccactgagccgacgcgtggggaaggagggggagcgcggtaggacgtgcaggtggggacgtggggaggagtggggctttgttttgtttttttgtttttgctttttgagacggaatctcgttgtgtcacctaggctggagagcagtggcgcgatctcggctcactgcaacctccgcctccccggttcaagctagtcccctgtctcagcctcccgagtagctgggattacaggcgcccaccaccaccaccaccacgcccggctaatttttgtatttttagtagagactgggtttcaccatgttggccaggctggtctcgaactcctgacctcaagtccatctgcccatctcggcctcccaaagtgctgggattgcagaaatgaggccccgcgcccggcctgggggttttgttacacggagctctgagccgtgcaggttctgttccaagccagggggagaccgtcacctctggcctctgccccgttccagaggcggcgtcccgggagctggagagcaagtgccgcgcgctggagtcgcagctggaggcgcgtgctgcggccaacgcggagctgcggcgggaggtggcgcagcgcgaggcgctggtgtccgcgctgcgctgcagcctgcgcaccgaggagcgccgcttcctggaggagctgcgccgccgcagccaccgcgccaccgtgctgggcaccgagctgcagaagcacaccgaggcggccgcctacctctcctgccagctgcacgcggcgcgccagagactgcaggccccgcgcccgggccccggcgccaccgccgagcccaggccacgccgccgcgcactgcgagcccgccgcccgcctgctgcccacgaggccgccgccaagggccccggccgggactgggccgcctgggaccgcggggccggcgccctcgacgacgccgaccccatgcccgaccccgcgctcttcctctatgcacgcaggccgctgcggcccagcgcccgcagcccgcgccagccgcctccccaggagcccccggaccgagccggcccgcagcccgcgcccagccagcccagcgcgcccggggacccggagtaggcgccaggctggccggggtgacgcgggacggacggggagggccggccagggacgcagctcggtccccgcaggcaggtcccgggtcggagggcagccgcccctcctccaggaagcggggcgaggcggccccggctccccccaaatccccgaaccgccagccttttgtacttcccgacgtttccaaagcttcgagccctctcctcgcgcgagagttcctccgcggggccgagcgggggcaccttctctaccgagaggactcgccgtcccgatcctggcctggtcccacctgcctgtgagacaggaggggcgggggccacgcccttccccgggaaagccgacaatccttggtggggtggggagggctgggctcgcctacggaaagggacgcagagtggcattggcgccccaggccctctagctccccaccccccgcctcccccacccccgcgccgacgcccttcccgccaagccttcttcctccccaggagaggcccaggctaggggctggtccttctacccccaccctgaccctgccgataggtccttgcaggtgagcacggaacactttagaagacacgtcctcccagagcccctggtgggaaaagtgcgcctgatggaagcctaacttccatgggccctgggagaggattacagaaccgcctggttggccggacttggtctagagccgtctccagctcagctcttcccgagtcgccaccccgctgggtatgcagggactgggagctctgctggggaagggaggtgacaggcctgctgctggccaggcttctggaaggcaggagctgtcttccgcctcaggaggcagccccaggcgttttcctggtcctgtttattggtgctaatgttgctcggcttcctaatcagctggctgcacccagagacaagaagaagagagccttggctgggcgcggtggctcactcctgtaatcccagcactttgggaggccgaggtgggcggatcacctgaggtcaggagttcgagaccagcctggccaacgtggtgaaaccccgtctctactaaaaaatacaaaaattagccgggcgtggtggtgcgcgcctgtaatcccagctactccggaggctgaggcaggagaatcgcttgaacctgggaggcagaggttgcagtgagccaagatcgcgccactgcactccagcctgggcaacaagagcaaaactccgtctcaaaaacgaaaaaaagaagaagggcctggcttcttggaagtggcagctactgataggagtttgggtttgggtttgctggggggatggtgggagcacaggttagtccccatcctggccccctccacggatgcccctaaacctatcagaatctggcagtggcgggctgctcagttccctgctgtctagcctggggaatggcgacgtggaaaggggaaagccccacctcctaacgccccttctcccaagctccccgtccaccaccaaaggcaggaaggacagtttcagcgcagcttattcccccacccccagcccagcctagaaggaaacacaaacccctccagcccgtgccatccctcctgtgtgggtcctgcatcaagtcctaagtgcctgtgaggtcttccaggggcttcgaggggaggacgtggggcagggagaggcctttgcctccctcacagacacccctttcctgacaggtcctgaccctggctgaggccacacattctgtcacgcaggggtctgggaggtgagcagagtcaagctctaggggtgacgagctcttctcccatcacagccccatgaagaagggggagtcccagatcacaccccctttctctccatttgttggagcaggaaattggcaagaagtagaaaccagtgagcgagcgcactcagggccaagcaatgtgcggctctcccagctgacgccactcgggactgcccaagaccactgagcaataaccacgcctggtctggggtgtccagctcctgggatgcagatggctgaggttggggcacccttgggacagtgctctccagtccaacttgggccaagaaggtggcctggggtccttgctctgcctgcccccacctctactctctactagtcctgtggttgcgcctgtaccatctctgtcccccctcaagtgtgtgtaactcactgcacccctattctgtccccctccctttcagaacctgtcttgtgtgtgagggcctcactcctctctcggaggtgcccagaggactgtgggaagaagggcaaagtctctttccagaggagcgtgcacagaccctcatctcccacgaccacacttttggggtgaacagggtgactttgttaggtcgattcttctgcagagatggtgaagtactctatctgcccacccacccactaaaagccatagctccgtccgcctggcctccccccagctctatagcaatagcccccttcccccttccctcctgggcatccagggtgtccagctaggggcccccaccgcactctggtcccagggatcttccagtggcctgcctgcttctcccgaagtgaccccatcagctccacccaactcccatccctcttccagcaaccacagataatgacaattgtttgtgaggtgcttggagatcccctagatgaaaggttctgggtgctggggcagctgactcactgactctcagctgaggtgctggaggtgcctgggaaaggaaataaggcaagctgggggagcacctgtagcagatacagggttccagttttcacagaaattcccctcctcgccctcctggaaataatggaaacccctccacccgcctgcacagaaccctctgtgcagcagaacgagactgggagctggagtgcatggcccgctcttggccacaggggcccaactctcctcagcctcagggccctggagaggccccaccctccctgggtctggcttgagagcccacctggccaaagggaaacctcgcacccccacgcgctcctggcccctggaatatcttggtgactaagaagggaaaggactgcatttctctctcctctgctgcacgaatccccattgggagagagagtgttgaagaggacactcaggtccctaggcggagctcctgccacaccccaagtatggacagctccaggacacagagctgcaggtggggacctccccctgctctggaaatcagccagggagcactgggcagtgcggtttgaggctctgtacccctggcccccacagctcagccacagcaccctctagcttgggggactagtccagggccaaaatgggataacccttccccatataagcagtaggatggcgtcccccctggtggagagaggaaggaggcctagagggtgtggggcagcttcgaagcgcggggagccgggggtctccaagcaccttctcctggacatgccagccttgaatgggggatgtgcagggcttcaaacccacctggcaggagccctgtggcagggcagagggaccctgctccaaattctctgttggctgcgcttttgtatccaatgcttttcagagtgtattcactcacccacagaaatagagccctgtgctttaggggtgactgtcatatgccttattcttaataaaatctctgaaaaacacgtgagtccaatctcttgcattgggcactcggccccaccacacctcggttcttgcaggtgtgggaagagcatgtggatgagccaggaggtggttcagggtcagccagggggtacgatgagaccaggagctgagactctggggtcccctcagtagataacccctcagatgggccgggcgtggtggctcacgcctgccattccagcactttgggaggccgaggtgggcaggtcacttgaggtcaggagttcaaggccagcctagccaacatagtgaaaccccatctctatctaaaaatacaaaaattagccaggcgtggtggcgcgtgcctgtaatcccagctactcaggaggctgaggcaggagaatcccttgaacccaggaggcagaggatccagtgagctgagatcgcaccagtgtattccagcctgggtgacagagtgagactatctcaaaaaaaaaaaaaaaaagctgttcctcagatcaagtataaggcacccatctgaggtgtcctcaccctcagccaagccctgcccctctctccatgccaccccaatccaaatgaagaaacagaatcttagatcacaggctcctgactagagtggagaggagaagattggaagggtccagtgcctggaattgcccactgtcctttcccagaaggaatcctgggttctggcatctttggccatgctggtgccctgccccccacctgatccagctgcaagaagccccgcatcccggcaggagccctattcttatcctccactaaagagggttatcctgggactgcagctttaggagctcagcgcagccagcaccatgagaactcaagctggtacattttcaatgcaggtctatgttggggatgactcagagaaaaaggcagcagctctgtgttctaaggacacgggggaccaaaaccaaaaccaaaaaaagtggctttgcttgcaaccctcctgaaggaaggacgcatctcttccttcctcctaaaggaaggacccaggtggaaggacccatctcttccttctggggaactgctctgcacccatctcagtccatgtgtggggagggcggactccacccatgtggcccaggcgtggcaggtcacagtgatcgggcggaagaagacatgcaactccatctgagccaacaagagtcaatcttgggccttttgctggagacattcattcagcacctcatgttaggtgccgtttggttcagcagtgaacaaagcatgactatggagaaggacaaactcttgggtggctaaaatggcacccaagaaatctggcaggtcatttgccactacaaggggtaaagctgcctgagtataaagctaccacaagagaaacagaatggctgggcgcggtggctcacgtctgtaatcccagcactttgggaggccgaggcgggcggatcacgaagtccggagttcgagaccagcctacccaacgtggtaaaaccccatctttacaaaaagcacacaaaaaaaagccgggcattgtggtgggcacctgtaatcccagctactcgggaggctgaggcaggagaatcctttgaacctgggaggcagaggttgcagtgagccgagatcatgccattgcactccagcctgggcgacagggcgagactccgttccaaaaaaaaaaaaaaagagagagaaacagaacaaagagatatggagacaattccagataatcaagtcacttggatccagccatgcccgaagctcacagactcctacccttttctgttacatggatcaataaatcccctccccctcccaaacttaggtgtggaatttttttttgtttctgttggttttgtttttgagatggagtttcactcttgttgcccaggctagagtgcaatggcacgatctcaactcactgcaacctctgcctgccgggttcaagggattctcctgcctcagcctcctgagtagctgggattacaggcatgcaccaccacgcccggctaattttgtatttttagtagagatggggtttcactatgttgatcagactggtcttgaactcccgacttcaggtgacccgcccccttggtttccaaaagtgctgggatatgagtcaccactcccggctgtttgttttttttagagacaaggtctcactgtgttgctcaggctggacttgaactctggtgctcaaggggatccttccacctcagccttctgagcagctgaagagtacaggcctagctaacaacacacacacacatgtatatgtatactcaaaatatatatatattgacacagtcttgttctattgcccaggctgaaatgcagtggccacgtggaaaataacacacctggccagttttttcctactttttattttgaactcagtttcttgcttaagcctctagactcaggtttgggcccaggatgggctgggaccaggacctgcagcaagcccaggcagcctggcccaggcctcttcttgttcttagccttttatctcctggggcaattagggaaccgaaggcccagccttggataaacatctgcccaagactcttgagtctcatgtacaatttcagaaaacgagaaaagaaagggagtggggcgcagtggctcatgcctgtaatcccagcactctggggggccaaggcaggcggatcacttgaggccaggagtttgagactagcctggccaacatggtaaaaccccatctctactaaaactacaaaaattagctcggcatggtggcacaaccctgtaattccagctactctggaggctgaggcaggacaatcgcttgaatctgggaggcagaggctgcagtgagccggggtcatgccactgcactccagcctgggcaagagagtgagactctgtcccaaaaaagaaaagaaaaagaaagagaagtgtggggagggcagggcacaggcattagagttccccagacagacagacccctggggatgcttgactaagcccatcccagagtcacagttcagggtggagatatggaatgtcaaaaccagataactgttttgtttgtttgtttgagatggagtctcgctctgtcacccaagctggagtgcagtggcaccatctcggctcactgcaagctctgcctcctgggttcacgccattcttctgcctcagcctcccaagtagctgggactacaggcacctgccaccacacccggctaattttttgtatttttagtagagaaggggtttcaccgtgttagccaggatagtctcgatctcctgacttcatgatccgcccgcctcagcctcccacagtgctgggattacaggcgtgagccaccgcccggctgtttttttttgagagggagtctcactgtcacccaggctggagtgcagcagcgcaatctcggctcactgcaacctcctccttccgggctccagtgatcctcccacctcagcctcccgagtagctgggattgtaggtgtacaccacccatgcccagcagatttttttttttttttttttttgtattttagtagagccaggatttcaccatgttggccaggctggtctcgaacctctgacctcaagtgatctgcccacctgggtctccccaagtgctgggattacaggcgagagccactgcgcccagcctcagataactcttaaagatcatctgtgcaaccccttcattttacacatggggaaactgaagctcagggcatcttgctggcggttaccccttccttcctggcagttctgcccatgcagttttggggttgagggaggtggagaacttcctttctaggggttcccagagattggccagggaagtaggggactctgtgccgcagtcgaagggatttgggttcccacatcacctctccagccccctagggaactgtgcaaaggagggggaagtaggaatgtaggaatggcctgctgagtgggtgtatccatgataacagtaattagggaggtgggaggctttgagcgggctaattatgcaggctgggtctcagactagataaccctcctccttatctttatgcagggacccaaaagataggaaaactgcagtgctcaggagtgccatgaggtagccctaaggacgcctgctgtgcaacaggaccctgcgagggaaaggggaagggatccaccaaagataaactgcagattattttatttgtttgtttttgttttttgaggcggagtcttgctctgtcacctaggctagagtgcagtggcatgatcttggctcactgcaacctccgcctcctgggttcaagtgattctcctccctcagctcccaagtagctgggattacaggcacccgccacctcaccaggttaatttttgtagttttagtagagacagggttttgccatgttgtccaggctggtcttgaactcctgacctcaggtgatccacctgccttggcccccaaagtgctggtattacaggcgtgagccactgcgcccggccttaaactgcagattctaaagctgctgggactggttcgtcactaggcccatggacaaactggtcaccgatccccatgctgaccggtaggcacttacggacgctcactgaccctgaggaggatagggagaggtgcctccgcttggcatcctccgtgggctcaggctggtgggtctcagtcaggcattatggaaatgatctgaagttctagacacaaaggtcaaagcatacagtacacaaaaggagtgtctgaaaggaaagccaactgttataaataatgggggactcagccaggcacagtggctcacgcctgtaatcccagcactttgggaggccaaggcggcagaccacctgaggtcgggtgttcgagaccagcctgaccgacatagagaaaccatctctactaaacccatctctactaaaaccctactaaactctactaaaaccctactaaaacccatctctactaaaaatacaaaatttgccaggcctggtggcgcatgcctgtaatcccagctactggggaggctgaggcaggagaattgcttgaacctgggaggcagaggttgtggtcagccaagattgagccattgcactccagcctgggcaacaagagcaaaactccgtctcaaaaaataaataaataaataaataatggggggctcaaaggtgaaaccccaggctgccagcaatgctgcccccccacatcctgtggagccctcagggcctggcaccttctacactgaaatcattcactcagtcaacaaatgtgcattaagtggggtatggtcgtgtgcacctgtaatcccagctactcagggaactgagacgggagggtcacttgagcccataagttggaggcttccgtgagccgtgatcatgccactgcactccagcctgggcaacagaatgagaccctgtctctaaaaataaaattaaaaataaataaatgtgcattaaacacctaccatgcattgggctctggaaagatgctgggaacacccagataaataagttatggttcttgccttcaagaagtccccaggtcggccaggcgcggtggctcatgcctgtaatcccagcactttgggaggccaaggcgggcggatcacgaggtcagaagttcgaggccagcctgaccaacatggtgaaaccccatctctactaaaaatacaaaaatgagccgggcatggtgacgcatgcctgtaatcccaactacttgggaggctgaggcagggaatcacttgaatccgggaggtagaggttgcaatgagctgagatcacgtcactgcactccagcctgggcgacagagcaagactccatatcaaaaaaaaataaaaaataacaaagtccccgggtctagcagctggactcctcacccaagacccagacatcccagtatggccaagagggtctcaatttatgcctattgcccctgtgtcattattaataggttccacttgcactctcaaaagtgttctggttttaatgataaactatgcgatcaccttaaccatagcacattgttataggcaatggtggaaatagctggggaaaatgggagtatgtgctgttaagactatgatggaggccgggtgcggtggctcacgcctgtaatcccagcactatgggaggccaaggtgggcaggtcacctgaggtcaggagttcaagaccagcctggccaacatggtgaaaccccctctctactaaaaatacaaaaattagtcgggcatggtggcgggcgcctgtagtcccagctacaagggaggctgaggcaggagaatcgcttgaacccgggaggcggggttgcaatgagctgagatcttgccactgttctccaacgtgagctacacagcgagatgctgtcccaaaaaaagactatgatgaaaagactttggtggaagctgtgtgaaagcaagaatcagtctgcttaatgtgtggtcagaggtcagaccaccagactatggagaatgtgatcagaggatgatttttttttcttttcttttctttctttgctttctttttttttttgagacagggtcttgctctgtcgcccaggctggagtgcagtggcgagatcctgcagcctcaacctcttgggctcaagtgatcctcctacctcagcctcctgagtagcagggactataggcgcacaccaccacacccagctaatttttgtattttttgtagagatgaggttttgccatattgcccaggctggtgtccaactcctgagctcatacaatctgctctcctcggcctctcaaagtgttggcattacaggcgtgagccgccgcactcggctggatgatgctttttatacgtgtctgtttctctaaccccaggcttgctgctcttccccaacccccagggttaaaactgagcttcctattatgagtagcattagcaacatgcacgggcttccaacttcagctgcactgggccactaggcacaattctcaaaaaccctggagtttcatgaatacaaactaagtacccatcagtcaggtgaccggctaaaagaattatggtacaaccaaacaatacaacattatccagcgtaaatggaatgagaacacctactgaaagcgtgtaaaaaaaaaatcagagtgaagaatagcaggtacaattttctgcacatttgtgtaacaaaagaggaacgagtgtgtgtatacacatacgtatatacacacgcacacataagtatgtatgtgtatatatacacacatatatacacacttttatatatattgattataaatatatatattttatatatacacttatatatatacacactatatacacacactatatatatacacactatatatacacactatatatatatacacacactatatatatatatgcacactttttttttctttttttgagacggagtttctctcttgttgcccaagctggagtgcaatggcgcgatctcggctcaccgcaacctccacctcctgggttcaagcgattcttctgcctcagccacccgagtagctgggactacaggcgcacaccaccatgcgcagctaatttttgtatttttagtagagacggggtttcaccatcttggccaggctggtctctaattcctgacctcgtgatccgcccgcctctgcctcccaaagtgctggaattacaggcgtgagccaccgcgcccggctttttttttttttttttttttgagacggtgtctgtgtcacccaggcaggagtgcagtggtgcgatcatagctcactgcagcttggaactcctgggctcaatctgagccgtcctgagtgatactcccagctcagctcccaagtagctgggactacaggcgcgtgccactacacctggctttttttaaacaatattttttgtagagacgggggttttgaaatgttgcccaggttggtctcaaacttccgaatcctgaactcaagtcatccgcctggcttcggcctcccaaagtgctaggattacaggcgtgagccgctgcaccgcccggccgagaagaatcttaccagttctcatcttccttcctcccgtttaaatgctcacatcaagtcgctggctttcctcaccacgtgctctccagaacaaggtcggctttccttcgcaatttgtgcgaggccctacctagggccctcccagcccacctcgggaagctgaagctttccagttctcattagagcttgacaaacgctccgaaggttataggcctcgggtgcttcccaaaggccccctgcggcctggccaggaaagacccaccggcgctctctgcctggagcacttcaactcactgcaagacctggtcccaatgtcccctctgcagcattctctgacctcaccgttccgtccccgccaagcccctgccaagtgaaaaatacgagttaaagcgtcctggctgtggatggagtcagacccggctctaccccttgctctctgtgtgaccttggtctcggcctcctccactgtaaaatgaggacaccagcctggaggtgaggacccatgggtcgaggacgcgggtagggagcccgttctggctcggggcaaagtttggcgggtccattctgactcttgatccccattagccacgtctcgccctcgcctctcgtgcccgtgccctaagcgaccctccactccctcaataatccagccgcacccattcggcgggaaagggcctgccgggtggggagggcgctgagggtcacgcgaacaccgcagatgacagactgcgcggtcatttagcaaatctgcaagagaaaacaggggatccttggagaggggaggattagccatggcagaaccagaccagtctccacccaaggtcacagtgcccgcccgacgggcagcgagcagcagggagtctccccgaggccccgccccgcgagggcgcccagcctccctgggccttgagtcagagtgcgttgcctttaagacgttctggaaagtcaccgcgtccgtgggcggggaaccaggcgcggcgcgttttgtccctcgcgggccgccgtgggctgggccgggcgcgagggtggggcagggaaacggcggcggggtcaaaggccacggcgcgcaccacgtgggccggtgactccgt

SEQ ID NO: 2817 - DNA, 1008 bp, Homo sapiens
atggatggttcatcagaactcacactgctgctggagatactgatatgcaggtccaaggagcacagtccaggaatactgccctctaggaaggacagcaagagacaggaagagggcctcccagcagctgatggcgccgcagccggggcgggcgctgcagatccccgggcgcagctagcgtggggggaagagcgccgcccccacccagcccggcccggacccagggccccgccggccggtgactcccaggtcccgaagggtcagaaggttcctgagtctgacactctacccgtgtttggggacctgagcacagaagccttctccaccaacttccccaaagggaaaagtggggcccaggcctgggttgccatggataccgtgtccctggagcatcagatccagagcgtgcaacgccacatcagcttcctgaaaaaggagcagatggccctgctgcgagacctgcacctggagatcctgaggctgcagaaacgctgctcagaactgacccatgacctggaaatgagagaggcccaatctcaccagcaagaggcggcgtcccgggagctggagagcaagtgccgcgcgctggagtcgcagctggaggcgcgtgctgcggccaacgcggagctgcggcgggaggtggcgcagcgcgaggcgctggtgtccgcgctgcgctgcagcctgcgcaccgaggagcgccgcttcctggaggagctgcgccgccgcagccaccgcgccaccgtcctgaccctggctgaggccacacattctgtcacgcaggggtctgggagaacctgtcttgtgtgtgagggcctcactcctctctcggaggtgcccagaggactgtgggaagaagggcaaagtctctttccagaggagcgtgcacagaccctcatctcccacgaccacacttttggggtgaacaggcaaccacagataatgacaattgtttgtgaggtgcttggagatcccctagatgaaaggttctgggtgctggggcagctgactcac

SEQ ID NO: 2818 - protein, 334 aa, Homo sapiens
MDGSSELTLLLEILICRSKEHSPGILPSRKDSKRQEEGLPAADGAAAGAGAADPRAQLAWGEERRPHPARPGPRAPPAGDSQVPKGQKVPESDTLPVFGDLSTEAFSTNFPKGKSGAQAWVAMDTVSLEHQIQSVQRHFLKKEQMALLRDLHLEILRLQKRCSELTHDLEMREAQSHQQEAASRELESKCRALESQLEARAAANAELRREVAQREALVSALRCSLRTEERRFLEELRRRSHRATVLTLAEATHSVTQGSGRTCLVCEGLTPLSEVPRGLWEEGQSLFPEERAQTLISHDHTFGVNRQPQIMTIVCEVLGDPLDERFWVLGQLTH

SEQ ID NO: 2819 - DNA, 15201 bp, Mus musculus
  misc_feature (1)...(15201): n = A, C, G or T/U
atttcttcatacatcacagacttgaaaagcgaagtctttgaggaattccttaaacacctgtgccacagcgcagaagaattccgggagatcatactgactgacatgcggaggcagatgtttgcagaactcttcctacagtgcgacagtgggaaggtaggtgaaacaccacaaactccctctgctcctcacagtttgatgtgagggaccagccttgacgtggtgcttgttggtgatgttctaaatttcgaaaacatcgagtttgatgatggtggcctactgaccactatttggtaatgaaattggtgactaagggggaaaagaaatacagagcataccgtctacgcctttaaactctaagattaaaacctgacttagcagccactttctcaaactgctagaaagttttttgatcctattctagaaaacttttgtttgtacctgtcttcttattgaattggcccaccctgtgcacaccttgagtgacattgcttttcagcactttcagcttgttgtaggtctatctcttgtgtgtgtgagtgccaccagaggccagagagggcttagtgcttggagctggagtggcaggcatctgggactctatttgggtgctaggatatgaactttggttctcatggttgagcagccagtgaactcaaccagccccttatgctagatcaaaagacctgccacagtagattcaaatgtaaccgaaatacgtttaataagccttctgtttatttgtaccgatgctctgtaagtgtcttttttttttttttttttttttttggctctaaacaattttatctttaaaaagaaaaaaaaaaaaggaaagaaataaaaagacccatccctggagcagggaaggctctcagtgaacctgcccctgcctacagttctccctggcttcagagtcttctgtagcggcctcagctgctcattgggccccctactactcctgggatagcagccagctagcatcctttcccacctcttgaggaagcctgctccccagtactcaggtacgcatcttaacttctgctccacagaaaggaagagccagtggaagtactaggcccgcagacccgctctcaggcactccaagcgagcacacggcaagcccagattcagtgtgtccattgtccagcaaggagacagcacatgcagtgtgccgaaggcgcaccagacccggggactgcatgcccggggactgtgtgcctggggactgcacagagggagcaggccaggctgtcagtgcatgtccacacggtttgtttcacaccactcactgcagactgccacgccacagggcctcagttcaaaaacacatttgccaaacaccctcaagtcccatgccagaggaggcagtgaaggagaggggcatggggttagcctgttgctcctgggccatctgcagtccttggcccaaagtccctgagtccccagaattagttgctgtcattcttgatgacgacctcgagtccgtggtgccgtagctgagcttgcaggggcaggttcttgttcttgagatcttccacctgttgccggagcacatcgttgtccagctgcaactgatctaacccctgcagctcttcagacagccggtggttgctctgccgcagctcctggatataatcacaggctttggacaggattccacctttactctggccagacttggtgctctccatagagcagtctgggatgattttggacagctgtacaatccagttgttgatcttgtcccggtggcggcgctccacttccttatgttgagccctccgtttctcatctcgagttgtcctgggagcctctgacttcggggaataagggtgggtcctgggggcaatcgatcgctggctccctccctgcaatacttcttgtggtgacatcatcacaaagaattgacctgtgctgagcggggttgcctgccccagtagtgcctctgagccctgggtggtaacaacagctgttctactcccagatgtggtaccccctgacccatctcccactgcggtgctggggaaatatgtataatgtgtctcagcagctgctccctcgtgtcaacgacatcgtcactggtgaaagctcccaggatcactgcctgggtcatagactgagtggcagggtaaccactgatggcgccagagtcctctgtctggccatccagctgcccctcagacacctggatcaccctgtacatcacttgacgttggggtcaggaaaagtggcagctgactggatgctggcgatagctacactagttgggtcctctccagtagccactgcgccctcctgaatctgcactgtcccctcttcggtttcagctattttctgctgccccttctttgtatctcccaactcaaagtcctgaatgctaagtccgggccaggccgcttcagtcgccgatttcccccgcagcctactccgtcttttgatctaggtctctccatagacagctctgtacatgtctttttaatgcaataatgtctaagtttaaaacatttccaaacattctcatacccactggtcaccacaccctcctctacactgagagttaaaacagaatgtcatgttactatataaaaagcaacgacaactcaaagctaagtggatgccggctgtaatgtcaataggtccagcctctcagtgtatcccctgaactacaactcctctacgaatcttcccccacaggccccccccatcaagaaaagagcatctttacaaaccttagatatatgctgttggcattgacattacatcttacagactgaaagcaaaatgccaaggacagttttgggtaccttctcacaccaaaagccaactgtggtgtaagaacacaaaaatgcctttttattgacttcatttattttaaaacgttatttcattttatatgcatgcttgtttttgtctgcatgtgtacatgtgcactacatgtgtgcagtgcctgaggaggccagaagagggcactggaatttctccaattggaattacaggaagctgtgagcccccaggtggatgctaggaactgcacccaagtcctctactggaccaacaagtgttctgtgacagtttgaaagagacatttgactctaggcatttcaatacttgattccagttggtggtgctgtttggagaggttgcagccttgctgcaggaaatatgtcgtgggcaggctttgaggtaaaaaagcctctcctcctcccactttgatctctcagattcatgggtggctgaggtgtcacttctcggcttcataaactctcagcataagctacctaacgctaggtatcgtgcctaccacctgcaaccatgttgtccgcaccattatggattctaactctctagaacataagcccatgtaaacccttctagagttgcttcatcctggtattttagcacagcagcagtagaaaatccactaacacatgcttttaacccctgatccatctctccagccttctacttttcattttaaaatgttaatatgtacaacttattcaaggtgtccaaagactgcctcctttggacagatgtaaccactaacaccttgagagactatagtatgaacaggatgcaattttataattaaagcaaatgaaagcagtggtcagaactcaaaagagatatgtcaaatctgggtgtggtggcatgcctttaatcccagcactcaggaggcagaggcacgcaaatctctgagcgcagggccagcctgggctacagagcatgttccaggacagccagggctacactgagaaactctgtgttgaaaaaaaaaacattaaaaaaagagaagccaatcatagtggaatgaatatgcttgcatgtgtgcatgtgcaccccatgtgtgcagtgtctgaggagttgggcaagttgcacaggcagttcctggggtgttctggtcaggagcctggtctactccaagttccagactagttgcagaggactagattgtcctctggcctccacctatatgcatgtatgcctgcagacacaaaagagagataaaaagagacagagagagggagagagtcagagataggtacagattggggtttgaaatgtagccaagcgtttctcctgagggtagccatgaaagagaagctatgtggtacagtgagtgtcttttgtgatgtactcctaataaaggagccaattgcttttctgagggcacgtgtaataatttatgtgtctgtctgtgatggctgtgtggaagtgcgcatgcacactccttggtgaacatgtggaggccagaggagaatgtcctttcaccatgtggatcccaggggttgattgagctcaggttggcagccttggtaccaagtgccttaacgcactgagacattgtgctggccactatagcttgcttgcgtgcttatttatttgtttatttatttatttatttatgtttttcaagacttggttttttttatagctccagatttcctggaactcactatatatagaccaggttgaccttgaactcagaaatccacctgactctgcctccttgagtgctaggattaaaggcatgtaccaatatattcagctttatagaccctttaaagaacatatatgataccaggcatgatcaaaaatttttaaaaaatctatctatctatgtttctttctttctatacaaagtctcattattatggaccaggctgtactggcatttgctgtacagtcatagcaggacttgaacttgtgatcctcccatccccacctcctgtgtgttgagactgcaagtatggatcaccaacaaacccctgagaacaaaagtaattctcaaaattgaattgacatgttgcaatctagtttctcagatccccgctaatttaactcaacaggaataaagtctttgaagtccacaatgcctatttgtctgtcgtacacttctctgaacagtgcctctttgacagagcttgccgggtgattgtggcatcatgattttatttccaggtaaaatgcctagaaggcaactactcttttggccaattgatttaacagcaactctagtgccatggtcaacatgacgggataatatttgaaggaattagtagaggttgtttgtgctccttggtttttttcccatcattaaacagtcatgtggtgatcttggaaggaaggtaaaatctagaatacaaaagtccactgaatttctgagtgaacttttttttcagcagtgactgaaacaagcatttaagaaagcctggatttaaccgggcagtggtggctcacgcctttaatgccagcacttgagaggcagaggcaggcaaatatctgagtttgaggccagcctggtctacagagtgagttccgggacagccagggctacacagagaaactctgtctcagaaaacagaaagaaggaaggaaggaaggaaggaaggaaggaaggaaggaaggaaggaaagagagagagagagagaaagaaaggaaagaaggaagaaagaaaggaagaagaaagaaagaaagaaagaaagaaagaaagaaagaaagaaagaaagaaaagaaagggaggaaggaaggaaggaagaaaaaaaaagaaagtctggattttaagataaaaaaaatactgggttcttgagaaagattagagactcatagaacaaggaagaataaataatagtatcaaaaatagcattaaagcagtttatgtcttagtaggaaactggggccagctggtgggagcttagaggtggtctggacctttaagttaagttagaacttgattctccattccttggctctaatcagaggtggaagctaaaggtaacattataaatatttggacagtccaagtaggcagcaagatggaggcatttaaagacagcagaaggtgggccttccacacttcccatcaccacaacagcaaatgatcaacattcctaaataggcattgcgaaggggttacctgtgcagagaaattctgaaatagctctagaaagacacctagggtcatgtcaggaaccaaagtcacagaaagtaaaaaaccataacaaaacttgcaacgtgatgtccgcacaccacacagtcagcaagcaggacattcccccttcctaatagcaggacaccatataacctccagtaaaaaatggacaaagaactcaaacattcagagtggaagttaatagctattgtgtctttgtaaagccatctagatatatctatttaaataaataaacattacacacacacttcaaacaattgagccattccagacttttttatcccataaaaataacagccttagcaaataaaactctatgtggtaggaggcttcttgtagaactattggcggtagatccggagaggtattgagggaatgcttatctgtacaggaaatgctttaagaatgataaatatattggctgtggtggctgaacaggaagcagggatcactcgcaggcttctagaaagagacagattctcatttcaggtcactgtcggaaaacctagatttcctgcactgaaaaaccctgccccatgttgtccagtgcatccttctagacattccagaagatctgtaggatttccataacatctgaccaaataatctggacctgctctcaaacgaagcttggacgaggggagggnnnnnnnnnnnnnnnnnnnnnnnnnnnnnnnnnnnnnnnnnnnnnnnnnnnnnnnnnnnnnnnnnnnnnnnnnnnnnnnnnnnnnnnnnnnnnnnnnnnnnnnnnnnnnnnnnnnnnnnnnnnnnnnnnnnnnnnnnnnnnnnnnnnnnnnnnnnnnnnnnnnnnnnnnnnnnnnnnnnnnnnnnnnnnnnnnnnnnnnnnnnnnnnnnnnnnnnnnnnnnnnnnnnnnnnnnnnnnnnnnnnnnnnnnnnnnnnnnnnnnnnnnnnnnnnnnnnnnnnnnnnnnnnnnnnnnnnnnacacacacacacacaaacacacacagttttaagcctttatttaaaaaaaacttttaaatggtattttctaagatccttatttaattgaagttattcacattagaaatatagcatgaaataccaagtatcaagtagagcattctgatatatatatgtatatatctccgaggccttgctttgctgacttgagaatagagatcttccaactggtaaacagaagctaaaatccacagggccttatactaggtttgtgttctggtcaaccatgtttcaaagagaacttataaaggttaaaatatttataaaattaataagatatagagaattatttttttttcttatatgagattacaaaatattagacactgtaaaagaaaaactggaaaaggttcagcttggaatgtggcttagttgataaaatgcaggcttaacatgaccgtagcctggggtccccagcaccccagaaaaccaggagtgccggcacaagcttgtaatcccagaagaatcaggaggtcaatatcactttcatttgcatagaggagtaaggccagcctagagtccacacgattctatctgtaaaacagagagaggaaagaaaaattacaaaagaagtagcatgaagcttagcagcagagctgcccggactgacagagggagggagggggagaggatgaggagtggtggcacctgcctttcccaatgcttgggaggctgaggtagatgggtctctgtgagatcgaggccagcctggtctacagagcgagttccaaaaccagagaaaccctcaaaaaaccaacaccaaaaccaagcaaaacaaaacagaaggagaatgtgtggcaacagtagcaaaaatggtgggtagaagacaaggaaacgcagccctacggagttataatatcattctaaggtagacttttataaatcagtgatgtatactgtaagtcctagagcaattacaaaaagaggcataacattagacacatgtatacatatgcacacacacacacacacacacacacacatgtaaacagttagagaaaaggaggnnnnnnnnnnnnnnnnnnnnnnnnnnnnnnnnnnnnnnnnnnnnnnnnnnnnnnnnnnnnnnnnnnnnnnnnnnnnnnnnnnnnnnnnnnnnnnnnnnnnnnnnnnnnnnnnnnnnnnnnnnnnnnnnnnnnnnnnnnnnnnnnnnnnnnnnnnnnnnnnnnnnnnnnnnnnnnnnnnnnnnnnnnnnnnnnnnnnnnnnnnnnnnnnnnnnnnnnnnnnnnnnnnnnnnnnnnnnnnnnnnnnnnnnnnnnnnnnnnnnnnnnnnnnnnnnnnnnnnnnnnnnnnnnnnnnnngccatgaatttgaaagagcaggaaaaggttcatgggaagagttggagggaggaaaagaaagggaggaaatgatgtaattatacaatgttctgaaaaaaatcataaaaaaaaaacaaaaaagaagacgggaaaagaacaaatgagatgaatgaaaaggcaagtaagaagatgatagatttacagtaaccatagcaactacatcaattaaacattttctaacaaaagcatggggctgggggaaactgtttggaagatagaaaaagatgagtgggaggtgggtgggaggccaagagaagataatggggaacaaataagataaaaatatattttattaaagtattaaaatgtcatagcaaaggctatctttttgtataattaatatatgcaagtaaaagggatatgaagaaaaaacacatttataggcctgagcagtccaattaaaaaatatagttagatagaaatgcaagaactaagaaggaaaaaaaagcagaaaagacaaaagagaaaaagcagattagcaaatgaaaaatgctagaactggtatgaagacacgtcttaaaaatgaaaggctgggagaagacataccatagaaatgggttgactctaagacagtcctagagagaccaccaaacagcctatagcctcatcataatggcatcttcatgctatgtaacattcctgctctatggcaattgacagtcgctatggcaggagccacaaaaaaaacaaagagagaaggggtgtctggctcccaggaaaaccactgcccttgtgctgcccttctgacagggacagtcctctcctttactgacctctcttctccactcctttctttgccctgtatttgtgaactcctgacaaccagaagttgagaagttgatttgagagtgtatctctcacatctgttcttttctttctcttttgtctttccacaatgtcagaatttattgaataacaataaattcgcaggcatggaagtttcagcagcattttaacagatgttcctgctttccttgacagccttggctggggcaaacacaaggttatttattcctatcataacagctaatgttaattctcatgccacacattacacaccacagagtaaacacatgtacacatggcatgtgtgtgtgtgcatatgtatgcatgtgtctaatgctatgcccctttttataattgctctaggacttatagtacacacatacacacacacacacacacacacacacacacacacacacacacacaccatatacatctatgttacaggaaaccagagctgggaaactgaccaaattctaaaggagtctatgggaatgagatacagaaccagcttgaagctctgtggcggctgttttagagtcaggctacagttcagagctggacaggaaggtggggagagggccgatgagaagaccttcatcttcaaggactgagccaagcagaagctcctaaggaagtcaaatgccagatgacaggctggtgggagctgcgggcatctcagtctatttgcatcccagaacgaggaaaagagtctccttttactgctcggttgctattaggtcattattagttccataattccaaagagagtgaggaaagacccagtttacaagcaaaaactattccatttatttactttagaaaatttaaatactaattccctttatgtactttagaaaaatatatctaaatgtacacaggatgtgtgaataagattattcattgaagcttatttttctcaaaatactagaaacaacctaatttctattaataaaagaattctaagaaattacagtgttttaatattatactatataacagttaaaatgaataaagtaagctttttcttttaagattgatttagtttgtacttttcatgtatgggcattttgtctattttatgtaaaagcaccacgcgagtgcctggcgcttacagataccagaagaggaagctggctccccaggagctggagcaatcggtggtcataaagctaccacgtgggtgcagggaactgagcctgagctctctgtgaaagcatcaagtggtcctaactgctgagccagctctccagctcctacaatgaataaaacatatttctttatctgcacaaattatatccaaacgttgagtaaacctaagcattttgaaagccagacgtggtagcatacacctgaacttgggaagccaaagcagaagaattccaagttccaggccagcctaggctacctacaaagtcctaggccatactgggctacatagcaagatcttgccttaactcccttctaaaatgacaatttcaaaagacaagttaaagaattatatatatatatatatatatgtatatatatatatatatatatataatcggtctagtatagttttgtgcacgctttttatgtgtgtgtgcatgcatgcacaggtagaggtcaaaggataaccttgggtgttggtctttttttaattctttgagacagagtctcccattggccttgaaatttcccaagtcaacgagaccaaatggccagggaaccccagggctccgcctgtctctacctccccagtaatgggattacaaggactcatcaccacacccagttttttttttttttttttatgtgggttctgcagaccaaacttaggtccttgttcttgtaaggcaagcacttttcaccaactgagccatctcccaacccctgtgtgtactctcaacaattgttacttccagctcctaagatcacaggcagtgttagctttgccatttcttttttacatttctccataattaaaatgttctcagaataacgtgtgaaaggacaagtaaggagcagttaactgtatgtgacacacgtgggccatgttacataagatctgagtactgtgcattgagttcaacaagtcgtgccagtccccacaaattttttttttaatatccgctaagcccaaggcatcgtgactgtgacaaaatgggagaattaaatatcagcctacgggcaagatatagcttcttgattttggtgctgtagcctttatattcatggtgataatagaggtggtggcagtcttcatgatagactgactattcaggaagtcacgatgtaccatcatgaagattttaagtgtgctgcagttactaattgcaagctttctgtgtaggtgatggccttggatcggcagaggacactggccctgctggaagcgttctatgatcaatgctcttccaccactaggagtttactccgaaacccacgacaatgtaagtgtccctcagagggaggaatgtcctggagctgaagctgggtgttgtagtccaatgacaaactgcagtgggatcgttttactcctgagggatcccgtgcatctccccaagtcatggcagctgtagccaatctacttgttcctatttccacaaaatgcactcttgctcgaaattagacggagtttcactaagtgcagtcctcaacactgtgtcccatcagaactcaactggaccagcttttaaatttgtttcaatgaaggaaggctttggtgataatctaaacactttaacagctaaggtaggaatgagtattccatttataattgcaatttagaattctaaggtttctacagaagatatgtcttttgccgaagcagctatacctacaggcttttatggtaaaatatgcatatatacctacatgttggaatattcttttatgtgtttatcaataaatatggttacagggcagttggtttctctttgttgcgtttccttatttactatggctgagagagccatagcatccctgtgcacatcagaagccagcgtgccagttcctccttccaccatgtgggtcccgaggctctgactcggatccccctctgccttggcagcaatctcctttacccaaggcgtcctccagccctgcttctatttcttaaggagaatgtcttttaatgactggtttgtcttatctctgtatgcagacttgttacttggagacttaagaatctgtgagtgcggtgtattaaaagctgtaggagtcacaatgttaaagcttaattactaaatgccctgggaagaatggggacaggcaggatttcaggacttggtggaattttatctgtaggggacacttcttcagactgggtctcattatgttagttttgagaactctcggtctccctgcctcacctgaatgccagcatcatggccagtgtagtcatatccagcatattttgttgctttttaacagtgaaatcctagtgactactatccagtcttttcttaaagtcccttcttcttccctccatctctagctttgtctctccctgactttcttttttttctgtactaaaaactgaacttatattaaacactcaatctacccccgaactgcactcctgactttgtataaaattctaaagcacaaaacctcctaagtcttggaaggaagagttgatgaatgaagaattgaagggaaaggaagggatggaaagtgaaccgagtgaaagataaggctatcgtttgtttgtataatggagaaattttaatttgttattatttgagtgtgagcatgatgtgggggtggggagtgcatacatgccacgtagcatatgtggaagtcggagggcaattttgtggaatcgttttttttcttttcttctacctctatgtggtctctagggatcaaactgaggccatccatggcgtgcagcaagcacaactctccagcctgtattgtagatattttaaaatatatttgagatgaaaagacagttccagtccccatatctattctgtgcttattgagaggaaaagggccacaatggtaagggacgagtttcatttgatttagcaatccaagcaacagtccaaatatcgaaagaagagagatgtttattatagatggacacactttccaagaagagtggatacctaatttagggtagtgagacttcttatgttcccttgagtatctagttgcagcaaaaggtacctgatacttttatcattgtttaagacaagataaagagttatgtatgaaaggatggactatccagagactaccccacctgaggatccatcccataatcagccaccaaacccagacactattgcatatgccagcaatattttactgaaggaatcctggtatagctagctgtctcttatgaggctatgccagtgcctggcaaatacagaagtggatgctcacagtcatctataggatggaccacagggcaatggagaagctagagaaagtacccaaggagctgaaggggtctgcaaccctataggtggaacaacaatatgaactaaccagtacccccagagctcatatctctagctgcatatgtaacagaagatggcctagtcggccatcgttgggaagagaggccccttggtattgcaaactttatatgccccagtacaggggaatgccagggccaagaagcaggagtgggtaggtaggggagcagggtagagggagggtatagggaacttttgggacagcatttgaaatgtatataaagaaaatatctaataaaaagtattaattaaaaaggagttatgtatggaacttgctatgttgacagaggctagattcaaactcacaaagatctgtctgttgctacctcctgagtgctgaggttaaaggcatatgtcactatatccagctctgatatttatttttaaagtaatacgcttatgtaataatcactgccctcactgccattttatattaattctataattgtgattctgtactgtaagatcaattatttagataaatcctttgttgtctgcattagggccctttgttgaatttgaagagatagagttgattgagttctggggagacatggatattaagaagcacatttatgaagactttgatgcactgctcttaaagatgaatatgttagttgctgaaaaacttgcaggcaaactcgcagaaaacaaagatctcccacagcagcagagagatcaagaactttcatctgactcaacaacggagccagaaactgccacacaactgacctcacaacagagatcccgcagagtatcacttacaggacaaggacagggcaaagggcctcgcaaaacatctgcttcaaaacaaggagcaagcagagggtcagtggcagagcaagggtcccgaagaagctcgggagtgaaccaaacccagcagagagggtcggtggcagaacaaggatcccgaagaagctcagcagtagaacaaacccagcagagagggtcggtggcagagcaagggtcccgaagaagctctacagtagaacaaactcggcagagagggtcagtggcagagcaagggtcccgaagaagctctacagtagaacaaacccagcggagagggtcggtggcagagcaagggtcccgaagaagctcgggagtgaaccaaacccagcagagagggtcggtggcagaacaaggatcccgaagaagctcggcagtagaacaaactcagcagagagggtcggtggcagagcaagggtcccgaagaagttcagccatggaacaagagccacaaacagcacaagatccaaacagcgattcattgccagaacaagaatcacacagagggtccatcacagaaggatcacacagagggtcaatttcagaacctgggcaacgcagagcatcagtaacaggacaacgcagaaagtcgtctgtagatgactccggtagtgcagggtcacgcagaggatcagggacagatcaaggacagcacagaggatccgtagggcagcgcaaagggtcaggagaacgcaaaatgtcagcttcagagtatggaccacatcaagagtccataacagaagagcccctcactgcgtcagaaccaggaccgcaaatagacactattcaagaactggatgaagactcaactccacaattagaagacgatagtgccctaaaagaaagtaaaacctcggaactcactaaaatagaaactca

SEQ ID NO: 2820 - DNA, 1418 bp, Mus musculus
atttcttcatacatcacagacttgaaaagcgaagtctttgaggaattccttaaacacctgtgccacagcgcagaagaattccgggagatcatactgactgacatgcggaggcagatgtttgcagaactcttcctacagtgcgacagtgggaaggtgatggccttggatcggcagaggacactggccctgctggaagcgttctatgatcaatgctcttccaccactaggagtttactccgaaacccacgacaatggccctttgttgaatttgaagagatagagttgattgagttctggggagacatggatattaagaagcacatttatgaagactttgatgcactgctcttaaagatgaatatgttagttgctgaaaaacttgcaggcaaactcgcagaaaacaaagatctcccacagcagcagagagatcaagaactttcatctgactcaacaacggagccagaaactgccacacaactgacctcacaacagagatcccgcagagtatcacttacaggacaaggacagggcaaagggcctcgcaaaacatctgcttcaaaacaaggagcaagcagagggtcagtggcagagcaagggtcccgaagaagctcgggagtgaaccaaacccagcagagagggtcggtggcagaacaaggatcccgaagaagctcagcagtagaacaaacccagcagagagggtcggtggcagagcaagggtcccgaagaagctctacagtagaacaaactcggcagagagggtcagtggcagagcaagggtcccgaagaagctctacagtagaacaaacccagcggagagggtcggtggcagagcaagggtcccgaagaagctcgggagtgaaccaaacccagcagagagggtcggtggcagaacaaggatcccgaagaagctcggcagtagaacaaactcagcagagagggtcggtggcagagcaagggtcccgaagaagttcagccatggaacaagagccacaaacagcacaagatccaaacagcgattcattgccagaacaagaatcacacagagggtccatcacagaaggatcacacagagggtcaatttcagaacctgggcaacgcagagcatcagtaacaggacaacgcagaaagtcgtctgtagatgactccggtagtgcagggtcacgcagaggatcagggacagatcaaggacagcacagaggatccgtagggcagcgcaaagggtcaggagaacgcaaaatgtcagcttcagagtatggaccacatcaagagtccataacagaagagcccctcactgcgtcagaaccaggaccgcaaatagacactattcaagaactggatgaagactcaactccacaattagaagacgatagtgccctaaaagaaagtaaaacctcggaactcactaaaatagaaactca

SEQ ID NO: 2821 - protein, 473 aa, Mus musculus
  VARIANT (1)...(473): Xaa = Any Amino Acid
ISSYITDLKSEVFEEFLKHLCHSAEEFREIILTDMRRQMFAELFLQCDSGKVMALDRQRTLALLEAFYDQCSSTTRSLLRNPRQWPFVEFEEIELIEFWGDMDIKKHIYEDFDALLLKMNMLVAEKLAGKLAENKDLPQQQRDQELSSDSTTEPETATQLTSQQRSRRVSLTGQGQGKGPRKTSASKQGASRGSVAEQGSRRSSGVNQTQQRGSVAEQGSRRSSAVEQTQQRGSVAEQGSRRSSTVEQTRQRGSVAEQGSRRSSTVEQTQRRGSVAEQGSRRSSGVNQTQQRGSVAEQGSRRSSAVEQTQQRGSVAEQGSRRSSAMEQEPQTAQDPNSDSLPEQESHRGSITEGSHRGSISEPGQRRASVTGQRRKSSVDDSGSAGSRRGSGTDQGQHRGSVGQRKGSGERKMSASEYGPHQESITEEPLTASEPGPQIDTIQELDEDSTPQLEDDSALKESKTSELTKIETX

SEQ ID NO: 2822 - DNA, 23824 bp, Homo sapiens
aaaatgaacaaactaatctataatgataaatatcagaataatcaccacctttggaggaattattgactaagaaatagtaagggagccttctggcagtgatgaaaatgtgctatgtctttatctgagtggcaaacattcagtgagctaaacacttaagatttgcatacctcattgcatatttgttgctccttaatgaaaattttcttaaaaataatcacttatggttgcttgggttgaagtgcctattaaagaaaaaagcttttgctgcatttggccataattacaatagtgatgacccctggggttatcagtgggtgggcttcatctcacagtattagagaggttatagaaagtaaaagacaagctcaggactttaaactctcagctcaaattgcagtcagaaaacctgatcattatatagaaatctctatttcttgtagcttcagggcagatacggatgaaaaatcagcccccaaatataatgtgacagaatcaagatgtaagttgaattcacagacttgccaagtcttttacattaaagttagcacattggaaaatagatgagaccctgaaatttggaatagttacatttgggtggactcagaggaatctgagacttgagccacaaatcttcccaagctttccttggcaggagaagcaaccccttctctcctgtctgagaatattagcttttctttccttagagatcctttaataacttctcttggggcatttagcttgcaaggaggtgtctattttcttcaagatccacctgtacaacattcattgcctttaaatccaaaattggagtctgatcttggtattgctccaggaatactagttcaaagtctgtcttgagagatgagtgttggtactccaagagatcagtaagtttttgctaatttctagcagcagaaagctggggaatatgtgtgggaattgattatagtactttcagactaagaaggatagatataactttggattgcctcaaatttatcagtattgctatactttgcagtatatacttagcagtgacatttttgatatctgggaatagttttaacaattttcttggtagattaaataaaaccttgactcaaagatagcctgcattcaatgaggttgagatgccggaatcttcttggcttactatacagtaagaaatctaaaggctttcaagatttctgaaattgatttttcatatgtagcctctatatgtgcacttctaccatatcgcccaggacagcccaaatgacattcccttgagaaataactaaagaaattaacgaggggagcaccaatatcactaaaaagttctatggttgctgtcctggggatgatggtgagagatactgtcattgaagtaaactctctaatttcaagggaaatgattggcttctagagtgacaaaagatatatgacatttaactaccagagacaagtcccactagtcaaagttagtgctcataagtataattaataatagtattttgatccaatctcaaagatccaaggccatattttaacggatccagtttgtctaggactcacactgtggttagttcctgaatatatacttggaattaccataatgaacagtgggagttaaagtggccatctaaatgttttcttggtgattacagtttccttaggaattaaatggatataatgcctactaaattattactggatctacttacagaaaagcactaactataggtccagaaacatgagttgagataccacaatggagaatctcagcctctcacccagatgccagacttaagtcagttggtatacccagaactctttggttgaagggaaggctgggtctcttggggaagaattcgacaagacttcctcaagtacatattgtagattttactctaggctttactcaaagggcctgtagccatttattagggtaaatatgcattggcaaaggaaatatcacagactcagggattaccagatattgattccaagttaacatcaattcctaggatcccaaaacactcccgtggaccactgggtaaagttaggatgtatagatgtcagataataaatgctattttggtcaaagtttatgtcataggtccaattactctgtggacttagctatggttatttctggttcttggatgtttaattggaatagacacacagcaaccagcagaatcttcacatttgttctccattttgggaactgaggactattatggtaggaaggacctggtattatggtaacagaaactcctgaactttccctgtctgccagaatgttaaaaaaaaaaatacataatcatataacaaaaacaaaaaactccacagagatagatatgaaaatatataaacgattcaggggaagtaatcctatcatattcttatctaattttcctgttttgtctatgtagaaggtggaggatacttcttttttttttttttcttttgtgagacagagtctcaccctgtcacccaggctggagtacagtgtcatgatctcagctcactgcaacatccacctcctgggttcgagcgattctcctacctcagcctcccaagtagttaggacacgtgccaccatgcctggctaatttttatatttttagtagagatggggtttcactgtgttggccaggctgctcttaaactcctgacctcaggtgatccgcctaccccagcatcccaaagtgctgggattacaggcatgagctgctgcgcccagcctacatcttgaagaatgtagattactgtggctctatttacatggctattccaggtgtggaatctttattgaatcaaattgacgtagctctctcattcacaacaactattggtctggcaaatgctgttttctctagagaagtttacaaggaccaaaagaaatttgatttcacctgtcaagaatagcaatacttttcactgcattctcttagggctaaggcagttcttcttttctctatcgtaatctagtatacatagaccttgattgtattgacatcacagaacaggtccatgatatccatcatgatgattggacttgatgagctgaaagcagcattagataccttggtaaagtagcattagataccttggtaagacagctaatgtgtgtcagaggatgggagataagccccataaaaatacagggtttatgaccttgttaaaatttttgctttgggaggctgaggtgggcggatcacgaggtcaagagactgagactaccctggccaacatggtgaaaccctgtctctactaaaaatacaaaaattagccaggcgtggtggcatgcgcctgtagtcccagctactccggaggctgaggcaggagaattgcttgaacccgggaggcggaggttgcagtgagccgagatcatgccactgcactccagcctgggcgacagagcgagactgtgtctcaaaacaaaaacaaaaacaaaaacaaacaaaaaaaaaacaaaagaaataggcaactggtcccaactgaaaaatgggaaaaagatctgaaaaatccattcacagaagaggaaaaacccatacatataataagcacatgaaaatatattaaatctcactagtaatcagggaaatgcaaattaaaataatgataccatttttatctatcagattacaaaaaataataaactctaacaatatcaagtattgatgtggatatgaagaaataacactgtcattcaatgctggcaagaatgtaaattggtatgaacattttgtgaagcaatttggctataactaataaagttgaaatgcatacattatgcaatccagtaattccacttctagttatttatcctagagaaacgtttgcatatgtacacaggagacgtgtataaggatatccattgcagcattacgttgatatcaaaatactgaaaataatcaaaacaccatcaatagaggagtttttttttaattatggtgtttccatattacagaatgccttattgcagttaaaaagtataaaatatatttctttacagatatgaattagatctcaatgttgagtaaataaaagcaatttgaagaaagacatacgtactgtatcaggtacttttttttcttttttttttttagatggaattttgctcttgttgcctaggctggagtgcaatggcatgatctctgttcaccgcaacctccgcctcctgggttcaagtgattctcctgcctcagcctcccgagtagctgggattacaggtgcccaccaacatgcccagctaatttttgtctttttagtagagacagggtttctctgcgttggtcaggctggtctcgaactcccgaccttaggtgatccacccacctcggcctcccaaagtgctgggattacaggcgtgagccaccgcgcctggcctatatcaggtttttttgtttttgtttttgagacaaggtcttgctctgtcagccaggctggactgcagtgacatgatcatagctcactgcaaatcaacatatcctctggcctcagcctctggagtggctaggactacaggtgtacaccaccatgcctggctaattttttattttttgaagcaatggaggtctcactgtgttgctatatcaggctttttaaagcacatacacaaaatgttaacaatcattatttctgggtgttgggaacacatatgttaattctatcattttctatatttttctataatcaaaaaaattttttaaaaataacaatggaaaaaggacaagtagggagcggtaaattgtttcaagtgacatactcaggtcaggtaagataagtactgaacattatacattggatttagccatcaataagtcagtcacaaatatttcttaaacatttactaagtagaggtcattttgacacgtcacagaatgggaaagtagagtataagcctaaaggcaagatataactttcttgattttgatgctgcagcttttatttacatgataatgattgttgtggtgatagtgatgataaaagcttcaataagccacgttccaactgcataaaaatcttaaatctcctgtaacaactaatcacaaactttcttctttgcttaggtagggtttttggatcggcagaggacattggccctgctggaattgttctatgaccatagttcacaaatgcttaggagtttacttcgaaacccacgacaatgtaagtgccgctcagagggagtatgttcaagctggagtgttgcagtgcactgatatgtactgatatgatacactgatatgttaacacaagattattctaccaccatggaatcccttcacataatagctctcttagatcatgataactgtatctagttgtttattccctccacgaaattcactcttcatcacaactagatgtatttttcaccacagtgcaatactcaaaaattttatatcagaactcagctagaactcaattctaaattcattcaaatgaagaaatgctttagtgacagtctgaatgttttggaaattaagttagtaatggtaattccattttattaacaaaaaaatttttttgagtcttactcttctcacccaggctggagtgcagtggcatgatcatgactcactgcagcctcaacctcccaggtgggagatgattctcccacctcagccacctgagtagctgggactacaggtgtgcaccaccatgcccagctaattttttgtatttttaatagagagaaggtttcaccctgttgccaaggatagtctcaaatgcctgggtgctgggattgtaggtgtaagccaccgtacccagcctggtaattccatttttaatgcccaacttaaaattataagatgtataagaacagtatttccttttcccaagcatttacttatacagtaaaatatccttttatgttatttccaaaacaagtacaattatggggtttatttttattttttttattttatgttattttacgttttcagagatggggtcttgctatgttgcccagactggcttcaaactcctgggctccagcaatcctcctgcctcagcctccagagtagccaggactacagggatgtgccactgtggtcagtttattttcattttttttaaagagaaggtattgtactggctgagtttcccaaagaatgtcttttttttgagacagagtctcgctctgttgccgaggctggagtacaatggcgcgatctcagctcactgcaacttctgcctcccaggttcaagcgattccccctgcctcatcctcccaagtgtctgggattacaggcgcctgccaccacacccagctatttttttgtatttttagtagagacggggttttgccatgttgggcaggcaggtctcaaactcctgacctcaggcatccacctgccttggcttcccaaagtgctgggattacaggcattgagccaccacacctggccaagaatgtcaatattttatttctgtgtgaagatttattaattggatacttacaaatctgtgggtgatatacttggagtatttctgaaaattgtgagaattgcaattttatggcttaccactactgttttgggagaaatggggacagtcttgtggcatgatttccactctttatagtacagacaccagggttttattgttgttgtttaacagtgggattctgtgaatactatccagtctttccctagtattctgttctaggtatccacataactgtagaggaaaataattgaggaatgaagaacaaagaagagggaaagagatagggggaagaaatgaatgttggaaaaacatagccccattgaaagattgtcatggataaagacttgctttttatattgcaaatattgaaaatatatttgacatgaaagatgtgtcccttttcccatccctatgtgatgcttattgtaggagaccacaaaggtagaggacaaattctatttgccttggcagtctaagcaacactccaagtagcaaaaggagaatcctatttatttccaaaatcacaccttttaggaagggatgatttctaacttacagtagtataagttcttttgggtacctttttactttttattgtgttgcagccaaagataactgatatttatttagagcaataggcctatattacaatttctgtgctcaatgcttttctttgcattaatttaatagctctaattctgcattataagatcaatggtttaagtgaatattttgttttctgcattagggccattcattgaatttgaagagataaacttgactgagttgtggggagacatggataatcagaaacacatttatgaaggttttgacaaagtgctcttggagatgaatacattactttctgcaaatcatgctagcaaaacccaaagtaaattattagaaagtccagatcaacctaaacttaacgaacagagaacatcaacaccatcaccaaacccgccagaacagcagagaggagtaactgcagaacaaggaccacaaagaatttcaattgaagaacaacaacaaggcaaaaagccaactgcagagcaagaactgtacatagaatcagtaatagaaccaggaacacacacagagtcaactctagaacaagggtcaagtagaaggttactgacagaacaagaaacacacagagagtcaactacagaacaaggacagcacaaagggtcaatagaaggacaaggaccacgcagagtgtcagtttcagaacaaggatcaagcagagagtcagttgcagaacaagggtcacgcagagagtctattgcagaacaagatcgacacaaagggtcagtagcagaacaaggatcacgcagaatgtcagctgcagaacagggatcactcagagagtcagtaatagaagaaccataccaaaaatcagaacaaggaccttatggagagataatttcagaagagcaagaagacataggctcaacttcacaatcaagaaaagatagtatcttaaaaagtacaaaatatggggaacctataacctctgagtacattgaagtccctctacaggaaaagaggtcttgggaacaaacatatgaagaggaaatattcctgagttctgaactgcaagaggaagttccaacgttaagcagaaaagatcactttccaggtagtaatgcagttcttctacaacatcagttccctgttttgtggaatggtttttaaagtcttttcagaaaacactcatttaagttagaattttttttctggcatatcagatcatgcaaacctcaggcatattttgctgctccacattagtctagaccttgaacaataatcaattaattacattcactaatgaaatgcaagccagaatgtctgtattgtcaatttacatataatttccattgcactagattatagaagtgttttaattgggtttctgaaaaggtagtagaagcccttttgttttaaatgtaatgtctgatattagaaaccactttaaaaattttcttttatttcaactgtaaatgggtctcgcttttttcagttaaatataaaatatatgttctagaagagtttctgaaagtcatattcaagacagaacgcaccctgcatttcaaatatttattctcatgtctttggtcagaatttaggcatacagtagttcccccttatccatggttttgctttccacagtttcagttaaccacaatcaaccacagtcagaaagtattacatggaaaattctagaaataaacaattcatacatttttaactgtgcaccattctgagtagtgtaatgaaatcttgcaccttttgttcagtatgtccatgttgtctatgttaccttctcattagtcacttaatagctgctggattatcagattgtcattatgttgcagtactcttgttcaagtaacctttattttacctaataatggcttcagtcgcaatagtaatggtgctggcaatttggatatgccaaagagaagccataaaatgctacctttgaagtgaaaaggtgaaaattctcagctgggcatggtggctcatgcctgtaatcccagcactttgagaggctgagacgggtggatcgcttgagcccaggagttcaaaaccagcctgagcaacatggcgaaacgccatctcaaaaaaaaaaattagctggccatggtggcatgcaattgtagtctcggctacgcaggaggctgaggtgggaggatcacctgaacctcaggaggttgagcctgcaataagccatgattgcaccactgcactccatctagcctaagcaacaaagtgagaccctatcaagaaagaaagaaagaagagagagagagaggaaggaaggaaggaaggaaggaaggaaggaaggaaggaaggaaggaaggaaggaaggttcgttctcaacttagtaaggaaagaaagaaaattgtattctgaggttgttaaaatttacagtaagaacaaatcttttacttattaaattgtgaagaaggaaaaagaaattcatgctactttttctgtcacacctcaaactgcagaagtatatgtactatctgcagtttcaggcatccactagggatcttggaacatatcctgccaaggttaaaaagggggctattgtatagtaatacctagctgtgagggtggctgagaaatgtagcctcattttgcatggccaaattggatacaataatagcttttgctatagagctgctttcaacaattcaagttattcagtgacttcactgtggtcgattgcaacactgcatatatgggaaagtacttagagtttttggtgttctatatgcaatgcatttctatcacttattaaccttaaaatagctaatggaatatgtaatgtctaattcataagcattttcatttgcaccttttagaaactacaaaaaaggaagttcagaaagacaagccctgtgaacccaagtcccaaaaaatagaaggaaagtcatggtcaggtaactcctcatttaatcctcctttcatttataccctagaacaaaaatattgtgaaagcgaagtttgattggctatgttatggaatgtgtttttacaggtgaattttttacttgtaactggaaaatgaagtatgtcacatttgaagatgaggaacaggcaaacttaatctatggtaactccaggttcacaggtacatgttaacaatgaaagtaggaatagatggcagtccaatagatggatttaatttactgtggtactcgatgataaagactgaatttagctaaggcagaatgggaaggtgttccttgcattattttgtccttgagctggtgaatctaaatatataccagatagatatatttggtggtgatgtactattgatggtggcatgtgctattgatgaatgctcttctgctttaaaacttatggcattagtacccattttttaaccatgatatggccctaccactgctttaaagctatgatctaagcatacagagaaaatcagacattagatactaaaactcaatagaaatcatttcagctattcctttacctggtagggccacatctaaacatatgagacaagtgagaatctatcttgtttttgaagacttgcaaagaaagatctactcaacagagcagagtagtttctggctttcagacaaagcatgtctttaaaatgattgttccaaaagcactcatatttcactaaaatgctactatattgttttgcctttcacatcaacaagttgtagaactaaattagatcaagattatcttcttcctacctgcaaatttttctctcatttaagcctcaaataacaaactttctatcctcaaattttctggtgaaaatgcatggcattggtcaacctcttgcagcctgctagttcatgttcttcttcttagtcatctttatatcaattttgctttaccaatatatgtaaaaattgtgagtaatcattttttttaatcacatcaaatctcatatagaaggtataagggcatgaatgattgaatcaatgaataaatcaaacggaagtcactttgctgacattttatgaaatatacttcatactgtactattgagctaaaaggtaaatatattagccaaggcttttggaagaaggagttgtggtggtggtatttagtaatttgtttaactagaaagttcagcgtgcagctgttttcaggcacaactagattcaaaggctcaacaatagcagcaggatactgtctgtcttcctctaagccctgtttttctgtgtcactttcaattgagacagttttctccatgttgtgacaaaaatggccatgaaagcatctctaagcttatactctactagttcagcaatcagagtacaaaaagagtgattcgtccctaatagttcttccaaaagttctgaggctaactctcattggcctatagtaggttacattgctatcatatatgaattgttagccagatgtatatcacatgaccatccatggcacaaaagtgggaggcacagtatgacctgactcatctgaactgacaatggagagatgtttttccaaagaaaaaaggaggatgctgtcctcatgaaggaagcatggattcctgacagtcaaaaatggcagatattcattacaataggcactcatttattttccctaactgaaaaaattgttcactttactgcttggtaatgtttcttgcttgacagatttacactcaattatcagaaatattcagtcttgcaaggaggtaaaaggcagaactgccttcaatggagtttcattcaatctgctccagtttgtgcaactcctggagacatttgttggtgaagacgctcccttgagtgtcagcgagactctcacctccttttttaaggagggctatgttgaaacagaacaagagaaaatgaatgccttagaacaggtgggtaatattatttattaatgatacaagtgaggtcactattataagtaaatctctcaacctcagttgctcccgatgtggctcgtgttaaaaaatgtacaaccaaactgatcactttctttcaacaagcatagccattaaagattctattttatcatcaaatattctaagatcacactccagagaactcattcccctaataataacatgattgctcctagcaggagatggtttattgtacagctttattctttctctgaagctttttgagaagcagatatggatatatgcaaagatgtgtatgtgcattatttgcctgtgtgtgagtgtctttacaagtacacacacctggggtatgattatggcctgagtatatatttttactcatgagcacccaggtagtacatatttcctaagaacttactacttacttgggtgacaggtaagtgcatacacattagcttatataaacaatttattctctcatatgaaatatgtaaattactttcactaagcttattcagtaatcatcagccttatgagtcttttcaacctaattctagacaattccctttaccttctcaattccagttcttcctactaaatcaaaaggtgtatattcattttatttttgcaattatatctatctagatattaattcaattactatctcactaatataattaacctagtgaaaactctaaaagataaataaaattaatgtcaaatatagtcaatcttaaatataaaaaaagaatttttaaaacacagccatttttcattatttaaacactgccattcattccccttcactcaaaacatatcccttagggccagctgcagtggcttatgcttgtaattccagtgctttgggaggctgaggagggaaaatctcttgggctcaggaatttgaagttacagtgaactgtaattatgccactctattccatcctgggtgacatagcaagactctgtctctaaataaaaataataataattttaaaatacagtctgtgtatttatcacattcctgaacaactagagaaggagtggaaaagaatggtcaaagattcttaaggtttgtagaataaatttgaaaaaaaaaaaaaaggattcttaaggaatactaatgcagagaatgcctgctgttattttttttcttcaaagccagtcaaggttagcagtgggaggttgtataccaactttagtgacactaatgttaataagttctgataaccccctaccatgggaccaaccaagaatgtctgttttgttttgtttttgtttttgtttttgttctggcctagaagtaaaacagagaaatggtatttaagggattaaaattaatcactgcattttcttttctaaaaaatttaaaaaaaaattttttttaagactgaggtctcactgtgttgctcaggctggtctccaactcccggcctcaagcgatactcctgcctcagcctcttgagtggctggctttacagggatgcaccactgctgaatcactgcattttcccttaatatcatgcttagcctcaaagtaaacctgttttaatagaagacgctggactttttttggaataaacacagaatgctagctagcacaatgaacatgtatcttccgtgctttattatcctgtttgtatcctagtttagccaaaatgctttccaagtccgacagaggcttctcctagaagccatctttcagaagtgggacagtgatggctcaggcttcctggatctgaaggaagttgatgaactcttgtacacatacaaggagggaatggaaaaagaatctatgaagaaaggtaaaatataagaatgttcttatttaaactgtggtaattaacttggcttcaagtttctcagtacacatatacagttaaaatactggttatgctaaaaccactagataacccttcatgtctaccagtatagatatacatttatcttatttatttttaatttctaaaaatagagataggagtctcactgtgctgcccaggctgggctctaattcctgggatccagtgatcctcctacctcagcctcctgagcagctgtgactgcagtacctgccactgtgcccaactctggctataatcttttaagtagaaaataacaagtgttggcaaggatgtgaaaatattagaagccttgtgcatttgtcaacacagtcagaagtggaatatgttgcagaatgctttgtccaaaatcttaaatctatatagttagattccttcagtatacctggctactctcactatgtaactaacctgcacaatgtgcacatgtaccctaaaacttaaagtataataataacaaaaaaaataaaaaaaaatttaaaaaaaaaggttaaaaggattcaagccattccacagttctgcttgttctctcttcttgttttatctctttgtcttcactggcttgcaaatttcttcttcaatttactaacttcttattctccttagtgactttttgtgtattatatttttctcttatgaccagtatttaccagtcaaaagccactaaaattctcattccagtatgataaattcctttcttcattttattagatcttagtttaaattatttttctcttcactgggtttaaagatttatctggttaactttggtgtaccagattttcagtttttaaagtatatagtgcacaagggaaagaattgtcaaggttagttaagttcttcagccctttcaaaaatcattgtattggttgagcgtcaaatgttcctaagtttattgattgtcatgttctcttcagtaactatgtcttctacaaactttacattatactacctggcatgtcttaggatacatccaatgagaatttacttaatgaaattccaaaaggcataatgatgtgattttcacttatcaaatgggcaaatttcgtaacacaaaaccacatcctacagagaacactagacagtagttatagcagctgggttccaatactggatcttcactaaatgatcttgtgatctttggcaagttccttaacttccatagacccaggtctccttgttttcaaaacgaaggctttagatatgaagaatcctagaatttaaggaacctaagggtaatgttataaggaagtcccatatattagatgatatggaatccaattatgtggaattatatgggatcatatatatgagtaaggtatagcaatagggacagatagatagcataaaatgtgaaggattaagcccagcaaatgagaaccaggacagcaatgaggaggcagaatctgctgccagataaaaatgtctgcaaacaagaacaattattctctccaagggcaggcttatacaaaacgactctcaataaacacatattggtagccatttggtctgaggagatgattgctgagctgatggcagtatggaagaaaaaaagcagatttatgctctttaaaaaggaagaagattctaaatttcaagcattgccaataaccgattggcaaatcttcaaacagctcttttgtttgtttgcttgttttggtctactcctattgcttctttgtccaagatttaaaattgggatttaaatagcataaaatcataggattagaagtttttagaaaggtttctgctggtgtcctcaaaatggaagatttctatatggaagaggaaggttgaaacttttagtctgtcttccccctccccaccttttttttagagacaaggtctcactctgttgccaaggctggaacgcagtggcataatcatggctcactccagcctctatcttccaggctcaaatgatcctcccatctcagcctcccaagtagctaagactatataggctgtgccaccatgcctggctaattatttttaagacagggtctcactatgttgcccaggctagtcttgaagtcctgggctcaagagatcctcctgcctcagtctcccaaagttctgggattacaggtgtgagccactgtacccagcctcatttccccttttattcctgtctaatacagcctaatcttttgggcagaaatatcacaaataaaaagctatagaacatgtggcctgtctgcattgttgaatttaatggaataagccattttttccccattacttttcataggatagctattaacattcttggctatgccttttaattttctatttaaatgacgaaatttgctttaatatgttcatttctattccagtaggacatttaactcttttataattaaaacattttggaaacatttattttggtgacatcagcaagatggccaactagaagctcttagggcctgtttccctcacaaagacaagccagaacaacaaataaacaattacattaagaaaaataactgagggagagtgccatcttgcatcagaggagtagcagaaatcctggtgagcccagaaactcaagatggccacatagagaacagaaggcgatgccaggtctccactaccccatcccccaaccaggatcaggtgggaactgggaagaacttctacctatgaagtggaagtaagcaagaggatcccagcaacccccattgacaccttggacacctacacagctcactactggggtcccctgcagtcctcacaggcattaagcccagctgagggagctgcctctagaccacatacctgtgctctccccagaaaagacgctgacatagtgccctgacccttgtggcccgtgtggctactgcactacaccagcttgggattggaactacggctggagtgtgtcttgctcaggggtgagtagtcacgacaccccttcatccctggggctaagccaccaccaaatcacctcaggccagtggcccagcatcctcaagtggagctgcaagcactcttccacatgaggccaagtggaggtggagtcactccatctaccgctcccttcattcccttgggccaaagctgaggcagtactctgcctcctagaaaaacaattccttggccactcaaagcagtcattcctcctcagtgcctaagttgaagaaactccctgcatcccaagaaatggtgccttggccactcagaacagtcacacccccagccctgagctgaagcagcacattgccctctgggaattggtaccctggccaaactgagctgctacacatcccagtgctgagttgacgtagtaacctgtgtcccaaggaaacagagcattggctgagctaaggaactctgccctacagtccaaacaactctagtacctggcttctctggagctttactggactcttagagtctgagtggctgaaatacccatctccctgggaagtggagtcactgctattcttttccttgtactccctaaggcccaaacaacagctgtgctctgcctttctgggttacttgctgccaccgtacctggtcttatagtgtcttggataatgctgagccccaccattccatggtcttgtgtcactactacacagtgcctcatgccctgagacctgagttgcctttgagttttatttgcttaggttcccatattgcaaccatatcgtcctcctgggcccaaacttccagagcaagttttctctctggagtcaggccagtgctgtgccctgccccccaggggtagaatcacagctacagcccagcctcctgggctcaagctgctagggggtgcctcagagtcacagatcctgtctctatgggcaacctacacccaaccctgccacagaaagcaaacctgcaccccaagaatcaggagccacagtaagtttgggagatcctgtgcttaggaccctaacccgacacctgccctgagcacctgcaactggaacccagtgccactgcagctgcttataggccatgtcagacctgacaccaagagggatccccctcagctaagtttccccattgtggggaaaacaagagtaagaggactccaaaagccctcaacatcaaggacattaataacatatgccgctgctgctgctgccacaaactttctactgcctaggccactgaggtgctgacaggtattgctgatgttgaacacagctgaagaaactgcacagagactataccatttcacctatctggaaacaatgtcgccatgtccatcccaactagcacacaaaatttcaactacaggtgaaaatcttcctctataaaagccactctagaaagattggaagaggcaattgttccaccaaataaacagacatcaatgcagggacacaagaaacatgataaagcaaggaaatatggcactaccaaaggaatataactctctagtaacagacactgaagaaaaggaaattaattaattgccaggaaaggaatttaaaataatgatcttaaggaaactcaacaagacaagaaaattcagatcgacagttcaacaaaatcaggaaaacaagtcctcatatgaatgagaaattcaacaaagggatagaaatcataaaaaagaagcagacagaaaccctgcagctgaagaattcaatgaatgaaataaaaatacaatagagagcttcaccagcagacttattaatcaagcagaaaaactaatctctgaacttgaagataggccatttaaaattacccagtcagagaaagaaaaaagaaataagaatgaaaaagagtgaagaaagcctacaattatcactattaagtgaacaaatatttgtattatgggacttccagaaggagaagagaagggaaaagatgttgaaaacctatttaacaaaataatagctggaaatttcccaagtctggggagatatatggacgtccagatccaggaagctcaaaatttcccaaatagatacagcctaaaattcctctccaaggcaaattaaagtcaaactgtcaaaagtcaaagacaaagagagaactctaaaaacagctagagaaaagtatcatataagggaaagccagagaaaagtcacatagaagggaatcaccattagactaacagtggagtccccattagaatagcaacagattttgttgcagaaatcttaaaggccagaacagaatggggtgatatattcaaagtgctgaaagaaaaaaaaattaccaaccaagaatagtatacccagaaaaactatccttcagaaatgagagaacaataaagtctttcacagataagcaaaaacttgagggaaattatcaccactaaaccggccttacaagaaatgctcaagggagccctatatctggaagtgaaaatatgataatccctatcatgaaaacatgcaaaaatatgaaactcactggtagagcagatacacaaaggagaaagaaaagaatcaaatcttatcaccaaagaaaaccaacacactgcaataataataagaggggaagaaaggaacaaaggatatagaaagcaaccagaaaaacaattaacaaaatgacaggagtaagtactcacctatcaataatagctttgaatataaatggattaaatcccccatttaaaagatatagattagctcaataaattaaaaacatgacctaactggccaggcgcggtggctcatgcctgtaatcccagcatttcgggagctgaggcaggcggatcacaaagtcaagagattgaaaccatcctggccaaaatggtgaaaccccatctctactaaaaatacaaaaattagctgggtgtggtggcatgcgcctgtagtcccagctactcaggaggctgacgtgggagaattgcttgaaccctggaggtggaggttgcagtcagccgagattgcaccattgcactccagcctgggcgacagagccagattctgtctcaaaaaagaaagaaagaaagaaaaaaacatgacctaactatatgctgcctagaagaaactcggttcaccagtaaagacatatatagactgaaagtgaagggatggaaaaagatatttcacgtgaatggaaattgaaagcaagcaggagtagctatacttagacaaaacagactttaagtcaaaactgtaaaaagagaaaaaggtcattatataatgataaagagatcaattcagcaagtgaacaattctaaacatatatgcacccaacatcagagcactctgatattataaagcaaatattgttagatctaaagggagagatagactctaatacaatagtagttggggacttcaacaccttactctcagcatgggacagatcatttagacagaaaatcaataaagaaacattggatttaaactaaacattagaccaaatggacctaacagatatttatagaacattttatccaacagctagctgcagaatacacctcttttttttcagcccatggaacattctccaggatagaccacatgctaagtcacaaaacaaatcttatcaaatttaaaggaattgaaatcatatcaaatatcttttctgacctcaatgaaataaaaatagaaatcagtaacaagaggaactttagaagttaaacaacatgctcccgaatgagcagtgggtcaatgaagaaattaagaagggaatttaaaattttttttgaatttttactttttactttttaatttatttattttttaaattttcttctactgaggtcctatgccatcataaaatttcttggaacaaatgaaaatagaaacagaacatactaaaacctatggaatacagaaaaagcagtattgaaagagaagtttatagaaataaatgctcacatcaaaattgtagaaagctttcaaataaacgatctaacaatgcatctcaaggaatttggaaatcaagaataaaccagacccaaaactggtagaaaaaaagaaataataaagatcaaagcacaaataaatacaattgagaccaaaaaataaccaaaaaatcaacaaaacaaaaagttggttttgtaaaagataaaccatattgccaaaccattagctagactaaccaagaaaaaaaaagacccaaatgaataaaattagaaatgaaaaaggagacattacaactgataccacagcaatacacagaatcattagtgactattacaaactatatgccaacataatagaaaacctagcagaaatggataaattcctggacacatacagcctaccaagattgaagcaaaaagaaatagaaaacctgaacagaccaatcacaattaacacgatttaatctgtaataaaatgtctctcatcaaagaaaagcccaggatctgatggctccactgtggctttctaccaaatatttaaagattatctgatatcagttcttctcaaactcttttagaaaattgaagaggagggaattcttccaaactcattctatgaggccagcattatgctaatactaacaccagacaagaacacaacaacaacagaaacagaaattataagccggtatccctaatgaacacaaatgtaagaattctcaacaaaattctagcaaactgaatccagcaacacattaaaaagatcattcacacagagaataaaagaaaggctgggtgtggcggcctttacctctaatcccagcactttggggggccagggcaggaggctcacttgagcccaatagtttgagactagtctgggcaacataacaagaccctgtctctatttaaaaaataataataataataaggaaataaaagatcattcaccctgatcaactgagatttatcccaataatgcaaagatgatttaacataaaataaccatgatacatcccatcaacagaatagacaaaaaattacatgactatctcaatagatgcaggaaaagcatttgataaatattcaatattccttcatgataaaaactctcaacaagttaggtttagaaggaaaatacctcaacacaagaaaggccatacataacaaaggcaacatcatactgaatgggcaaaagttgaaatctttttttctaagatctggaatgagacaaagataaccactttcaccacttttactcaacatctgtctattctagatgtcttagccagagcagttaggaaagagacagaaataaagggcatccaaattggaaaagagaaagtcaaattgtccctgtttgcagatgacatgatcttatatattaaaaaaccctaaaagctccaccaaaaaattattaaaacggataaacgaattcagtaaagttgcaggatacaaaatcaacatataaaaatcagtaggccgggcgaggtggctcacgcctgtaatcccaggactttgggaggcggaggcgggtggatcaccagttcaggagatcaagaccatcctggctaacacggtgaaaccccgtctctactaaaaatacaaaaattagcagggcgtggtggcacgcttgtagccccagctactcgggaggctgaggcaggagaatggtgtgaacccaggaggcggagcttgcagtgagctgagatggcgccactgcactccggcctgggcaacagagtgagactccatctcaaaaaaagaaaaaaaaaaaatcagtagcatttctatacactagcaattaactagaggaaaaagaaatttaaaaagtaaccccatttacagtagctacaaaaataaaaaataaaatacataggaataaatataaccagggaggtgaaagacgtctacaaggaaaactataaaacgttgatgaaagaaaatgaagaggacaccaaaaaatggaaagacatctcatgttcatggattggaagaattaatattgtgaaaatgaccatactaccgctgtcaccagctgctgacatgggcaggtcccttgtggggctgcctgtgcgggtcgctagggcggtggacatcacgctgctattccgggccagcgtcaagaccgtgaagacgcagaacaaggcactgggagtggcagtgggtggcagagtcgatggcagccgggatgagctgttccgcaggagtccctggcccaagggcaacttctccagccgggcccgcgaaatgatttctcacagtggcaaactgagagattttcttctggaacacaggaaagattatattaatgcttatagccataccatgtctgaatatgggaggatgacagacacagaacgagaccaaatagaccaggatgtccagatattcatgaggacctgttcagaagcaattcaacaactacgaacagaagctcacaaggagatacattcccagcaagtgaaggagcacaggactgctgttctggatttcattgaagattacttaaaaaaagtgtgtaaactttactcagaacaaagagccatccgagttaaaagagtggtggataagaaaagaatatctaagctggaaccagaaccaaatgcaaagacaagagaatccacatctttctgagaaagtttcacagtgtccttcaaaagactgaagaaaaccctgccactgaagaacatccagaaaagattttgactgaaagacaacctgaattgggaacatggggagatggcaaaggtgaagatgagttatccccagaagaaatacaaatgtttgaacaggaaaatcagcgactaattggtgaaatgaacagcttgtttgatgaagtgaggcagatcaaagggagagtggttgagatttccagacttcaagagatattcacggaaaaggttttgcaacaggaagctgagattgatggcgttcaccagttagttgtgggggcaactgaaaatatcaaggaaggcaacgaagacataagagaggccattaaaaacaacgctggcttccgcgtatggatcctcttcttcctcgtgatgtgctccttctccttgctcttcctcgactggtaccacagctagcctgggccacgggggcccagcacgagagtctgcatgggcgctcacaggctgtgtactctcatgtaccccccgtagtctcatgtacccccggtgctggagcatggtatgaccacattttatcacagagccattttaagagaaaggggttcagacagacggacatattccccaaaaagggatacccaggccgatagtgttcagcccatttcgcagctgaaaaagaaaacactgcacaccaatgggaagtggc

SEQ ID NO: 2823 - DNA, 651 bp, Homo sapiens
gtgaattttttacttgtaactggaaaatgaagtatgtcacatttgaagatgaggaacaggcaaacttaatctatggtaactccaggttcacagatttacactcaattatcagaaatattcagtcttgcaaggaggtaaaaggcagaactgccttcaatggagtttcattcaatctgctccagtttgtgcaactcctggagacatttgttggtgaagacgctcccttgagtgtcagcgagactctcacctccttttttaaggagggctatgttgaaacagaacaagagaaaatgaatgccttagaacagtttagccaaaatgctttccaagtccgacagaggcttctcctagaagccatctttcagaagtgggacagtgatggctcaggcttcctggatctgaaggaagttgatgaactcttgtacacatacaaggagggaatggaaaaagaatctatgaagaaaggtaaaatataagaatgttcttatttaaactgtggtaattaacttggcttcaagtttctcagtacacatatacagttaaaatactggttatgctaaaaccactagataacccttcatgtctaccagtatagatatacatttatcttatttatttttaatttctaaaaatagagataggagtctcact

SEQ ID NO: 2824 - protein, 149 aa, Homo sapiens [sequence omitted]

SEQ ID NO: 2825 - DNA, 113873 bp, Mus musculus
  misc_feature (1)...(113873): n = A, C, G or T/U
tgccctttccagaacaacatataatgggaatcacatagtttagagcctttctgattggcttctttcacctagtaatatacagtaaggctcctctgcaactttccatggctgggttgctcatatctctttggccttgaatatttcattgtctagatgtactgaagtgatttatccacctcctgaagctatgttctattgaagatgccacttccatgttttggcaattatgaatgaagctgttagaaagtcatgtgcaggtttttgtgtggacatgatttcaattcatttgtgtaaatatgaattatatttttaagaaactatcttacagccgggcagtgatggctcatgcttttaatcccagcacttgggaagcagaggcaggtggttttctgagtttgaggtcagcctggtctacagagtgagttccaggacagccagggctacactgagaaactgtctcaaaaacaaacaaacaaacaaacaaattgtcttattgtacttgtgtcattctgtattcccaccaccaagctggtgtttgaacttgtaattcttcccccgtctcgtgttggggtctggagttggacctatgggtgctaaacagacctcttaaagcttccagggctcactcaaactaagccattgagagccggttccttcccactttggggtgtagctctggaagtgccaccctaggatttagccattggcaccatccagcagggctctgcctctgcagagccactctgggaagcggcagccaccaagattcacatctctgaacagctctatcctgaccaagcccatgaatgtccagtgcctgccttgggtagaattccaaacatttagcgcgtccctctggtgtcttccctggtcagtgcaactcagcacattacagacatgccccgcagtctccagcggctagcgcggacaaaatctccaggcatggcctctgggacatggccgcggggtccttggagtccatcgcggacagtgtttgggcagcgctgggctccagcttggcccaaggctggcggcgcgccctggcatcagaccggccggcgtctatgccgccagccgccagcagggggcagccttcggttcgctcggctcgcgcgggcgcgggggggcggcgctgcgccgcgcggtgctgcgctccagccgggacccggccggggccgctggatgccgcgtctccgctcctgctgcctgccgggcgggctccggcggccggtgagtgcggggcggccccgcggtggtgaaccgggcccgggagggtggcgtggtgagttcgggccggccgacggggcccacgggctcctgctccttccctgtcccctggaaacggcggcccggactccaggctctgtccctggcggcgccgcggcgctggacagcccgggtgggggccgatccggagcggcgggcagggaaagcgcggggcccttgctggcagtctgggcgcctgcggcgggatagggtggccttcggcttgggagggctgaaggtttagaggacccaggtggcccagagctgcgggatgggggctgcagcctcgggactgggtcgggggggcatagcggggctaggcccgagaccccccaaatgaagcgaaaggggtgaggcactaaggaagacagtgaggaaagcgagcacctccgccgagtcctttatccctgccagcggccttcaccctttcactgccaggccgacagcgggctcctctcaaaggagcagctgctagacagctggcaaaacaatggagaccctgcttctcgggccccctgctcttgggacagatgattggagggtaggcgaatgtcaggctaggggatttagcagcgtaggctgcccggagtaaatggttgcccacttcacctttccctgcagggggtggggtgtgtgtgggaaggtagggcagtctgccccaggcttctgggagagagcaccgacgccccgccctgcgaacctgccgtgccagttgtttcgccaatggaaggggaggtggtagggtcaggtgcccccgcccctccctgtgctagaggcacgcaggttggtacccagcatggcccaaggagtggggtcacactcctggaagagataaggcctgtagggacaccccacaggttggggctttgttgtgggggtatcgccctgtgtcaaggcacatgtgtctactgattagccggacaggcagctgccaggatgagctagaggaggctggaggtgggaagggaggccagccaacttggtcttgtacttattttgcctggtcttttagcccacgaggcatgtgtttgtcagccttgtaatgtgcggggactgcaggaaggtagttcctgaagctggttctcctgtctagggccttcctgccctcaagtagttcaacaaatgatagaattagggttcatctcgctaatgctcttggcttgtttgcatagattgagtttgcctttctgtgaccctgacataaccgtggctgaggaggccctgaaagtgctcctctggttgttgagtggataccctgggggagtattggaaagaaggaaaagttcaccccaggaccaggatgcgggcatggccaccctagcaggatgatgagtctagtggatgctgattcaggcttgccttggcttatgctcaccaaatctggagccttttttttttgagcaggttggtgttctgttgccatggcaataggcctggctaaacggagctcccaccctttctggttctggggctactttctatttggggatattgaaagttgctctcctgaggtctctagcttcctgacaggcctccttgtctctgtcacaaagaccgtccacctcctcagcttcctctccatccttttgtgatgaggcttttcaggaaggatcttcctggttgttggacaagaagacttggttggttatatatagtcttgggtggaggtgtgcttggctatttggaattgaggatacttggagtggggcctccgttccaggaaaacaatggctttggaatgagctgttgtgttgtaggaaccaggaaaggttgctgatggtgggggtgggggtgggggtggggttaggaagggtcacaggctatagacacttcctttgagagctcggactttggctggttgaccacaggatacggcgtctcatttgtttgctctctcctggcctggctcaggtcccaggttgtgtgtctgagggcttcctcctcagaagccctcatcgtatggatggtgcccttcctgactccaggacggtctgggctgactgcccagatcccctttaacagctgaggggggcatgtgtcttagaaaattgggcccaaaagtctagggttctccagcagcaggtctgaaggtgaactgggtagggcagagttgagtttacgtgaaagggggaatacaccctgctggggtggagcagggaggggctgggactccggaagtctccatccagacttaatgtgccaaaggagttcagggcagcagggccgtccttactccttcaaaccacaagtctgtccccaagccctggagtggacactacagcctagaagcagagtatcaatgtaagtgagccctcctgtggagggcaaagccaagggctggggatcccctgcatctcgatggacaagtcctcacaggactcaggacctgctgagtgaagtcttaaaagttgggccttgggttaggtcctgggcgctttaaaatctgtacgccccttcctctccccgtcatcattttctttccctaaactggctctactgaggccttttatttttattttttaaagcgttttcggagatagccagaattagagggtacaggaagtgtggtggtagcgagtgggtgttctccacttgtccccttgcttcatctttgtagatgtaggaattgtgtgacttgtataaccccatccacattcccttgacatgtctgtttcaataattggagttttggatgattttatagggcttgagggtgggtttctctttgccaggtctttcaacacttctactactctgatttgtgtgtgtgtgtgtgtgtgtgtgtgtacagtttattttctggttttcagagagatgttggtgctgggttcaaggtcacacagcaagtctgaggcagagggctttgaacctgaattttctttcagggagaggtttggggccagttctgtgctgtcaagcccttgaagatttactgttggaagaccctgggtcttaagaggagatgccactagctcaaggtcacacagacggggtgggtggcctgcagagcagtagcagggctgagctgcgggctgggctgcaggcaggaggcgctggaggctgaggtgacacttggaaagggagggctgggccttgggcattctcccgccctggtcctcctcagcccgcagctttcagcttgccgtgggtgggagtgggttccgcagcagctggagagctagctgcagatgctgcggtgcgggccggctggcgaggaaacacagagggccgcggggctactgggctgctctgggcgagccggctgatgtcatgtgagaagcctgcacacctggagcccagataagctccgtgtgacctgacagtgagtcacgcggcgctgcggagctcagcagaaccgacgggcgcggcgggcgcgggccaggtcagcctgtgcgaccccgcatggcgctgcgccatagcgtgcaggcctgggagaggggcggtggactggagggaaccacagctctggaggtcagaggccaagggaaagaggctgggccccctccggaaggcatttcctttgtatttatttatgagtgtggggtggcgtgggggctggggaactgacctaaggatcaatccatggcagccaagtcagagcccccagtttggggaggttaatgctatgtagtttccatttcctggagtttctgctttgcctgcggcaggatggcccgtttaactctgtcccaaagctgctgaagtcactgaaagtttttgaagacaagagggcaagccttatactggtcgtggcaaatcctatttactgctgtgataacgatggattgctcactacctggtcaagactccctttttcactttttgaaatggacattcatcccacctctgactctagagtcggaccttttgttttgtttttggtgcacggctggcattcaaacccaggcttatcacaggtgcccgccaaaccctttacagctcgctgagctatacagctagctctgcagaacttttaaagacttgttatatggttatgtagagagggttaaatgttacattaaaatataatttaacatacatatttttatgttttctgtagaaaaatcccattccactcattttctcacccacacttggacacacacagccctactagctgattattgacattgtaagaatttataacatggtccagagaaatggccttgctgccaatcctgatgacctgagttccattcctggaacctacatggtagaaggagagaactgactcccattagctctccccttatgtccacagtgtttctgtggggcatgtatgcatatacacacagaaataaaatgcaataattgaaagcatatatatatatgtatatatatgtgtgtgtgtgtattacaaatctttcgacttctaaaatctgtatcacttcctcaaagcatatattcccctgtgaatatgcaaataaaatattaatataaatgtgtatattcagatacacatacatatattacaatttttttgtaccatgggcttggggagatagctcagtagttaagagcactggctactattccaggggacctgagttcagttcttttcattcacatggtgattcataacctgtaactccatttctaggggattgaatgcctttgtaggcaccaggcatgctagcagtgcctacaggtacatacaaacaaaacacttatgcacatgggaaaaaaaccaatatatactatctcacaagttgcctttaaaaaaatttaacagagccgggcagtggtggtgcatgcctttaatcccagcactcgggaggcagaggcaggcagatttctgagttcgaggccagcctggtctacagagtgagttccaggacagccatgactccacagagaaaccctgtctccaaaagccaaaaacaaacaaacaaacaaacaaaaatttaacagtatagaatttttctagtcagtacacaaatgtacccctctcccacttccagcctggagaactgaatctaggaccttgtgtgttagacaagcactctaatgctaagctagacccatagccccttcctcttcttcctcttcctcctcctcctcctcctcctcctcctgctcctttgtttgtttttgagacagggtttctctgtgtagccctggctgtcctggaactcactttgtagaccaggctggcctcgaactcagaaatccacctgcctctgcctcccaagtgctgggattaaaggcatgtgccaccaccgcctggccctacctcattcttcttaataacttcctagttactttataatttagcaatttcaccagtgatttatgtttatagatttgctattataaataaagccacaaaagattagttatgttcattgtgtggactatctatagatgacccatggtagaattgaccaggcaagggctggagaggtggctctgtggttaagagcacttgttgctcttctaggaaacctaagttcaattctgtgcagctcataaccactgtaacaacagttccaagggatcagccacccttttctgtcttttttatgtacccacacatacatgctgttactcaagtaagtgcacatatgcacataaaattgaaaaaaataaaaaaaaatggactggtcaaaaaaaatgtatataagtaattccatagatgccacccattcactctactggaacattatgccaaggcttactctcacagtatgtatactaaagttaaatgatccaggccttagcatggctcctgtgcaaagataaaatactagttcatgaagcagttcctgtttctataatagaagtggcctggcctttttgatactcaaaaagaaagacatggggtcagtgagatgacccagcaggcaaaggcacttgcctccaagattgggacctgagttctgagtttgctcccttgagcgtacctagcagaaagagagaaatggctcctgtaagttgtcctctgacgtccacctgtccacatcagctcctgcacccagaataaatgaatgtcatttatttacagttttacaaaaagaaatcctatgactttgtactttaatcaacatagataagagcctctgtttcccatgccctaatggatgttgctcttattaaactactatgtaaaaaaaaaaacaaaaaaacaaaaaaaaaaactgtgcctgcgttacatgcccgtgactattataaaagctgagtttctcttcttgttgggtgtttgtgtttctgcatcagtgaatttcctgtcaacattcttagtagtagctatggagggctgtgggcttgagccaatagatccatctggtcaggggctcactggctcaccttcacgcctttgggctttactgcccatatgcagaggtctaaagcccagctatgataactggtggtgcacgcctttgatcccagcactaaagagtcagtagcaggcagatctctgagtttgaggtcttcctggtttacagagcaaatttcaagatagtcagggctacacagagaaaccctgtcttaaaaaaaaacaaacaacaacaacaaaaatcaaaaacaaaacaaaagagaaaacaacaaaggtctagacttcatttagtcacattgtgctggcttgcactaaccttcaatattagttgaatggcaaaggttatgcctttggaggtggaagcagcaggcggacctcttgttcaaggtcaccccttggctacttgttacatttgaggctagcatggtaacaaagggctacctgtcccttcaaaaacaacaacagaaagaaaactctatatatcatatatgctacaggacttggagttgcccatacaaatagctttaatttactttgggaatatgtcaaatatatactcgtttgcgtataattaattagaaaatatgagtgtatgcgaggtgtgagtgtctgtatttgtgggaaatgcacgctatgacacaggtggaggttggagaaccactttgtgggttctgtggataattcaggtcactggcttgggtttcagatgacaagtaccttcagctgctgcactactgaggcagccctttgtgaccgtcttgagagctgttgtgtggctgggtgtcgtaagaacatctccatgtgcgtgtaatctgtcaggtgccatctgtactctggcttcccgctccttttgtggtaggtgctatcattgtgtccactttacggatgaggaggaggcagcgttcagtgtctctaagtgacttatctccagcagtagaggtgtcaccttgttgtccctatgtctctccctgacggccaaagtctgagctttttactaggtttatttactttgctatgtatttagtaggcacttggtacacacgtgttttccagcatcttatcacagagatcggcaagcattcagaaaagttaaaggattttacagctactgagcttcctagatcctgcactcaccacttctccctcttgtttgtcacattcttcttctttttttttttttttttttttttgccccaatagctccagccccactcacttcgaccatacttattttatatatgtgggtaaaatcactgtctccagacacagcagaagaccgaatcagatccctttatagatggttgtgagccaccatgtggttgctgggatttgaacttaggaccttcagaagggcaattagagctcttaaccactgagtcatctctccagcccctgtttgtcacatttttaccccttgtccatctatgaaattatataagaaggttgacatgtcccaatgcccaaggaaacttaaagggctcagcatgctccactcggtcctgtagcttatagttactagctagaatttggcacttgtttacagttgtttggggtttttgttcttgtttttgtttttttgagacagggtctcactgtttagctctggctgttctggaactcagaaagtcccttcatgccctttctcacacattcctgaccgttagtccccagggatatccattgctctggcttttctcaccatagattagttttgcctgcaataagtagaatcatataaccaggtatagtggtaaatgcctataatcccagcactcaggtggatcagagccatcatcctctgctacatagtgagttcaagtccagcctggttatgagaccctaacttgaaaaaggaaaaattaaaaaagaagaagaagaagaagaagaagaagaagaagaagaagaagaaatgatattaatgtgtgttttttttcaatggcttctttctcatttcaaatgcttttgagatcattctttttttggtttttttgtttgtttgtttgttttttgagacagggtttctctgtgtagccctggctgtcctggaactcactctgtagaccaggctggcctcgaacttagaaatccgcctgcctctgcctctgcctcctgagtgctgggattaaaggcgtgcgccaccacgcccggccgagatcattcttgttctatgagtagcactctgttttatgaatgtggctgcacatttgcactgagtggtccttgtcttctgtctgtcctaaaatgataaagcggctgattgtacttaagacgactgggtcagagtaacttacatacacacttacctttcctccactcaaaattaggaaaagcttcctggtcaggggagtcagggaaagaagtcagaatgattacaaggctaaagtccctggaaggaagggagagggcaggagagtaaggggcagggcaggagaactgcagcctagcctgaggttctgggaggtggtggtctcagctgctggagcctttcatctgaggacaggagccactggcaagtccaaggaatctaagaagggtatggaactcagctctgtagtaaactcagcacagccgaatgagttcagcatcagaggcagctgcagctgaaccacaaaactggttccggagagggagggtgcaggcaaccaggtagtggtagacgctcagctcagcagagatcggatctgcagccaggcctggccacatggggctggcagtaggggaaggctgctttgtgagctgtggagataatggtagcaggacaagggtggtaagtgactcacagcgcagcctccgaagccccaggcttgtgatgagagacatctttgacagaaagttaatagttaacttgtgtccacaggagagttggactgttggaatttcagagctggaggaggtctagatcatttagttcaaccttgagcaaagtgacaggctcaaggtcccctggagacctgtggcaaacccaggcctagatacaagatccttaacagttttagtcagagctgtcccctgtggtgctgttttggtcctgcctgttgcagtgacagtgagggacaggcttatgccgagaagaggggtttatggaaaattacttttaagggacctttgcagctcagagatcctagaatcctcagactgtttgtgctcattgatggtgctctggtgctgaacctacagccaagccaacattgggtaaagacagcatggcagacagtagggttttccggagttggccaggggctaagatcccggtgtttgtctcctcctaagtctccatttgtcttcattttctattcatcttgactatctatgcctttagtgcagtgtgggtagtgaccagccaaagatgccacggcctggataggctggatctgtctgtgccttattcccagccgcacttgggaggagacattccccttagagagcagagccggtccagcactctctctccactcacggggtctcactgagtctagatgcggctgaccaggtgcttagtaggggtttatgcttcctgtcttccagcttccagggactgttcattggaacatttagaagcacaaattttagtttcacctaggaggaactgaggctagaggagatggagagatagcttagttggtaaagttggacctgagtttgttccccatgactcaagctaaaaaaacaaacaagcaaacaagccagcatttgtgtggtggagcacacctttaatgccagcactcaggaggcagaggcagaaggatctctgagttcgaggccagcctggtttacagattgagttccaggacacccggagctccacagagaaccccctgtctaaaagaaacaaaaaacaagcaagaggtggtggtggtggtggtggtggtggtggtggtggtggtggtggtggtggtaccagctataatcccagagctggggaagcaaagatcccaggtggatccctgggattcagtggtccgacatcatagcctattctatgagcttcaggctagtgaaagaccctgcctgaggctgacctctgatttccatatgcacacatacagaaactgatctcagagagggaaccgggttcttgctacactagatataaagagctagttgacctaaccagatttctttctttttttcaaaaaattagttaatttaaaaaatttttatggtcattggtgttttgcctgcatgcttgtctgtgtgagatcctttggaactggagttacaggcagttgtgagctgccatgtgggtcctagaaattgaacctgggttctctggaagagtggccagtgttcttaatggctgagccatttctccagctccctcactagatttcttacccttatgaatacattctgtcctggtttgccttcctctgatgtgataaacaccatgaccaaaagcaacttggggaagagtttccacagttcatcatgaagggaagtcagggcagacattcaaggcaggaacctggaggcaggaactgaagtagaggccatggagaagagctgcttactggctttcccccatagctcactcagcctgataattaccacttggggcctcctcctgcctggagtggcattgcccatagtgagcttgacactcccatatcaaacattaatcaagaaaataccctacaggctgatctggtgggggcattttcttaattgataatttcccagacaactctagcttgtgttaaattgacaaaaaaccctaaccagggcatattctatctccaaaactctgcatccctggagactaagcatctgaaatgcaggctgtgttctaaatgtaaagtgcagaccggggtcttacttactcattcatgttgagaccaggtttctttctctatgaagttctggcagttctggagctcactgtgtggaccaggatagccccgaactcacagagatctttgtgcctcccgagtgccaggattaaaggtatgaaccgtcatactcagccttgctctggattttggaaatgtaatatggatgagttaggaacggttgtgcatacctgtaatctcagccgctctcaggaggcagaggcagaaaggttctccatgagtttgaggccaacctggtctctgtcctgagtttcaggtctagccagaactgcatgagactatctctcagaacaaaaaagcaaaataaataaaatacacatgcgtgtgcgcacatgcacacgtgtctatatatcaaaacaaaacaaaatacagaaaattaaatataaaataatttatgtttataaatattttatgtagattacatgttgagataacagtttggatacattgtagtaaatggaacctttttttttaaagatttatttatttattatatataagtacactgtagctgtcctcagatactccagaagagggcatcagatttcgttacggatggttgtgagccaccatttggttgctgggatttgaactcgggaccttcggaagagcaatcggcgctcttaaccactgagccatctcgccagcccgtaaatggaacttaagtttatctagtttgttttttaaacaaagtttctagttactggccaaatttgccttaaatttaagatcctgtctcagccttccaagtacttagaattgtaggtatgtgtcaccctgcccaaattcaccaatttctttctttctttctttctttctttctttctttctttctttctgtctgtctgtctgtctgtctgtctgtctgtctgtctgtctttttgagacagggtttctctgtgtagccctggctgtcctggaactcactctgtagaccaggctggcctcaaactcagaaatccgcctgcctctgcctcccaagtgctgggatcaaaggcgtgcgccaccactgcctggcaatttctttctttttaattgttatttatttatttattttatgtgtgtgggcattttgcttacatgtatgtgtttgggccacaaatgtgcctggtgcccatgaggccagaagtggacattgggtctcctggaagtggagttccagatgtctgtgggttgccatgtgtgattatacagaatcaaacttgtgagcaattagcttgggagttcctggtctcactgcctgcctgggcgttgaaccttggctggtgggagcttgtccctcagtggaaaggggatagtggagggccttgccttgctttgggggttggggagagaggaaatgcctagccagggcctggcaataggccattgctggagggaataagctcagagaccctctgtctggaattcagaggggaggcattcatggagagagagaaattacacttaatttctaattagacggtgtggcctacttttattttgtgttccctgctggttagaacaagaaaggccctctggggcttcccccctccccctcccaaccaggtttttcttactcctgcccctaatcgggtatgcatgagaatgggggtaggttagggccctaggtgctctcacatcctggatccggccttctctctcaggcggccacaactttcttccctaggctatatttaggcattggtctggggaaaaggatgtgagtttttcaggatcctgtttatctagccgaccccacgccacccccacctcgcaactgtctgtcctgtgtgcagtctggacttcctcttccttcccttcccgatttactttgggcacccagggcatcagatgggacacagcagcacagccactcatttgatgactagcccctaacacatccttaatttcccaagagccatttttctcacctgtgaggactgaataggaaggggtatgtgtgaagctcccgataagacacatcgtaaagccgggcagtggtggtgcatctctttaatctcagaacttgggaggcagaggcaggtggatttctgagttcgaggccagcctggtctacagagtgagttccaggacagccagggctacacagagaaaccctgtctggaaaaacaaacaaacaaacaaacaaacaaacaaacaaacacacgtcatataaatgctaatcccaggtgctagaaagatggctctgtggttaagagcacctgttactcttccagagcaggattcagctcccagcgtccacatggatgtccatgtgatgcacatacagacaggcaaaactctcatacaaatgaatattgttttaaaaagttggaccctccaaggtctttgaggcaggggctaaggctgcggctctggggataccatgggggggcagtcacgtgggatgcccatcgcttcagtggactgcctgtggggaggtgatgctgcagagccccttccgtttccttttgtgttccatttccgtttatgttccaggttgcaatttgtgttttctgtaagtcaagtctctccaggcacacctatgctttggtctaaagggtgaagtgaaattagaaaaaattatgtaaatcaggttgcctggtacatcagtagcactccacaaggggtgactggtttatcagtatccgctgcctctgtctgaactggaaaaaaaccctgaatttcttttctctgtttctacttgcagctacaaggtggggtccaaagaccctgtgttaagcactcatagtcagctggggatacaacccctaaaaacagcacacccaccatgtttaacctcatgaagaaagataaggacaaagatggcgggcggaaggagaagaaggaaaaaaaggagaagaaggagaggatgtctgcggcagaactgcggagcctggaagagatgagcatgcgccgtggctttttcaacttgaaccggtcctccaagcgggaatctaagacgcgcctggaaatctccaaccccatccctatcaaggtggccagtggctctgacctgcacctgacggacattgactctgacagcaatcggggtagcatcatcctggactcaggacacctaagcacagccagctccagtgatgacctcaagggtgaagaaggcagcttccggggctctgtgctgcagcgggcagccaagttcggttcactggccaagcagaactctcagatgattgtcaaacgtttttccttctctcaacggagccgggatgagagtgcctcggagacctcaaccccctcagagcactctgcagccccatcacctcaggtagaggtgcggacgcttgagggacagctaatgcagcatcctgggctaggcattcctcgaccaggaccacggtctcgagtccctgagctggtgactaaaagattcccagctgatctacgtcttcccgctctggtgccaccaccacctcctgctctccgggagctggagttacaacgaagacccacaggagactttggcttctcactgcggcgcacaaccatgctggatcgggcccctgagggtcaggcttatcgacgggtggttcactttgctgagccaggggcaggcaccaaggacctggccttggggctggtaccaggagatcgactggtggagattaatggacagaatgtggagaataaatccagggatgaaattgtggagatgatccggcagtctggggacagtgtgcggctcaaggtacagcccatcccagagcttagcgagctgagccggagctggcttcggactggcgagggacaccgcagggagccggctgatgtgagtgcttccctgggtatcaggggtgagcaaagagtttgtgtatgtgagcatctctcggtagtgtacttaaatgggtgcttgagggtacccaggaactgtgagcagatcttagcgagtgtggaaatggggagctgggccaatagggagaagccagtccaggagagggtgcccctctggaaactcattaaacacctttgcttcttctgtgccttgtcaagaagctgaaggaaaccccccaaaagttcactgggagaaagtccttagcaattcagctggacatccgggtctgaggttcccttcaatgcccttttggattgaagtgattgaagtaaaccttgtgagttttcaagggcattgggttaagatcagctttggcctggtactatcgggggcagggtgtgtgtgtgtgtgtgtgtgtgtgtgtgtgtgtgagagagagagagagagagagagagagatgccagtgggtagttggtgagaaagtgttcaagtttcatcatagcttatagcttagaggcttgggtactatatttgttgagccctcaattggagatgtaggttaacaggtgccactttgagatctgagaagctgtgagtataggaagcccatgttgtttagatttcaggggtgaaaacaatatggcaaatgacctaaaatcatggctatctgggatgtctagctgccatggttatagttctaggtgagatgtcctctcaccccgagtgagcaagatactaggagtcagggcataaagaacttataaacaatggttgtggtttaggtttatctacactacaaagacagtctgcagtctgactgtctgtgagatccactagttgtgatcgccatgaactccagtgggaggcaggagagcactcaaatcaaatgcatggttaggtctccgtggaacaccaagtcttataaccttggtaatcttttggtgcagggagagtaaaagaattttgaatgtcctgtgtggacatggtgtatgacagactaggtggccttcagtcattgttcttgtccagctgtgtgttttagcattgtccagatctatgtcctgcagcctgagcaatgagtgacttgcctgggacctttcagcactaagtgattagccagatgtgataaagttggaaaggggaggaagtggggaggaagcaggcagagcccagctcccagtgagggggagtaggatgcttggggtgatgaggatgctcagggtgatgacccagtctcgaagtctactgggtccagaggaggctaagagaggcaggtcagacctaggcagacacactggacttgtgttccaggccttcctgtagtggaactggttgggtttaggcagctttgcagagggaggttagtgggtaggataatgcttctatagaatccagagagggacctggacttattcattttagaggtatacactgagggccagagagatggctcatcaggtaatggggaattcacttaccatgcaagcttatcagtcttaagtttggtatctggatcccagagaatgagagaaccaacttctaaaaattgtcctctgacctctgtgtgcttacacacacacacacacacacacacacacacacacacacacacactaatattaataaataagaagaacaagaggaggctagagagatggtttagcagttaaaagcacttgttgctcttgatgaacacccaggtttggttccctgaacctgtatggtggcttccaaccaaacataactttagatccaggggatatgaagcctttttctgactttctggggtaccaggaattctaagtcgcatatatgtacgtgcaggcaaaatgttcatacacataaaaataagataaataaatcttttttaaaaaaagcagaaaaaggctgtgtgtggtggtatatatatgtaatcccagcactcaggagacaagcaggtgggtttctatgagtttgaggccagctgggtctacacaatgagttttaagacaggtaggactatgtagagagaccctgtctccaaattaacaaataagcaagcaaacaaaaacaaacaaacaaaaaaagaaaaaaaaaaaaaaagaggagagagacagacacattgaacatctcctctctgttagctgcctagctaggctgaactcaaggaaccatatttaaaggaagatgtgcaagggaaatacttttatctcagaacctaggtcatggtattctactacacttgtctctttttccctctgctgatactgcctttaacaggtggaattttcttctcaaacacaaccccccctggggcattgttgccagctccctgccgagccacagccatgcctctggggccccagagcctggcatcccagatgctactgtgtttactgtttatagctcagggactgtcctggcatctcacatttcccgggccctttaccttcccagctgctgctgccgccccctccccagggaagaggatgctttagcttggagatgcggtagcatccaccttgcagctggtgtccctaaagtcctggcttgttctacctccccactcattggaccagcccagttgatgcccagaggacttcttccccagacttaagcctaacagatctgacagagggcaccgtaggaaacccacccgtatgacttctgaagcaggcttcttgtatgtggaggggctgagagagtcttggtaccttctcccatttgggttgtggtgagacctcaagcccaagcaggggagcagggtgagaccagtgtctccagcttcttgcgacagaccccaggagctgagtggggaggcctgtcaactctcctggggccctcagcttatcttctcttcttcctattccaacttctgctcattgtcttggcatgggttccaaccctacttccatgccaagagtcttcgaacatcctcaagcctccgggcggggcatcctgatgacagtagctccctccatagggaaagctcctggcagtcgtcctgtccatcaggacatccatcaactgtccacacgctgcctgtctccagggagcgctgagggagttggttagtcatctgtcctctcccccacacagatggggcccaaggccttcattctttgtggtctgttttaaaggccctggggaagagacatcctttgggattctggctcagaagatgtaaatggaatttgcaaatccttttcacctgtcctgtagctactacaggggtaacatgagagagcaggtgagaggtgaaccagagtgacaagagagacttggggcctgagagacagaaaccagtcagcaggcttgtgagcagcacccagttctcatacggtggctgcctgtccttcggtacaacgatccactaaacagatagctgtttgaagacgcagacttgggttttgccagtttccaaacttctctgagcctccacttactcattcctccaataaacagtgaggtttgcttaagggccaggcgtagagctggccgagaggggttaagtaagacgacctttccgtgtggaagcacagacctaggtgcggatgtaccaccaagcaccatactgcttctgcataggactgagcacaagcactgaaggctgggaaagaggaaatggctaggtctgaccctaggaaaggtgacaatcagtagagatcaccttagtggaagtgacccttgattctagaaaactatatctatcctctcctcccagagattagactagataactcctcccagattagattggataaacagtagtaaagaccagcgactttcctctaggtctctctgggaaagaaagcacaggggactagcaggttagccagtgctgtcctctgtgggtctccatagaagacaagcatggttatgtagcaggtgagctggtctcggggaagttagtatcttccccctgcctagttgtgaagccatgcaaggatggcgcttcctcccactcccccgtgcggttttccatgatgattctcaggctcttacctaaactttctctttaagatagcctcaggcgctggggttacagctcagcatgtagggaagtcctgggtgttgtccaagtcctgaagtaaataaatgaataaatatcaaacaaaaattgaagggagaaaagtcattctgggtgtttccaatccttatccaggtttctgtagaggagtctagggagagactggctggtcagggttgccgtcatctggcaggagcaccagaatccctttggccattgtggaatttccagactcctgggtggaaatgttatgacccacacacatttgctttgtcaacaaggttccaggtgccatcaggagtgggacctgcagggtgccaggagataaggttgtgtagctagctagcttccaggttagcctggtccatgctgagccctgggctgggatgggggcagagctgccaggtgctacttgggtttggagttcgatagtgcttctgttcttaatatttttccaaatgattctcacaggagttttaagggttttgtttgtttgtttgcttaaaacaaaaaaaaaattattttatgccaaagctttagaaacctctggcatcagagtcttacctcatgagagcccaaactaagttttgttttgatttatttattatatgtaagtatactgtagctgtcttcagacactccagaagagggtgtcagataattgtgagccaccatgtggttgctgggatttgaactcagggccttgggaagagcagtgagtgctcttaaccactgagccatctcttcatcccagttttgttttgttttggcaagtgtcagaagtgcaggaagtgctaggtggaaggtcctgggggcacatgagggtgcactgtccgggatttctagggttcctgagcagtgagccaagctagttctgttctgccaggtctctcttctctgtcctgtgatgaacagcaattccagagtgctctggccgccctgcccgtgggtggtgggcacagtgcctaggccacattgaccgaggtgtgggtacatgccctggtcaatggctgtttttgtaggcacagcttggcatgggggcagggtcttaagagtagcttgccttgagccacctaggacactgccctctgcttccggctaatctcttatttacattgaaatggttctggaaaataccagataggcaagcaccctgactggggtggctggggagtggggtgaaggagtgtgtgtgtgtgtgtgtgtgtgtggcggggtggaaacacaagtattttaaaaatgctgcaaatctctacagcgtttcccagaaaccacaagcatgtgctgggcctgccagcagggttcccgccaccccactacaccaagcagctagagtctcccagtgaagccgggagtggaagtcagtttggtgggggtagcgaggggatggggatgcgtgacccagttgaagtaggggcaccctgctgccaggacaagacatctggcgcctccattgtcaatcctgtggtagggaagtgccctaggcatcaggaaagtctgtgggcacctactgtgtcagacaggctctgtggaggagtgccattttcatggtttccctgccccctgctgtgcagtttcagggggacaggcacttccagctcccggatggtggttggcagcagcctaggatctgttaactacagaggacgttgtcagcacagcttatttttcagttggttggagttcggttgggggacgatttccttagacccggctcactgtgagtcccttattctcacgccagaggcccctcagcatcagggtgtggctgtctgccctgctaactcagcttcccttcgatttgtgtagactctggcttctctatggtgcccagtccagtgtgggcatgggggcagatgtaccacctagtggtgattactggatctagataagattcccctgaaccgataaggcgtgggaaacagcatgagaaaaaaatgacaggtgaggccatcaacttcacttgtaaacccatggcagacctcagccctctgaggtccccaagcctagaaacctcttcatcccctgttttcctgccgggaaggaaggggaagctaggggtggcagtcttatcctgagacgggcgtgactgtgactctcagagagtcagctggaggaagtgaacagcaggcggcaacagccagtcttcagtgcgactggatggacagggtagaagaagggtagctgaggaagcttccggaagggctgaaacagctgccttggcaggttagggtgtggctcccccaggatgggagaggaagactgtgttgtcccttacacagcttccctgccagaccctagatctcggaggcacgggtatagccttccccacacatcctctcgtactgtctttagaatttatggtggcacagtcattgcagtatcgccggtgatattggcaagccctgctgcattgcacagggctgtgtgccattattcttctgtatgcattgtgagagaaactgaagaagtaaggccagtggagggcccggcaggaaggtgtccagccctgaggttctcactggttcctcatatggaattctgggggcctcctcttgtccacagtgcttttccctgcataccacatgcacacatgcatattccccaaagtctgaatgtcacttcctcaggaaagccgtcgctgatcctctcagaccgtgcctgtgtccaccttagcaagaggcatccttctccctcacagcatccgttgctacccttggagcacccatccttcacagcatccgttggaacttggttagttatctgggtgtttctctctcccgagcagcaggaggaggccagcgttgggggagtggtggggcctgtgccggtatttgtgaatgataagatggttctttagccagagactggtttcccattctcttgtttggtattctttgtgtagctaaggtttggttgatagaaccctcctcctttgctggttctagtgacctgtccgcagtaagttgctgctcttgccggaactcaccaactatctcctatgtgtttaggacttggcatctctcataatataggagaatgaggttctgcaggtgtccggagcaggatcctgggtaggaagagacccagttgctgcctcttcaggggcatccccatgagccactggagatttaggttacaagggagcctacaatgtccggtccaggagaccctagtggaatgtgcctatctggctgtctgcaggtctctgaggggttggaatgcggcctgggctgcaggcttcctcttccctcctgctgttttccctaggctgcctccgtgctggaatgtcggcagcctgggaaggttcttggtaaggacctcttccagtctcagcaacaaattccagctggggcctggggacagctcccacatgggtacggaggcccccagagagggcaacaggagcaccaggcctgtgggaactgctatactcttggatctcaggctggtagactttcagccctgacaagccgatctggagatctctccttcccttggccaggtcccgaggaacctgaactgaagaagtcaggagtggaaagaggaagccagaggagagaggaggctggccctttcccacaaggccttgccttgtccagccctgacatgaaacaggaaggggagtagcctcagattccatcctcaggtggggcctgcctaccagcaccaggttctctgtcccactgccccccctcacagcaggaggtgactctcctgagtttgtcaaccatatctgtctgctcaacatttccagggcctggttcctttcttggtgacctttgcagctcctgtgccctttgtcccctgatctcatttcttctccctcccattcccatttctgtaaggagctgactcacttcctcctctaacgccacttcactgccaggccctgtggcaaacagggtgtatgtggggagggagatctcacccaggccacagcagtgggtcttggaggccatcctaggcgctggaggagggggtggggaggagagatggctgcaggccacagggaaccccccagccattgtgcagtctggacaggcgtcagggagcacctgcttgggccacactgtgtttggggaggagactgacagtcctatgaggaaggaggccgtgctttcagtagaactataggctcccatagaaagctagctctcagccctgggtggcatgggctagaggccaagtggtgacagcactgtcaggcagcttgagaacgtcatgaccctttgtgacacccagtctcatgcacagacccatcacattgaatggacagtatttggaggtttaaatagaaccttctagaggcccagcaagaaacaaaggtttgatattgtctcctgtgtaggttcttgccggtggagcgctgcctcctgcctccctctttaatgaactggcttgattgtagaattgacggcagaagcccagtcccggctggcgttgtcttctgcctcgctcccttgggctctccaggctgtaacagcctaaagctcaacactccaggctctggaggggacccagctcatgcggagcctggcatacatagcctttcatccttctgagaagatgcctcagttacctagggtgaacacaggcggggaccaagtccccactcatttgggcatgtattgaggttaaaaagaaaagaagtaaccgggcgtggtggcgcatgcctttaatcccagcactcgggaggcagaggcaggtggatttctgagtttgaggccagcctggtttacaaagtgagttccaggacagccagggctatatagagaaaccctgtctcgaaaaaccaaaaaaagaaaagaaaagaaaagaagagaaaagaagagaaaagaagtgggaattggaaagatggctcagtgggtaaacggatagaggactttagttttgatcagtgtaagtacataaaaagccacatgtatagcatatgcctataattctaaccctgggaggcacagacaggaggatcatggagtcttagcactagccagccagactaactcctcagcgagcaccagtttcagtgataaaccctgatgaaaagaagaactgggctggagagctggctcagcggtgaagaggttacagctcttgcagaggacctgggcttggtttctagcatctcacacaagcttacaaccactgtaaccccaattccaggagacctagtgccctcctccggcctccatgagcagcaggcacacatgtagtgcacatacaaatgtggagacaaaacacaaatacacatgaaattaaaacaaaataaatctttaaaaaaattttataaaagaaataaaaggcagaaaaatgatagaggaagatgcctcacgccagcctctggcctgcacacacaggcaaacacatacacacacaaacgtgcatacaccacacatacatgcagagagtaaggagaagggatagatatcaagagggaaactgggctatggtgtttgagacagggtgtgctgggggtagggtgggggtggggatgggcgcacactgctgtggtctgccttcctggaatccagtgaacagcaaacagccctgttccccacagcactgatctgtgcctggcactgtcccatgtactgtggcctcgagtctgacctcaggacttcgggatgacaggagtttcttgtttaggttgtggggactggagaaagtgaggggtgccagcctgatccccacctgaaatgcccgttccctagctggtgggagcaaagcacactgcacaggcacatggagacccctcagtgttagcttagacacttttgctagctcatgctccactagattctggcaggactctagtgtgagaatgacctagggactgcccctgtaacccttgcagaggacctgggcttggtttctagcatctcacacaagcttacaaccactgtaaccccaattccaggagacctagtgccctcctccggcctccatgagcagcaggcacacatgtagtgcacatacaaatgtggagacaaaacacgaatacacatgtggaaaatgtttttgctcttagcctccagtacttccttcagcatggcttcagagcagaggagggggtcccagagaaggcagggctgagtgtttccacttcactcagctggctgagttttcttccactgttggtgtctcttctctgccattggaagagggatcttgctgcgtgtggcgtacatctgtaatctatcatatcacttgggagttggaggcaaaagaatcaggagttcaagtttagcatcagctacatagcaactttgaggtcagcctgggctacataagaccttgcttcaaaaaacaaacaagcacaaagacaactaaaaacaaaaacaaaaggctggaggggaaagatgactcagtggttaagaatacttgttctggccgggcagtggtggcacatgcctttaatcccagtacttgggaggcagaggcaggtggatttctgagttcaaggccagcctggtccaggacagccagggctacatagagaaaccctgtcttgaaaaaccaaaagaaagaaagaaagaaaaaaaagaatacttgttctggagctggagagatgactcagagcattgactgctcttccagaggtcctgagttcaattcccagcaaccacatggtagatcacaaccatctgtaatgagatctgatgcccttttctggtgtatctgaagacagcaacagagtactcatatacataaaagtaataaaaacttctgaaaaacccagaacccttgttctagcaaaggatcagagttcgtttcctgtgatggtcttatgatggctcacatctataactccaattccagggatgctaacaccctcttctgacctcatacatctatacagacaagacactcatatacataagaaaattaaaaagaaatttaaaagtgctcaacttattaaaagagtaagaatgggggaggggtaaactaatctgtactgggttctctttttgtcccacccattttctttttttctttttttttttttttaaagatttatttacttattatatgtaactacactgtagctgtcttccaacactccagaagagggcgtcagatcttgttacagatggttgtgagccaccatgtggttgctgggatttgaactccagaccttcggaagagcagtcgggtgctcttacccactgagccatctcaccagcccccacccattttcaaaactcccctgcctgcagcttgtactgctgccttagaagcagatgtgtgcgtatagggattggtgaggggctggttctgtctgtaggagccgctcccagctcatctgggacaagaagaggaaggcagctcagagggaagggctcagacatcaggactgatgtatggctttggtaacattttgggtgatgtgtggctttcggctggcttgcctccggctgagtgaccttgggcagattctttcatctctctgggccttatttccctctgctataaaacaagagtaataatggtgcttataagtgttgtgagggctgacagacatagtgcatttaaaatcactttgaatagcgcctcaaaaactattaaagtggttcccatcacctcaaagggtaatagacctaaagtggatgcccaacacctacatatactatgtcctgtacatgggtatttacggtaaattttaattcataaattaagtacagtaagaggttaacagtaacagcaagataaaataatcctaaccgaacattgtaataaagcttacaaatgtccacatgccgtgatcaataccaggaatcccaccacttagggagtggaggaggagaaacaggaattcaagatcaccttgaattacatagcaaatttgatgccagcctgggctacatgagaccctgtattaaaacaaaacaaaagaaaagaaaaacaaaacaaaatcatcaaatgagaaacctgatgaatcctttgtttctagaatttgccattaagttgttttggactgcagttgactgtggctaactgaaactgtagcaggtgggaccaggactgtggggatgactgtggggatgacgatcattcggggctccagagagagagcagcaccctcgtcaatccacttctgaaccccaggaagtgcttggtgtctggagtgagaccatctgtgtgcagaagtgctgcaggctctgttccagttaaggacgcagctgcgtgttctttgctcgtgtcctcggggtagtgccttttcccacagtgtccttccagtggagctggggaagcagcctgagcttcctcagggtccctctgagcatggacagcttgccctgagctccagcctgctctttatagtttcactcccgctcttcaaaccgtgctgagttttctctgtctgtctgggaccagtgcctttgagctccaggtcttctgtttgttttccagttgataagcttactctgctctttgttgtcaactgtcttcatgcctgtcttgctcccagcagccatctccagtaaggctaagcaagaagagaggcgcaggatttaaaggcagctctcacctgctatctcctggtgtcatccttaccacacacaggagtttgtgcagactcttctgtggatttccctgagaaaatttccaggccctgtggtaggatgtgctaccagtcagacccgctcagtggtctcactcttctatgtaaccaggcttagtagggcttgtctgcgtcactgcagcaggtacccagagtccgttgtcctcaccctcattttgtcccatgaggctgtctagagggagatgtccagtttggccgtcagtaccccatggccgaagtcctggccagccagggacaaggtgacttcattgactttatttgcccttgaaatgaaccttgaaggttttgcttaggcccctttctgggagtcctgcagccagtgctctggtgggaaaccctcaggccgctacattccagacatcttacccagtgctggcccgaggactgtggaaacaagggcggattgtgctgggctgaggggctttctcccaagccggggcgccttggggtggaggctggctttccttcagtctccttccagccctgtggcatctggcttctgctcattggctggatgctaattgtgactgctctctctcccccatttctttttgaggcccagggaacaagactccacacatgggacaagggtgtaagcagactgtgggcaggggcgggggaggacagcagcaagtcagggacaccctctgaaggacgcttggccaagagtgaccttaagcagcctggagggggacctcctgggccagaactgaccaacagaacacactgcaaaatagaaatgtcctgtggtcacgtggcctctgaacacttggaacctggcttgtgcaacagagaagcagaactttacattttacttgattttaatttaatacaaaatatccctggtatttttaatgtaacttaaatttaaattgctttcgtggccagtggctactgtgtggaacactacagctccagatggctcctagaagtgtggggtgggggcggggaagcagttcttacttcttatctccttctgcagagagctccccccacccgcctccccaggctgagcctggtggcatttctccttcctgtcaggaaggaaggtttgttctctggcaatttccccacttcaccaactctggaatcctgatgccctagagacaagaggtccctggcaatgtgccaccacactatggcagtatttccccgccttgccaaatgcgactcttgcccagcttggtaacacacaggtgctcacaagcccagtgggtttggcgggctctgcacgtgggggtgggggcggagaccaggtaggcaaagcagaaacctcttcctgcttctgtggggactgggctggctttgttgttacttcaaagggttctagaaacaggcccaggaaggtcctcaagaagtgagcacacagatcttcaaatacaggatctgtgtgcccccctaccccccgcctctgtttaggggaacctgagagtgcctgaaggagcctctctgcctttaagaatgaggatgccagctttcacaccctggaagaccttccttgggctttattaaatcagtgtggccagcccttaagctggttttcctttattcttctgtggaaatagagaaaagcggtcgtttatatgaaaagaacacagtgcttcattgtgcttgttctcgaatgtcagccagacaggatgggatgtgaatatagtgaatgcggtgtaattagtagactcagacccaagtctccctgagatttgaggcagagcctggtgaaaccgtcaagacaggtcctgggctttgggccttgtggaaaattggaaaggcagaggcagtttggaaatccccagagccagaggaaatccccagggactgagaatccccaaagagaaacggtacccccggagccaccaatcaggtagtctttctatgtatccaggatctgacggtttagtttttgggggtagacacctgttcttgtagagcagaaaaaaatggtgcgctcgtacacagggttctgagcaaacctttggatgtgtaaaactgcagtctggtggaatggagggccggagtggccgatccttgagtctttgggacagagatctgtgactgccctccctatgcccactgactccacttactgcttgtctgaggccgctcgccactataaaactcaagacgtggcttaaatctttgaactataaactcaggtattcattcattcacttttccatcagtaaacacttagtaaacatctacgtgttggtgctatttcaggtacaaaggataagttagtaatgaaaaaaaatataggcgcccagcgcatttttgcacctccattgccatctctctcctgggtaaagtgagaggccatcttgctgctgcagcccccctgaagcctcagctccccaggacgctttctgggggcgggtccaccagaggtgaaatctgcagccttggctgtgccagcaggtccatgagaaggggaaggctgccctctgccggaaaatctggggacactgcagggcggagtggctcttgagttcctagcgcatgcgctgaacctggctccacccatgcgctggcggctaggcggaacaggaagtgcagtgatagtcaggtctgaggccgatttggccactacggctgcccgtgtgtggacttttcggacagtacaggtttccacttaccagccctcaccctcttgaggtcatctctcggcttctttaaggagtttggctgcttccctttcagtatctcttgatcacttagtgtcattaaaatatggagacacccctgctaaagcgttttctgtaaatgctgtgtttaaagctgctgttgaggaacctcagccgtcctctgatggggtgcacctgtcacgattggtggctggcgctcccctacccaggaagcagaagttctgtggtctctcccaagtccttagggctgagtgcttgaaacagggctccctaaacttccctaaacaacaagttccatttgttttattaggtactgtaaattagtaatacaaacatgtcgttggtactcatttatgaaaagagtgtcagtagattctttttgtaactatttttattttatgtgcattggtattttacttgcatgtatgtctgtgtgagggcaccagatcccatggaactggagttaaagatggttgtgaactaccatgtggatgctgagaattgaacctgggtcctctggaggagcagtcagcgttcctaactgctgagccgtgttgcaaccctatagactctttcacatttacttactgttatttgtatgtgtgtgttaagcatgaacatgctacagcacacatgaatgagagtttgtggattcgcttctctccgtcttgtggattctgggatcaaactcagattgtccaacgtggtggcaagtacctttacccactgagccatctcagcctgatggactgagcacacacacacacacacacacaaatgctatttatttgtttaaagacagggactcactgtgtatctctgcctggtctggaactcactctgtagaccagaccggcctggaacctgcctctgcctcctgagtgcaggaactaaagtcgtgggccaacatgcccaactaaacgtgtgtgtgtgtgtgtgtgtgtgtgtgtgtgtgtgtgtgtgtgtgtggtgtatgcacatatatatgtatatacatatatatttatttacaagatcttcaggaggaacgagggacagctggagcaggggaacatgctctccttaaagttttaaggagaacctcagttttagtgtttccaccctatgtattttctgataaacctactatgtgtaataacagcacttgtgggctggtgagatggctcagtgggtaagagcacccgactgctcttccgaaggtccagagttcaaatcccagcaaccacatggtggctcacagccatccataatgagatctgactccctcttctggagtgtctgaagacagctacagtgtacttacatataatcaataaataaatctttaaaaaaaaaataacagcacttgtgtgtctgagtaaggtcactgtgagttggaggccagcctggagtactattatagtgagaccctgtcccccagataaatagacgaaaaacaaataaagcccctctctttttatggatgaataaaaaataaataaataaacccccctctctttcatggcctggctccaaactgcaccctgtgtggctgacccctcaccaagagaagttctcaccctctgagccttcccagagcttccttgtgcccgtgctggaggagcgcactcgtacttcagttatgactgttggggtgtatttgttctttcctctgctggtcatgttttttggggaggggaagtcagaagctaagtcactgccactcacccatccttgtatgtgcctcgtctctaagcagagtccaggagtgggcgagtgataggttaccataacaaacattctacccatgcctgctcaaaggacagttctccagagatggaaaagaaccagactgtgtttccccatagcattccccgtgggatgttacacatgtagcactactagctgcagggccagcttcccccgcctcctccaacttcccatctggcttcccatggctctactcagctctctacagggccaaggacctctcacctcatcgattgaacagcacagcaatgcagagcactaaagttttggccccctgtggatatcctctttcccattccatccagcttattactgtaccttctagatgagttgggtaaatccagtggcttgctgaatacctactgtgtgcttggtgttagagagtaggatagctttgagtaagtctttcaggaagatataaaattaagtatgcccccagcaccaataaccagaagagtgacttattcaagtttgtgtatatgtatgtgtgtctaatgctgtgctggatcttaaacacagggcttcaagcacactaggcaagcactctaccactgagcaacaaccttccaaattaattttgatgagtaaaactgaatttattaggggttacttacagagtgatggacatgggacagatggacacagttttcttgaggtcaccactctgtccccagcatcaaggtcctactttatgtggctccagtctgcaatgtaattgttgtaaacctgggctctgagtgctgcccagtgtttatcttcagggccagacaacaaaaaggcacaggtcagggaaagctgtatgcttgtgtgtattccctgttccctcatcagggtttctgaccatctcaaccatcacctagctgtctagctgtgggtacatggcgtgatttgctgtatgcagcctgccatgtagagcaactagacagcagcttgcatgcaaggtggagttgactgtggctagaggaccagtctccacagatggcaaatgaaggaggcgaaagtggtcctgatggcttagacacatgacaagaactgatggccattcagaacactgacttaggctctgtagtcaaggcgtacacacaataaacttcagtgagttcaactgcgtgtttgcgtaagaaattacattggcctaagattactgaaaatagtatttggttattattatatgttgtgcacactgtgcactgtgcttccacggagagagattgtatagaatggtacagaggtttccccctcatccacgggagttgtgtttcaagatccatagtaaatgccccaaagctttgcatacctatggtaaagtttaatttatgaattaggcacagtaagagattaacagtaagtaatgaagtagcagcaataataacaatatggtgtggttaaaggctacataaatatcaactctctcagagagtcttactgtgttctcacctgtaggaaggacttttgagtttctctctggcatgtctgagtttctggccacaccactccccctctaggggcaggatttatgtatttaacaggctggcgattgaatccagggctttaagcatactagaacaagtgttctctcactgagctaccttctcatctctgagggcattattaagtagaattatattaagtagaattattgttccttgaacacagccccaggatcctgtgatagtccgcctcataaccagcatggctactcagtgacttctggacagatggcattcatggcacaaattcttgtctaggaaagagtgggatgatgggaaacttcatcgtgctactcagaattacgtgtagtttaaaacgtataaaacctttatgtctggggccgtctaatattttcaaactggggttgacctcaggtagctgaaagtgtgggccatgaaactgtgcggagagggattgctatagacgcagaaccacgtggactatatccttgctgaacaattttaggggttttaggagatttatttattcttgtttgggtgcatgttgggtccatggaggccagaaaaagggattggatccctggaactagagttacaggtggttgtgagctgccatgtgggtgctgggagtcacacccaggtcctctggaagaagagctactcttaaccactgagccatctgtccagctcctgagcctgagtctttccttgggtgctgggatctacctcaggtcctcatgttaatacaacacgtactttactctatgccatctctccattcttgcttattattttttttagatttatgtattatgtattttttatttcttttagacagggtctcattgtgtagctcctggaactcactatgtaggctaggctcccctcaagctcatagagaactatttctttctttctctctctctctctctccccccctctctccctctctcttgctctctctccctccctccctcccttcctttcaatatttagagtgggggggggtggtcacaccagaatagggcgtcagatttctttgccggtggttgtgagctaccatgtggttgtcctgggatttgaactcagaaccttcggaagagcagtcagtgctcttacccgctaagccatctggccagtccccttgttttagtttttccaggcagagtttctctgtctagctctggccgtcctggaactttccctatagaccaggctagccttgaactcagaaatccatctgcctctgcctcccaagttctggagataaaggtatgaaccaccactgcctggcttctattcttatttatttatttatttatttagtcacagggcaactttattgagtagtagcatggtcatacccaacaaacatgttccctctcattctctctctctctctctctctctctctctgttccctctcattctctctctctctctctctctctctctctctctctctctctctctctcacacacacacacacaaagtctctctctctctctctctctcacagcccttgccacagtccagttctcagccacagggtggggagcctcccggattattcggatccagaagcaacaggtgcccgagggaggctcagagggaggaagtggggagggggtgcagagagcaggggtgggatgggttgggaacacccaccagacagctacacgaagagtgagattccctgccctggtggcttcagcttggctgcgcccccttctattagccctggctgtcccagaactcactatgttgatgaagctggtctcaaattcacagcaatctacctatttctgcttcctgtatactaggattaaaggcatgcaccaccatgcccggctgcagtcagtgctcttaaccactgagtcaactctgcagtcccaagcagtggttctcagactgtaatgtgtatcagaattactagaagcctggctaagcctcaatgctgggccccagcactctggatgcagaggctggagtgagtgaggctttagcatgccagtgcccacttgatgtggatgctgtaggttcagggaccaaactttgagaactaaatcttttctagcccgtccttgcctcttattgactgggaagaaacagaataagcataatcttcaatgtagagatgcggggaattaaagtcacctgcccatggctacacagacacccacccacccatccaacagttgggcacattactactaggctttatatctgcctcagtagccttggcttaagccagaatcaccaggagcctggtttggaggacacacacctgtaatcccagcttcaagagcctgagacagtagggatctcaagttcaaagccagcctaagctgcttagccagattctctctctctctctctctctctccccccccccccccccagagacagggtttctctgtatagccctggctgtcctggaactcactctgtagaccaggctgacctcgaactcctgcctctgcctcccaagtgctgggattaaagacatgtgccaccactgcccagattctctctctctctcaaacaaaacaaaacaacaacaaagaaacatactaagcatggtggtgtaagcctataatcgcagcatttgggagactgaggcaggaggattaattgagggtttgaagtgacctgggatatataatgagtttcaagtcaacctgggccataaagtgggactgcttcacaaaataccaaaagcaggggctggagagagggctcaggacctgggtttggttctcagcacccatgtgatggcttgcaactatctacagctcctgctctaggagatctgacaccctcttctgacttccttgggcatcaggcacacatgagatgtacacacacacacaaacacaaataaaacactcatacacattaaaaacaaaacggacaccatctggagtgttttagaaatcccagtgctcagggctccttcccccaccaattaaaccagagactgagagggggagacgggaaggtctaggcactacatcctatattaaagcctgaattctgaagcattcaaggcttcagtgagcattgctgtgctcagaggaacccggggatacagaacctttgacagctgcattgtcccaggaggacccggggaccccctaggaagaagcaccacttccctagaaagcaagaagtatgtttcctgatagcctgtccatgtgtgtgcatatgtgtgtgggatggtgagactgggtgacctgttacagtgtcatgcggaaaggtcagacctggcagtagtggtgcacacctttgatactagcacttgtaaggcagaagcaggaagatcactgagttcaaggccagcctggtctacagtgcaagttccgggacatccaggggtctacagagaaattctgtctgcaaacaaaaaaaaggtaggagagctgggtttggtccttttgggcagtacttatcattctctttctggagcatacagtagctacaggaccacgggtacttagaactgaccgtgggtgatgagcttgggtttttccaatccctccctccctggaaaggaagaaggaagcaacgattgtctccattttccacagacacttggcaggccctgtctttcccctcattgctgtcttttcctcagcacccatctcagcctccatctcagcctccagggtatctggtcttgttaactagagccaggcaggagtttctaacaaggaacacaagttcttcactgatgaccgaccgttgttcatgggccccgcacccccagttccctatgtttgcagggctgggagctccccacccctccccacccttccccacccaccacactctcctctgcctatgcagcagctggctggtgtgtgggagaaggagatgtggatggagggagagcaaatgattctctgcacgtctcccaagcgtctattctaaccgaggcagcagcaggaggcctcactcaggctgaacttgtggggtctctgctcttgctgggccttacaggactgctgtgaggttgctaaccgggcctagtgtgggtgggcccccgtatgtcatattgaatgcagtgttagtgtctctatacagttacttagatgccatagttaggcgtatgattgaagtgttctcgagtacactgtgctgtgattgagttcatgcacgcatgctggtatgtgtgtgtatataaacgcgcatgtgctagtctcaatcttggcctgtggggccgggggctgcaggtctcaaattcctttgctatttttaggggccatatcagctcagctgtccaggaggctgagtgtgtcagaaggaaagtgccacccttcctgtctcctgtccctaaccccaggacactctctatccccaacctatgtccttatttgaagagcctcctttcccttctacccagaccccattgctccctggctgtggacctacctggtgcccgcagtcctctagcctctgctgtctgcacagctctggcagggttgggcagctgcagcgggaggggcctaggagagggaggggaccggggcggggctgcagcctgtgctattctgagctgctaacgggagcagcagagagaggagactccttgttctgggctgctccaggccaagccatgctggtgagtgtccttctgaccccaaccccggaaatgtcccggcctccccacgatgtttcctcatttaggaaaggaaggcgtcctgttatttccccagatgtggcagaagtaggtggagaggaaggggtggggctgccttggggctcctctctctcagtcacttggttgaaagagcagtacatggccccagctgcctcagagcccctacgaggcaaggcacatacatactgggtctgactcatgatttggggagctttgatggggaaccatcttctaaacctcagtttcctggggctgcctccaccaccccacagactgaggcatgcctttcccacagtgatgacggcctggctttcatttcttcagagcctaggaacccaggcatgtctttggagaatttggtcctgctttgggctgctatggtagccccctctgccctcttactctggactagatgggaaagatggccttgacaggggatggtccttgtggttggctggaatcttcttactgtcctcaagaagtacccagcatggcctcttccattcccacggccaggatacttagaaaagatacacagggcatcctagagatgccgtctgtgagcctctttatcttaacttaaagaagattttttatctttattcatttgtgtgtgtgtgtgtgtgtgtgtgtgtgcgcacacgcatgtgcaccttggcttgtgtgtggagggtagaggacaacttgtgggagttagttctttcctcccaccagtgagttctgaggaccaaactcaggtcctcaggatttagcaacaagatcttaacccactccagcaccctgccagcccatgactctcttttagcaaattattccagagaagtaagttccttaaaaaagcaagtgaggagagacatagctgcctcccagaccgtcctgtcctcctctctgcccctccagccactaagggtaaggttttcaattgagtcagcagttggcagagtgtgagctggcccagtgtggaggcgtatcagaagcctgagatatgcccatagcacttgtatctccctgtgcccgaagaactgccctgtcccagctgccagactggcaccgccatggaggtgtgtgggggcagagcagggtggtgccagtgggagggaactcttcactctggaaactgggtgcttcctgctccagcctactccccaacccaccctgcaccttgtctgtcacagactcagggccatgggaaatggcactagcagatggcaaagtgccctgtagaggagccttgggtgtcctcagaaaggggagacctccagcggcctgtctgtctgtccgaggaaaccctggcctttctgcaactgctgtggtgacaggaagctgtcccatggcacctgcttcctccaggcgggtaggcagtggcccagggttctctgctgctttctgttccgccctgctgtgggggagggctccgctagaggctggctccgagagagggccacctcttcttcctttcttcctttggctggcagtgtggccttcaggcccttccctgcagaactcccctttccaagcagctttgtagagtggtcatgagtggagagccatggaagctactgctttccacccaagctgttgctccagccactgatgtggaaggcccacggtataggtgaacaagggcggtatgggggagagctgaccacgttcctttaaagtaagccctaaagggttgttagaggacaggtctgagtgtgcattttagatctgtcacttgctgttgtgaggctgtagcaaaatcgcgtgatctcctgggtcttcctttgctcatctgtgaagcaagactcatgctggtgtctacttcagagggatgttgtgagcatcagatgggacagtgcttgttaggggctgagcatagcacctcgcaccacaaagatgctcaataaagatgtactgttggctggacctgctgctcagtggcaggtggcttgtctagcatggtgaggccctgggtttgattcccagcactgcaaagaagtcactgccattgctgctattctttcttcccttccctgctcctcagatgagtgggtgctggggtgagatcatcaaggggagattctcttgagagctcccttgtgtgccttggaatggggatgaagaggggagagcattgccaatgttgttggcacaaggcaacaggctggacacttacctctgccactgatgccattttgattgcctcgagacacagtctctgtattggagttacttgctgctcttgggacttggatgtctggcttagacacgtaacacttaacagcatccgtccaggctgggcattcctgggctgcccagtgggtatgattatcctcagggtctttgaacgcccctatttccttcttttcctgttttcctttcttcctttcttcctttcttcctttcttcctttcttccttccttccttccttccttccttccttccttccttccttccttccttcctctctctctctctctctctctctctctcccttccttccttccttccttcctccctccctccctccctccctctctctctcactctctctctctctttctccctccctccctctctctctttctctctctttcttttttttctttctttctgagatttatgtttatatgcattggcattttgactgcgtggatacctgtgtgagaccgccacatcctctggagtgggagctacagacagttgtgagccaccatgtgggtgctgagaattgaaactaggtcctctggagagcagccagcgcttttaaccgctgaaccatctctccagccctggtctctcctttccttaacacagtgtcttgtggtggctaagggagggttgtgggtgttgacacagggagagggtaaaccccccaccttgtctccctgagtaacaggcgactttggggcagagggtagacagtgcctcagcagatttctcctctttggaaacaaaggcttctagctattattatctcctttccttctcccccttttattgactatttagccatctttacaataaaaacaagcagtaagtaacgactgcacagcaaaataaatagcaagtatgtctattgtgtttaatttacaacatttacaaaattattatgatcaccatttgcatgctatttatgttctcgttctttttgattgatgtcattttgtgtggaattttccatatggtttcattgtccacatctttgtctttgtaaatggcagcatacccatgtgttaggctaacgacattgtttccctaaccagctcttattccagtcccttgggctgtttgcagtttgactgtcccgtggagtgcatctctgaaaaagtgcttgcaggagcttgtgggttttcttttcctctttgtttcttgacgtcagctcatttgggcatccattcctacagatgggctggctaggccagagaggatgcatatccctgccttccctcaccctggtctcccggccctgagtttgctatctatttatctttgctaagtttgggagtcacacctttcttgtttgtgtcacatctctgagaatcaggatggacaagccttattctctgcagtgtgtttgggggaaagggatcagatgggatgagctttgggccaagaaccctgcctcctctcgcatttcttccattgttatatgactgtcaacttgtcaaagccgaatggtatgatgggtaagagagagtcctggccaggaggaaatcccagtcagagttaccaagacccctcctgcttagcggtggtggtgcacgcctttaatcccagcacttgggaggcagaggcaggccgatttctgagttcgaggccagcctagtctacaaagtgagttccaggatagccagggctacacagagaaaccctgtctcgaaaaacaacaacaacaaaagacccctcctggctgcgaatgccaactcttccccttaactgaggagccactcagcagctctccctctgtccttctctgtaagcctgtggggggggggggagtgcggggctgttggctgtgaggagggggaggggtgaaatggcttaggggagtgatcaggggcacgatttcctttccattcttccaagggaggaaagtggttagaagtgacacggagagagagatggcaaggtctcagaaggtgttggggacatactggagtctcccttttgtaaattcagaaactcagcttggaaagattggatgcctatgcagccacactgccagctgtgccttggcttgagccagatctcctggggctcacacggaggaagagaagctggtgagggaggcagtatagactttggagttggactgactttagatcaaacccaagctccatttgggagttagaggcaggaagatcaagagtccatggacatctttggctgcacattgaattgaggcaggtataggcaatatgagatcctgcctcaaaacaaaacaaaacaaaaaacaaaagtcccacaaaagaagaaaatctaagccccatcatatatcatctatgtgatataatagctttcagaattcttttttctcatcagcaaaataaaataatgattccatgtcagaagattacattagaaaatctggggttagctgggtatggtgtacatacgtgtaatttcagcacccaggagggctaaggcaaggcgatctcagcaaggcaaacctggtctatatagtgaattctaggccaacctgggctacaaagcaattctctgtctcaaaagaaaaaataaatgataaaataaattaggctgatgactcattaagtagatgctgtataagcataagaactgagtttggattccaagaactcatatgaaaaagcctgagtgtggcaggcaatgtgtacctgtaacccaccactggagagtggagacagatggaggcccaggagtcgtcagccagctagactagttggaaaagtgagctctggctccattggcagactctgcctcaaacagttttaaatggaagggctggggagttggctcagtggctcaggcagtgcttcctagcctgacagcctgagggagctccacaggattcacgtggttggagagaacagagtctgccagttgtcctctgatcttacatgcactcacacacacacacacacacacacacacacacacacacacacaaataagtgaatggaagactgaatggatggatgaggaaggatgaatagataattagggaaatgtatgttaaataccttgtatagagtccatttaaatgtaggcattccttactcagtagttaatgctggaaatggctgaagttactagagcagaaatatccagtctgggacaagagtcctctctgggagcccttgatccacagcaagtctctagctctgggagaaacctgttttcacatctggagtcacggcttcagaggcactgccatcagccctggggctggagttccttctctgctccatattggatatagttggcctgctcctggtcctaaacagctgaaggaaagagaggagagattcaggcggttctcccccaggcacagaggcagcaacttcctctggggagatctccacatgctatcagagggctagtccctggagtagctagtgtggaggagtgaaccagatgtctagtggccagtgtccttctgggtcatacgggacctccctggacaagtgccgaaatgtagacatgaattcaaggccaaatgagtcagttaaacttaaaacctgtagcatactgactggatagtaagacagaattctgccaacatagccgattaaaaatagggctagcgtgtagctcataggtggagcccttgccttgtgtgtgtgaggcccggggttccatccccagcacttcaaaacaaaactaatttctaaccatttatttatcactatcagctataggagcaaaccggatcgttcattctatagaatctaagtaactctttggagaagctcccctgggcaagggcagatttctggtgctgaggacctgcagagaggaaagctaaaattccacaggcctctcactcctgccaggccacgtgggttgcaggtggaaggcaggggtgctggggtccccaggcggcttgcttggtctcctggagaatcaagggagtggctctccatccccctccctgactccttcagttctgggtctggaggtgactttattcattatctagaccagtctagttcctaattctccaggcgggcccagaggggtaaagtagcttatttgaggacacacagcttcccagtttagacgttctccgtccgacacccaccttgcctccgtcttcttcccacagtttatttctcagtccttccacgccctgagttttgggatcctccttctagcctcctttcctcttgtcacccacagcattcatcccagcgggtcctggcctttgggaagactctgcacccctgagagatcccgcccctctttcttctctgactcagggtacaggggtacaggctgccccccagcaccatggccttttcaacgcggtttgccttctgggagcaaaaggaaagttggatttcaaaatcttggttctctgatgtgctcagcatggtgaagctacagagggattgggcatgcgtgtgtatttgggggtgcagggagaatgaccagtgtggcttgggagcccttttctgtcttgatggcttctgtgctgagtcactcccctccctgagctccacctctggtaagctgagcggccttttgtgctactgctgcctctccaagctaatccctccacacccttccacagcctgcagctcagcctcacccccgggactgtggggttctggggaaggctcggtgatgcctgtggagcccagagtctggggaatgaggtgggtagaagaaaggagctgctagtggggatgtcaggccagttggcagctagctccagagagtaatccaggctgtggcagacttgggcacgcctttgtgcacatgcacagtctctggctggacaatgacctacacagccagaagctttagggaggtggggagggcgtgagtcagcctgaagctaaatccagagctgagctcatacctgagcctagtgtcccaggcactttggggggcaaccagtattcccaatgcctcacctaggacagccatttgggtccccagacacaggctactggagaaaggacggatttggagctggtgagggactccgagtgaacttagaatctgggccatatgcgaagccaaactaactgcactgtgtgctttaatgagagtgtctgtgctttgggaatacttaatatgctctaacctgtgtgcctaggggctaatgcatggtgtgatccccatggggagggatggtggcccttgctgaggaggacggcaggtacagacctagccaccctgcatttttgtacggaccctccccctccccttctctgcacagaccccagcttctgaagtaagaaggtttcctcttcgagtctttgccatcttcccttgccttgcccatgtcaatgagaactaactgaaccctagacccattgaatatgcatcgtagacaagatgtggcttcaatactgcagtggccaccatgctggacagtgtccaggcactgctaattggagctcaaaattgaccatggaccttggttgaaaatgaacagccccacttctctattagataattgattctggatgttgctaagaatatcttccattagaagtcaaatcttcttcctgggctcctgtcttcctactctgcaggaaagaaaggcatgctgaggctgtcgtggggttgcctgggcaaggaagggacgttaagtctcctggggctgcctgcatttaggaggcagaggtgctagaagagtgggctcttttgactctggggcccagccccttggagtccattcccagcttgactttgcactggaagagccctcagagtgtccacatcaccagtcctttcccagacagtgacagcgcctgctgtttcccctgactgcaccttctgtctgactcaggctgctggctccgactgtagcacaaacccccaccccagccagggatctctctcccctacacatcttaccttactttggcgttccttgccccatctgcatggatggcaattctgtgaccctgagatcatgatgtggtggacctctgccagccccagtgggctgtgggctggctactgagccccgagcatcctgggattttactttcatagagactcttaattcttacaacactgtctctgggcagcttcaatctcagaaatagagatgtcttgctcagacctctgaacccaaccccagtcccgctctgcttcccaaggagagaaggcccctagaccttttctcccagctttgacctgccagtgacttctctgtctgctccctcaggttaaagaggaggacaaaggtgtgccaaaacccggccctccaggcaaagaggaaggggctgtaagtgcttccctgagatgtgtgtgtgtgtgtgttgggttggccttgtcccatccagtgttgttggtgtggttagagggaaagtcagcagtggggtggaagatacagtgtgtagcaccactttgggtacagaaagggaagaggggagctaaggtgctttggggcccaccctctgttgcccaccccagcccctttagttgattactttcaggtttggttttctggacctttggggacaggcagtgtgggagcactctcaggtcagggagcacggaccaaatgaacgctcagctgttaggattctttagcctgcgctgggtggcccaagataaggacacagagagacagaggcattcaagacagctgctgctgacgcttccaccccacccctcagctgctctgtgcacaacctctgtgcccacagatgcccgatgtcgccataccctaccaccttgggacagagaccctgaataaagctgaactcttatagggtgagagggaagctatctcctgagcagtgtgtccaagagaagatgcaggacattttcaggatgggcaaactgtccttgctgtccctactcgcttagatgacattaggaacagtcttgtggctcccttggaaactgtaaacaatctcagaaggttaaggctaacctgcaatttctaagggatgtgtttgagacaggtggagctgcagagtagcccagattcttttcctttctatctaacatgtaaagtgcataggagagtgtctagtaagcaaaatacaatgtaggtgctagcaagtactattgtgccttcatctctacttgtgggggatgggaaggaagtcaggaataggatgggagaagggcctggcagttgggactatggccagttccacagtccccttcatgacacccaatactcttggcctaagaatctgaagaatagtcagcatgcagcattctctctctaccccctcagtagaacttccctagagccagaggcctggactcagccatgctcagaaggtgacgcaccctctgaatgtggcaggtttgtcatctgtgagtctgtaaacaggcatggcagccagactttcacagtggtgcgatctagaatcacggttgctctggggatcgaggactgagttatacagctcagggggtagcaagtcactgtctggtcagctcctggattgacctcgtctccaaccacaggcagtgtggttagctttgcaggaaactgccctgtcattagccagcgtggccctccttagtagcagcctcttgcctccccagacagttcctggctgagtgtcagggagggagtgggtaccctagatggagagtgccaacctacaccaggcaactcctgaatgcccagaggctggtagccacccagctgagccaggaccctgctccctgtggagtgtagcgtggcttcttaacactttgtgggcccaagttgccgtccttccctcattctacacaagccctctgggaggtaagagtctctaacccatgagacatttgcaggagggagacagtgccagcattgggcatctgcagcaactaagagtgtaggtgaaggggagacggtggccagcagccagaagaactgggttgggggaggagcttgactcaggaggagtaccttgtcaatttcttccttcagggtggtcagactgtgggtctgactgcctagagaacggagtgatgaggaggtaaggatggcgaaggcagggagccccaaggagattaccctccggatctactggctataagggaatggggtgcggtggattgggccttggttgctattctgacataaagacagtaattttaaggtgctcatgggcttgggggtcccttgtgttagtgttttcagtacccttcacaccttctggcggtagcagcagggtgatctatgagaaagagaagccaaggttttcgatgccgttgttctgtctagatgtctagactctagaaggtggagagaggagtactgggagagagaagggagcttttggatccgtgtgttgtttggtgggcgaatggaagataggttttggggcccgaggccacaccccctttcatcctgtgtgcatgacatgggtagggctgtggggttgctactcatgacctcatttatttatgtgactgtagccagaggccagctctaaggacggcagtgctccacctaggagtcctcagcctgccaccagcccggtaccctcagagacttcccagacagccaagagtcccgaacccacgctcactatgaacggcctaggggctgcctcagccgagggcccaaatgaagaggcccaaggcctgtcccggaagcgggtggcgaatgcagtgaggaaggtggtcagcaaagtactgcctggtgaggagcctgggactgccaaggagcctccaggccgaggagccaggtcccctgagcacccagcaagaggcaagaagggagaaaaggcagccactagtcccaagcccccaccaccacctcctcctcctcctgctccaccaaagccggaaacaaagaaggaggcagccaaggatgagctctctgtaggcctgcgcagtctgatgtctcggggccgaggcaaggaccacaagtcccgcggcaagcagcctcctgggaaaggggagaaggcccccagccaggagccagcctccactggaaaatcaggctctccagacatggtggactccccaaagaaagcaggatccccagccaagcctgagaccccaaataagcggtgctccccagccccagcacaagagctggctgacccaaacttggctggcccgaagttgaacccctctggaaaacagcaggccaagtcaccagcctctgacgtgcagcaggaggtaccagagtgtgccactaaccccctaggcccctcactactcttactgcagggcttagcaccctcacagtggcttcctcaagcctgaaggagccttgcatgatcaaagctggcccggggtgatgtgcccacccatggcatgggctgcatgactttcattaaccttgtgtcagagtgagcgatggcctggactctggcctgcttgctaaggtgggaactgcttaccagcatgctacaggcctttccatgagagccgaaaacctgagtcttagctgatgagctcagggtgcagacaggcatcttaagtcaggtgatccaggctcacatcctcagccacaccctctgggagacttctgcaaggttcatcaccaagggcctgtctgttgtcaagtggggagttataatgtaggtaatgtaggtccttagtcccttttgtgacgccttaagtactgggaatttagcagggcctggtggcgcacgcctttaatcccagcacttgggaggcagaagcaggccgatttctgagttcgaggccagcctggtctacaaagtgagttccaggacagccagggctacacagagaaaccctgcctcgaaaaaccaaaaaaaaaaaaaaaaaaaaaaaaaaagtactgggaatttgtcatttttatatcttggaatgatttatggcatacatacaagtagccacctgtaaccaccttgtgtgattgtgtccaaggcaaacccgtgaatagtctcacatcaggacgataaaagatcaatgtgtcttttgccaccagaataattgagaaaaatcttttgtttgggggactctttagagttttgaattacaaacaaggggtgatgcctgcgtccagtggtgactgtgctgattagacaagatgcaggtcaaacgccaagcttgctccctggcaccaggtacaccaggtacccaggatggtaggaccaatagtcatgctgccgacagtcactagtgccatcgccactttcttcaggcctggcctgaacatccaccctccttgggaagccctgtgcctgggtgccaggtaggcatagggagcccctttgtagccgcactatcctagcctcacaggtgttggctccctgtctggtcttgagttagagtttgttcttttcaagctcctccacctcgtgtgttctgctgaggtcccgtaggatgtgtgttgggagtgacaataactttcactccgcccccctgagcttttctcagctttccctaactttttcttgtagttaggggaggaataatgtgggtgccagggcacagcctgagggaccttagacactcactgtgtgcttcctcttggtagccgtctttcctggaagctgccttgcccccattcttcttgggtattgcaggatgtggaggaatgccaagtgccacccttccccaccctcctgtcctgctctgtcagggcagtgtgttcctatctcacagggaagagttggcaggggctttctggcatgatgatcagggtagcagctgaacttcggttccttggggaacctataagtagccagggagtgtcatgtgcctgccctgggctgtggctccttccagctctctgtaccttctttttgcactagggtggagttgggggctgagacatgtcttgacctggagttcatttcttgttcatcctgggacaagagtaaatggggtggtacaatagttagagccataggaagaggtaatcccaggtctctcacaggtacctacctgttcctttttcataccatagagtttcaaaactcaaactggcactcggcttgtctccctgaccctgctccacttctgcactgggttccagtggcttcctgggctaagagcttggcatgtggtgcccccactgtccccccaggccataactaatagtggcttaacctttagacaggagctgaccccgaggtccggttgagtcctgcagaggaggcacaccagcgacttgagaggatcttcacagcttctgtaatgccacctcccttgtgtgtagggttcccagtccctggccctattcttcccaaagctggtgactggacagtgtgttcgcgtgtgtgtgtgcgtgtgcgtgtgcatgtgtgtgatagcaggatactccatggctatctgtgagccctcacaatggctctttggttgaagaaaggaaagctgaactctatggaatattgatactgccgacagcccagggccctgtgaccacacaggggcgcttcatagctggggatcccatctccttctctagcccccccccgtctcctactttgaggatgctcattggtatgatggcctggcatctgacaaggcaggagtcagcgtctcacattttgatgccccgtgtctagacccctgtgaatattaacccttctcatttctaacaagcaatgtccaaggcttgcctggctcccatttctgccagcaaggctttggggggctttaagtaaccagaatgtagtgtaaaggtcaagtctgtctcaagggttgggcacttgacaggtagctagggttggagctgggaggcctctgcttgcagtggggtcactgtgcctgcccaggtgtagaactcggtgcaatgggggttggaatactgtgacttagatttaggctgtcagttcccttgtgttagctctgaaatgtagcctttggcatggggagtggcacctctgggtttgtgtctgtctggtagccatagagaaaatggtatcctagggggcagggggaaggcaggaggatggggctacaggccttgggtgttgtgagatggcctggcctaccaggagtgtgggagagcaagactaatccagggtagactgaatatccagtctaggtcagactggctggagacagagtgttggatgcctgtgtgccacaaggaatgacccacaagatccttccttctgtagggtctgatgataacaagaacctttcctttctcggtctgacctctcctgtctagccagcagcccaatcctgggcaagtgctcctgacttccaatctatatcaggaacagagtgctggctcatgcgtcttgggttgtcttctggaggggacctgtagtggtctctctacctgtcttcacctttttctctttctttctttgcttgctgctggcagctggaccccgaggccgcctctcctgcctacagccaggtagggtgctcctgccccacccaggagccctctgctttctccagtgacaacccaccacccccaccctgtacctgggctggcgtctgtgctcgggcctcctgctggagtgtaaggcctccttccctctaggttcccactttgttctggggtctccaggggagctgaggtgatgcagctgtggcccttgggggaacttcgtggccccagctttgcctctcagcccctggagcccaggggttgctgccctgctcacactgggtaaggaaaccacccaaagacctttctgcccagcctgaagatgagacggtctctgtctccacctcctggtcagtgtgaggaacttgttctcaggcaggccatgaccctctgatgtcactcacacatggtcacagaacatgctcactcaggacaaaagtttcgcttggttcatgtgctttggaaaagacaaaaacactggagatttatttttttgagacagagtttctctctataggctcttctagaactccctatatagaccaggctggccttgaactcagagcctgcatctgcctcctgagtgccagggtcactccttgctcaatccttcaaaaattaaaagatcagaaacccagcattttaaaattttctcacttagataaacattgacagctttttttacgatcaacctattgatctccctccttttcaaatctaagggatgtgacgaaggttatacaatatttctgcttacgtgttctcgccattttctgatccctgacccaggggtcagtagcataggatggtgtctctgcttccatttggggtctcatgagaaagggtgagaatctgggggttgccatctggggaaagtgttggaaccagtgtaagtctgagggctggtctgtgtctaggtggccagcctccctcaaggtgccatgacattgttgacattttgcagccgaggagcccgataaccatggtatctaggtccccattttggtcccagttcctctggtgccactgtttcctagttcaagtgttcttattggacggtgtcagatctgagacactctgacactctgacagtgcttatgaatgcctgttttgattggtgacctctgacctcccagccctttcacacccacttctgtgcgccctgtctttgaccagtcagctctgtcccatgtgcccctgctgccctgtgtcctcatgtgacactaatatgcccactaggcttgtgcagctacaatcttccaagtcaacaaaggggcctctgtggactgtgacttggaggagaagggcactgtgcccttgccacatagagcatcttcaggctagagcccagggcctcttatcactccataatgcagagttctaggatacaggaaatggctcctcccatcttaggggaagagccctttttttttttggcatgaaagaacctgtgactgtggcccagagttcagggctcgagtcaggatgcagatctcactgttcctgtgtgcctgaaccctcaaagttacaaccctaatctcactgtctttgtcctcagtgttcctggcttcctaccctcctttcctaacctctcacacgcccgtggcccatgtcccgtgtctcctacctgacttttccacttgctcagtggctcaactcgaagccctttcctcctttgtatcctcatttttctatccttgtctctgatcttttaaagcaatgtctgtttgtccccccgccccctccaataggccaagacggaagagcagattgccgctgaagaggcctggtatgagacggagaaggtgtggctggtccatagagatggattctccttaggtgagtctgaacattggttatagatggtgagacttgagtcagaactggcatgaggaaatgcctctgcccctggtaaggcctggtagtgagcaaggagaggctggtgagccagtgggctaggaaacaggatgagaagcctaaggagagcagtagagctgcccagacccaggtccaactaaccctgtcctgcagccagccagctcaagtctgaggagctcagcctacccgaggggaaggcgcgtgtgaagctggaccatgacggagccatcctggatgtggatgaagatgatatagagaaggttggaaggagcatctgtcaagggaggacagaggcagggcaggcctgtcccctgtgatggagtcgggacctgtgtcttcattgtctgtcttcccaggctaatgctccttcatgtgaccgtctagaagatctggcctcactggtatacctcaacgagtctagcgtcctgcatacactgcgccagcgctatggggctagcctgctacacacctatgctggccccagcctgcttgtccttagcacccgaggggctcctgctgtgtattcagagaaggtgtgctcctatggccccacccacctgccttatcctacctttccggttctctacccttcctcttttgtatccactgaattcatagttgacctcgacagaagagtccaagggcggggacagagggatatcctgtagtctttagtagagttgacaaatatctgaatttccatgcatggcctggccctccaaatacctgggcatctctagagtgacattacagaaacatgcaagtcctagaggtaagagcaggtggacccagctctgagagcctctcccttccccctatgcctctcctgttctaggtgatgcacatgttcaaggggtgtcggcgggaggacatggcaccccacatctacgctgtagcccagactgcatatagggcgatgttgatgagtcgtcaggaccagtccattgtccttctgggtagtagtggcagtggcaagactaccagctttcagcatctggtgcagtatctggctaccatcgcgggtaccagtgggaccaaggtgttctcaggtgaggcgggcagcagggaaaacagaccggggccggggtgtggggacagaagaccactgaggtgccgcctctttccccctggatttcctgatgtcctctggctctgtgctctgcagtggagaagtggcaggctctgtccaccctcctggaagcctttgggaacagccccaccatcatgaatggcagtgccacccgcttctcccagatcctctccctggactttgaccaagctggccaggtggcttcggcctccatccaggtaaggggcattgcccaggcctagagagcaaagatggacccctgggtcaccctctccaggattctgcctgatgaaatggatcctatgacagcacaggcagggttggccagggctgtccccattctgccctccaggtctcctgcccatttcctttccccctctccactgtactgctgggaaccccaccccgctctgcccactttctgagacccaggcacttaggacttatgtcaggctagtgctgcacacttgataataaagtcaggcccaggcacagtgatctcttcacactgaatgaaagttcttttttaaaaattatgtcaagccgggcgtggtggtgcacgcctttaatcccagcactcgggaggcagaggcagatagatctctgagttcgaggccagctggtttacaaagtgagttccaggacagccagggctataaagagaaaccctgtctcgaaaaaccaaaaaaaaaaaaaaaaaattatgtctattcatttatttatgtgtacatatgtatgtatacatacaccagcgtgctacagcatggaggtcagagggcaacttgctggagttggttatttccttccatcatgtgggtcctagggattaaatccaggttaggcttggtggcaagcatttttatctgctaagccatcttgccatctgctaaatgaagtttctgtcataagtgtccatcaccctggaaaggctgactctggggcactgggcatggtggagcccacctccaccaggagttgggactttcttcttttgcctggctccggtttctgcctttgctgatcttagtgaagtggaaggtggttgagcccctgggaataggctgcctgttggttctctgggtttggaggatcgtgggtggcaagaatgtgacccttctccctcacctctcctgtgccacagacaatgctcctggagaagctgcgtgtggcccggcgcccagccagtgaggctactttcaatgtcttctactacttgctggcctgtggggatgccaccctcaggtgagatgggatggggtctctaatggggctgtgggctccagcccactgactaggactgtgggtcttgccagcttctggcccacagtgcctgtggctgtcacctgttgtgcgctggctccaagctgggccctagggatgatgagattatagagacacaggtcttgccatttaggaattacttggtcttaaatcttggggtcatgccgtatgaaagggacacaactggcccctcagtgttcagttgcctccaggtctgggaaagaaggtcactaggatgaaggcagggttgtgcagttgcggtaagctgagttggtctgaaagccaggccttctccagtacctccagctggccctcagccgctctttggataacttctaccatggtcttccatttatgccttcagattggctccctgctcgaggccaagcaggtggctctgggccccccttcagctccctatacagcagaggcacagatgtgtccttcacgcaggctccctgtccctctccggggttctgactacaccctttcttctagggaggtcgatgtcctgtggaggcatccaatccagtgaggaaatgaggcagacctggctggatgactggggtgatgggcagacagaactcagtctgaaagctacgattagttgtcatccctgacagggatacggcctcggcctagggaccaagcctcacgctgatgtctcatttgtacccctaggacagagctccacctgaaccacttggcagagaacaatgtgtttggaattgtgccactgtccaaggtgagagcccgccactggggtctgagttggtgtctctggggctagaagcctccactggcagatggttcctcaggggtggctctagcctggccctgcattcccagtgggagcaacagtgtgggggacactggaaaggaagcctcctgaggttcagagccagcgctgttctctgccctccagcctgaggagaagcagaaggctgcacagcagttcagtaagctccaggctgccatgaaggtgctggccatctcccccgaggaacagaagacctgctggctcatcctggcttccatctaccacctgggggctgctggagctaccaaaggtaatgggcagcctgtcctgttacccagaatgccttggaggtccctacctgtttgtgttgttgttcgttcttgtcccacacgttaagtcttaacattcggctgtcaccagacaaccttcccccgcccccacacatggtttgacctgtacgctgtctcagaactctacaacagagcaggctagagaaacatctctctgtccatgatggcttgaggctttcttggccttagctttcaagacagagtgaggagcgagcgggtaggtggcttggatgtagggttgagggatggaaggtactcccccagagtggcaagtgactctccttctcgttcccttcctgatagagccccttgaggagcaagacggtaactaaccttgggatgtagggccctgcttggctgtcttgtcttggtgcttccctgggcttctgggcactgggctcattctcatggcatggagaactggtctaaggagaagctctattcaaagatagaagagcctgagagctgtggggcttcctagagccccaccccaccctcgtcaattttccttctcattcgcatctagaacctggggcttcctgaggccagtttccccatctttggtagtttggtagttgctgctctttctcctgcacgtcagggtggcggtcactagggggcagcaggcacctggcgatggatggacttagcacttgggatcgatccatgcttgtggatggtacaatctgaatcttcttgggaaaaatcttcacggaaaggccaggattatagcagctcttcacccatttccccctcccgccttgcaaaaggggatgctggctctggacagcacttctggctcttgctctcactgtctgcttagagacaagaaagggctgcttagcaggagctgggaagcagcagcagctgtgggtgggtgcatgcgggaacaagtgaccgggtgtgtggtctttatgagaccagctttgggttaaagaggtggccttcagactgttgggcagaagggtgtgagtgtgtggagagaagtgcttgttctctgaggactcgggtccaggtttctctgacccttctcagttgtgtctgcaggtagaaggctgtctgagtgttgatgtgcctgtggggtatgtgtgtgtgtgtgtgtgtgtgtgcctgtggtgtgtgtgtgtgtgtgtgtgtgtgtgtgtgtgtttgtgtgtgtgtgtgctgcgtgcacgtgcatgcgcttgagtgcccatatgcacagtaggacccccatgggtctctgtcagtgtgatggcatccacaaacacattcctttgagactgtgcactttttgtatctcagagccaaatgtgatcgtgttttcttccctgctcatcttcataaacccctgcctcccgcagtcccttcccgagggcctggcgggctcagttgatgactatttgctaacacactgtttttctttgcatgctgcatgctggtcctttgccttacagaagctgctgaaggtaaaaaaccttgtttcttgttggctttccctaattgctgtgattagacacatgttggctcaggcgaatacgtctgtgtgggctgttccctttcccctgcggctctgttgcctctccactgttgagccattaaggtgtctctggtctcgcttagggtaggggagaggggaaggatcttaaagtatccagggaaaagacatgtgcagttgctttctttcgctaaaacccccacaggcacacgtggctgtggctccagtgctcctgctgggtgggcctcatcctctgaccctgccctcacccaactcatgctggagtaaagggattttgaaactgattgtgcgccctctagcggcagcccatggagttagtgcttcttttaggatctgctctttctaccctttaaggaccctgtgagagctggcagttgctggtggttctgttcgcacagcaagctcaagctcatgtcaaggctgtcttttgcctccggaagatgccaattcccccatcctatggggtgatgagggtgccgagagtcaccgcggtcttcagttgtcctcagaggaacctaagatgctagatctttttcccccctaccccacagctggacgaaagcagtttgcccgccacgaatgggcccagaaggcagcatacctgctgggctgcagcttggaagagctgtcctcggctatcttcaaacaccagctaaaaggaggcaccctgcaacggtccacctccttccgtcagggccctgaggagagcggcctgggagagggtacacatgcctggggcctcttggctgaggagtgggattggaaggccttgcctgggacttgtggccatcctggggtgtgggatgccaactaatgtcctacagacccacagatatcctactgtgcgtatggacggacacacacatacacacacacacatctgggaaatactagaaacttcgggtctaatagagcaagtagatgcttgcagtgggacagccccaggactctgtgctggctatgtgggcagcaagcattgctggacaggtcgggtggccccaaggactgaagcaccatttgttcctctggtcccctaggcaccaaactgagtgctctggagtgcttagagggtatggcgtctggcctctacagtgagctctttactctcctcatctccctggtaaacaggtgagtgccaggtggaatccagaggctccccactttctgctttagtaaaagtaggtttgatgtttatgtggtggcttgggcaaggctgccctccaccagcagacaactggctatccctctaagccaggggccctgggtacctgggcacggaaaggggccggccacatgccagggcagagaagcggggctcactgtgtggtagtgtcccatccagctctgacccaggctcttcccacccagggctctcaagtccagccagcactcactctgttccatgatgatcgtggacacaccaggcttccagaaccctgaatggggcggctcggcccgtggagcctccttcgaggagctgtgccacaactatgcccaggacaggctgcagaggctgttccacgagcgcaccttcctccaggagttggagagatacaaggaggtaggtagtgccaccagggccctgccagagccccactccacctctcctctggcccaggatcctggccagggcctctgcacatgcgcatcactgtctcccagttctccgtccaaccccctcatttctgccctccctgttttatggatggagaaccatcctggcccttagctgtgtcctttctttgcaaatcctctgtgctctaggaagctgaaggcgtattcaaaatcccaggcaggtcttcttggtggctctccatgacccacttttcagtctgtgaactgccacagtgcagtttctgcctcacagtgggcctgggcgcctcttctcccagatcccgtatttcttacagcctaagacttgggtgtggctagctattgagaccctctgaagagctccctgggatggggtgagatctgagatttcttcctcctgcggaaaatgatatttgtcttggataagagaagaccccagagggaggggtgtggctttgtctgcgtgggttctgaggatgattgggtgaaatggagagagggcttattcggcattgcctaatcaactggttcacataacagccgagcatgactgcggtttagtatgaaaagagaatgggggggatcttagctgtcaaagaatcctgagagtgggaggtgatgaacagtttgtcctttgagatagtttggggtggggggctgcatggagatgaggcattgcatttgctgaccctagaggccctgcccagtccgctcctgtggctgcacagcccactcctgtatactctgtggtcccttgtgcattaccgttgtgccttctttcctaggataacatagaactggcgtttgatgacttggagccagttgcagatgactccgtggctgctgtggaccaggcttcccacctggtaggaatgttagggaagcataggctagcctagactctttccactcgctggtctctggtagagccctccctctggcagagctgctgcgggggctgctgctgtggcctgaggaaggatcacacccatatagcattcacggcatcactgcaggtaccccgtctgcctgtgagggtggcacgctctcctgcctggcagaatggggaaccataacccagagtcccagccagacaaaaaaatgcccctcttctcttgctacctgaggctcagaccctgtcctaagcctttctgagccttcagtgtacttgccacaaaccctaatgtctgctgctgtgggttgagggtgtggggtgagactccaaattgagaggctataatccttccctccatcgtcacaagaggaaggcagatgcagtctcccagggccttcgaggaggcagcagcaccctcaaacagggaaacagtgtaggggcaaagataagtatgtgagtcctcactccacagccgtggggaacaagctgtcatcctttatcttggatatcttgttgcctggggcagtggctggcctaacgaggacttggcgtttggtgattgtcaccaattccagaatctgcagcctatacatttttttttggagagtgctatttttgctgggcagcagagctcttggtctccctgtttgcctgcggtggtccctgctgggctagcacaggcgtggggacaaatgcttagagtgccaggaaactctccagggaagacagagtttctattcctaacacctgggctcctgtggtggcctccctggagagcctttgacatcttcagatgtgaggaagttgtcctggcgtctcctgagcagcagggggcagacgtgtgtcaggctgtaaatcaggcagcctcccaaggtctctgctggttctggggagggatctccagtgccacatatcacatcactccgtcctgctattcttctccagctactagaataccatccccacccactggcccttggccttctgggactcataccctactcccttctatggggaaaaagatacaggcagtagatcaaagagatcaattgtcttatttttcttgtctgccaggccctaaaagccaagcaagaatgcggtgtgggcagttcttcctgcctaaggaagacaagggagataatccagagacagaggcacaggaagggcaccttaggccagatgtggccgcaggcttggtttccttggtctccatggggtagtagaacgaattccagcctctcttgaaaaaaccagaggcttagaggccaggcgagtagctcatttggcaaagctcttgctgtgaaaattggaattcacccaggagacagagacaggagatccccagagaagctggctagctagactagccaaactgataagttaaggcaaggaaccctgtctcagtatgtaagatggagacaccttgaggaaggaagatacctggcattagcttctgctctacacacatgtgcacacatgtgcacacctgagtggggggatggggagagagagaatgagagagaggaagaatgagagagaatgagaatatttgccaacactcactacatgcaggctcttccaggacagtagtcggcttgaatggccgtcattcccttcaggtagggacacatcctgcttttacccactctgcctctgttgaccactgcctctaaagagtcacctgcctcgggggtttagtccttgtgtttgtggccagcagagatctgggcactctctgggttctccccacggggaccaatgttaacatgacagccatcatttatgaagagccttctttgaagctgggtgtggtggcacatgcctttaatcccaacactctggaggcagagtcacatcgatctctgtgggtttgaagccaccctggtccacaaagttagaccctatttcaaaataaataagcagagaaaagcctcctttgagccttggctgtgcacagacttacagacttcatcacactgaatcctccagggagtgagggcagtatgggggctgaccttgctcccgtgccttctgaggggataaggattgaggagaagttctaagtatgaatgcacatcagaaggagcttcagtcttgggtccctttggaccccgagtcccatcagtcttttatggtggattcttagcattctatctcagctcttgttccatgtatgcccatctcatccacaaggtggcagcagtgagcaaccagcaccacaccgttcagattcaagcacctgttaatagcgtgtggttgggaggggacggctccttttgcacagctccacacagctaagccggatcttttcccttgaacataggttcgctcactggcccatgccgatgaggcaagagggctactgtggctcctggaagaggaggcactggtgcctggtgcgacagaggatgccctccttgatcgtcttttctcctattatggcccccaggagggtgacaaaaaaggtaggtagtgcctggaggacagcccttctgctttggaaaagccgggtggactctctacctgtacatcggcgtctgggtcctgacagtcagaactttgcttcatgtgccctcaggccagagtcctcttctgcgaagtagcaaacctcggcactttctcctgggccacagccacggtaccaactgggtggagtacaacgtggctggctggctgaattacaccaagcagaacccagccacccagaatgcaccccggcttctgcaggactcccagaagtaaggccacctcatgtcccgaccctacaactgttctctgggctcccttcctctggtgatatgtcacagtcccatcgatagcaaggcagataagcctctggcccctgagacaacagtcaaggtcacaagggcttgaggacacaggaatagagatgggaggcatggttagaagtgccgatagttttcagtgtggatggttccctcactcttcagagaaaacacacacggtcagcaaactcagtagcacacacccatagcctaaacgctcagaaatgagtagcaggggtgtcagaagttcacggtcatccttggctgcatttttagaagattttatttttttatattatgtgtatatgaggggagaggagcagtacatgtgtgcagtgcccataagaggccagaagagggcgtcagatgccctggcatgagagttacgatggtaagtgagccacttgccatgggtcctctgcaagagcagtcagcactttgagctggtaagctatctttgcagacctctcaacaaaattcagaaacaaaaaaattattttaaaacccagaaatccatgggtggtggtggaaccttcctttaaccccagcactcaggaagcagaggcagatggatctctgtgaatctgaggtcagcctggtctacaaagtaacttccaggattaccaaggctgtacagagaaaacctgttttgaaaaacaaaacaaaacaaaacaaaaacaaataaacaaaacaacaaacaaataggagcagttaaaacccagaaatcacataagccctgttatttactcatttacatcatagattctccctctgcaggcaggacttgtaggtaccaggtagttatcagtgaagagaacacacatccctgccctacacgagagaggtactgaccaagagatgcagtacacagactaattatggcgtgctgaactgtacattagaaacatctcccctcaccggcgaggaaggagcggattctcccactgccctctcccttgtacggcctctgcctgtcttgagttgtctctccttctggtttccctgtagaatatgagacatactgccccagtaaagatggctcaagcctctgaccacagccgtattggttttgtgtgtgtgtgtgtgtgtgtgtgtgtgtgtgtgtgtgtgtgtagggggtggagtgcagcctctgttgccccacgttgcaactccttttctggccttgcctcctgcagaaagatcatcagtaacctgtttctgggccgggcgggcagtgccacggtgctctcaggctcgattgcaggcctggaaggtggctcccagctggccttgcgccgggcaaccagcatgaggaaaaccttcaccaccggcatggccgctgtcaagaagaagtcgctgtgcatacagattaagctgcaagtagtaagtgttcagcaggtcccaggtcccttcctctggcagtgtgggcactcagcacactaacggcatgggagcccactcagatccactggcctcgatcactgctagtagggtggctgtgtctggccagccaggcctgaggagggcaggggtgtctgggcttaacaatgtcctagcaggtggcagaccagctgctctcatatgaggagtggaggtaccagacatcggagcactgaaggcgtccctttccctttggcaggatgccctcattgataccatcaagaggtccaagatgcatttcgtgcactgcttccttcctgtggccgagggctggcctggggagccccggtctgcctcttcccgcagagtcagcagcagcagtgagctggacctgcccccgggagacccctgtgaggctgggctgctacaactggatgtgtccctgctccgagcccagctccggggatcccgcctgcttgatgcgatgcgcatgtaccgccaaggtgagacatcttccctcccaaccaagcccaggagctctttcccacagctggccccttcctgccctgatgctgtcctgtctagggactggcttgaggtcccttccttctgaagggccttcttctattcccagcccaacctgttgctttatgactttctactgtgggattctcctcttccttctctcccttgttcattctagtcctacacacacacacacacacacacacacacacacacacacgcacaggcgtgtacactccagccctaatgccctatcatttgctctctctgttcctcttgcccatcatccctggtgtgggcaggtcagctctgcccgtagcatcagataagaagactcagtgccttttcagctccacctgcccaaggggaagcgggtgctaaatctcttggaagtacataaaattcccaagaaaggtcagaaagacccttttaatggacccagctccagggggaggggacaaggatggcggtagcagttgccatctgtacagtattcatggcttgtcaggtgctcatcccagctctttcacacagtaattcacagcagcctcgtgaaacagtgactactatcatccctaagtgaggaggcaagcctcagagaggctaaggagcatgcccagggtcacccagtggcagagctgggttccagccagacaggtttgcttgtccggcctcttgcagagaaattaggaattgccaggtttctgctctttgtttcctcccatcaccgagaagctcaggccgggccccacccacccacagacaggtccctggaggtatccccacaagcaccctcatttttcctcagcagtgagagccaggaaacaggctccctaccccattctaaataaatcatcgacctgtccccacgtcttgatatggagttggtgtttattatttcaaaaccagattgttaccgctctgaaccgaaatcaatgtgctttactcaaacaagcagatcgatgagaccagcggcagcggccaccccctccccccagcccccagccactatcgatagcgctgatgattaattaagatgccaggcgtccagacctgctatcctggcccatcaatttaattgcaattcagatacaatcaatagctcactttgtctcggcccctcagcggcccccgcctcctgttccaattatcaggcacatgcatcagccttctctcccagttggaggctttcccagagctggctggccagagcaagcccccagctggctgtcagcagcccaggtgtggacaccactactgcctccagcagcagccttggtgaccttgggcaacccagtggctccaacctcaggcctcagtttcctaggctgacagctgaagcagatccttctgggatccctttctggctcgaggctctgtaacctggggagtggacctttcggcctactaccatgggcccggtgaaatcagcataactggagtctactcctgctagcctgtctcctgaccttggtctaagccaggagccatctcacccttcacttcacttccagaccagacactcttttgggaaagagaatttcagggattttttttttttttttttggttcttgtttttgtcattttagctttaaattcaaggtcaaagtggggcagggagggagcccttccataatccttcttcaggagacaagagacagggaggtcccatttcactgagtgtttacacgctaaactgcgcttactacatattttggtctctgtgtctgctgtatggaataaggtccaaggccctgtttcaaggtgaagaagggcctggagtgtgactttagctcatgatagagaagggagcccccactcaggaagcccttcaaatgaagatggcagagggcagctgatctggggatggctgggaggtctgggtggcctctctagggcactttatacccttccaagttcaggactctgtgataatagagactgagcaaagccttgcaaccttagtaagaaaaaacagtaggacatcagattgtagttgaaaaaatgtgggggctagcctgggatccagacccaactccttacaaccatgtgactttgacacacacacacacagagagagagagagagagagagagagagagaagtagggtaactttctccaaattcagtctaaggggaagctgaatacaatgagtaattgatacaatacctgccccaggacttccctgtaaactaaaataacaaaataagttttgccttacacatatgtgtgtgtatatgtatgtgtgtgtatgtgtgtgtgtgtgtgtatatgtgtgtgcgtgtgcatgtgtgtgtgtacatatatttacaatgttgggaatgaaacctggggctacatccatgctttactctgagctaaagccttcatatcctgttgtagacctgagggtctgtcctttctgggccttccccgtccccaaccacagccaccaccgtcctctcctccccgccctgcctgcccaatcaagctaggtattgacgtctggttctggttctctctccaggttacccagaccacatggtgttttctgagttccgccggcgctttgatgtcctggctccacacctgaccaagaaacatggtcgtaactacatcgtggtggatgagaagcgggtaggtttgggtctccgggatctttgcagtcctcctccttcattcagagccctctgcccatctttcctagacactgcaggctggtgcctgttcaaggttatcacgttccagccgaccatggctaggacagacacaacactgtggcagcctgaagtcagctcagagcacaggctgcagcacagattggagaggagccactgttgttgaaggccaaagatttgggtgtctgagtctcaggaagccagacagtcatactgaatgaacatgccagggcctcccaagtagacgatgagtctttgtgtttgggtatcctgctgatggcacctgggtcccttggcctcggcttccattcctgaagtagaaatctgtctagggctgggcaagcatccttcctaggaggaggctgaggtagcaagtctactttggtgccaggaacatatggatctgtgagcctcttacaatcaagaactatcaagaacaatcaagaactgcagaaggagtttctttactgctttaccctgccaccttgctctccagaggcaactcctcaggcagccagtattctccctcttgtgcactggcctcacgcttccaacttgactctgcaagcacctcagtcttcaggaggcttcagggcaggaaagcccggggaaggagagcccacggcattgcctcatctgtcccttcatgttccacccgtgccctgacttgcagacatacactcatggaagcctcaaagattcgtgcagtcttgggtgtgtcagggtcgtccccccctccccccccccccccaggtcctgacttcatcctagctcccctgtctccttggaaatgctggccttcccagactgtcctttctacatgaacatctctgatcacggcatccttcttataggtgtcccctgctcaggacatctgctgttggactcggcgagacctttcagatctagactcaatctatcttctttttttttttttcttaaaagatttatttatttattatatgtaagttcactgtagctgtcctctgatactccagaagagggcatcagattttgttacggatgtttgtgagccaccatgtggttgctgggatttgaactcgggacctttggtagagcagttggtgctcttaaccactgagccatcttgccagccctcaatctatcttctgttctatcactatttttaaaagtttactagccaggcagtggtggtgcatacctttaattccagcagtcagaggcagaggaaggtggagctctgagttcagggccagcctggtcgacttaggatagcaggttccaggatagccagggctacacagagaaaccttgtgggcctaagtatcagaggctttccatggagatctctggccaggcctggtgtgagggttctggcaagtgcgggcagggaggggaagtcacttccgcttctgctgcagcggtcagctccacctccatctctgctgtgatccacctccatatctgactgatggccacacacctctctgtggggggagggggccagggggccctgggaggctgaagctatgtgacaggagctggggacccaggaggggaggtgtggccgaacacctgctgtctgtcccatgcaggtggaagtcactacccatcgggtcaccagagttccagacctttgctgaactggggactaggctgtctgtgcacagcaaatcgccccacaaaaccctgtctaaaaaaaaaaaaagaaagaaagaaaaagaaaaagaaaagaaaagaaaaattatttcatttctgctcagccttaccactgagcctaacctacccaacacttagcttctgccacgctcagctctcctgagctctcataactctcgtatcccagctctggaggaacagcccttgggttgtgatcttcatgttagactcccaagggccagggaaagaaactgtacaattctgtagatgtaaatccctacaggctgtgatcttccactttaggtgggcccttggcacgacctagtaaggctttggcgcccttccttacatggctttagcaccaagctccttgccggccctgccgttcaccccctttctcctcacatcctcccctacctcgccacatcatcttccccgcagaacacctcgactctgaaatcaagggtccagcttcttctacatctttatgcttctctccatcttcctgctccttcctgccccccatcctgccttggtggagagaggatatttttttatgcagttctttcttctgcggcttagagtccattccatcagggatcaccatttatgtcttcatcttcaacctctcctagctcttttgtctgttagaatggttccagaggtatcagccacggatacagcctctacctgaaaggccccgtgtccagctcctagctgactgtctcagcgctctaacctgaggccgtccaggcttctctcctgctctgctgccatctattcatctgcctttgtggcctgttctcctctctattctggggttgctctccccgtcaccacagtgttgttagagccactggacacttttctattctctgtcccctgaatttaaaaacaaaaacaaatgaggtcagaagagggcatcagatcccctggtactgcagttacagatggtagtgagccaccatgtgggcactgggaatggaacccaggttctctgaaaaagtaaccactgatcttaaccgctgagccaacccttcagtcctctgcccccccaaaaaaagatgtgtttattgtgtattgagcggtcatgtatgcatgcatgtatggctgcaggccagaagagggcaccagatctctctatggatggttgtgagccaccatgttgctgctgggaattgaactcaggacttctggaagagtagtcagtgctcttaacctctgagccatctctccagtaacaccccctccacccttcccacacacccccacgctttttgggggggggggcagaatctcactatgtagtcctgagtctcctggaaatcactatgtagaccaggctaccctggaactcagagacccatctgcctccagctcccacatgtttcctgctcaccttctctgccgtcatgcctagcccacagtccctgctcttggcatgccccctggaggcttctgcttcagcaaagccctcactcctcagaccgccccctcttcctagacagcctcgttcacgcccatcacttctcttaccacatatatattgatgatctccgatcagtgccgcagcacagtgggacctccctcctgcactccaggcatactgcctgggatgtctcttacctcagactgagcatgctcagacctctcattctcttgcctctcaaacctgttcttcatatgtcccatgccttagtgagtgacctcttcaactccaactctgtcccttcctgagagaactgagttcccaggcacacagggctccccacaccttgattactgtggacttctcttggagcacttaatccctgcccacccctcactcttaggacgtatactctctcatcttgtgatccccgcccggcctggaagttggaagcactgctccaaatgcccctttctatctggtagttagattctcaggccaagctgtactcctctgggctcctacactccccactctcgactggctgccactcccgactggctgccatgccttttgctttgctgtgcttcactcatcttccctcccactagtcttgcttcccagcaacacaatttgttcctcttctagccacctctggtccccagagtggacatagtatcagacaccatggaaacctacctgaggggcttgtggaagaaatgagggacaaggggttgggggggctaagtgaatggagatgacaagagccggtacaggcctaatggcaacctctctcctcaggctgtggaagagctgctggagtccctggacctggaaaagagcagctgctgtctgggcctaagccgggtaagtcgcccacagtgggtagccaggtgtttgctccctggtggcctaggcagatggcggggcctcctttctgttctgctgctttgtcggaccttgaaatctccctgtgtcttgctccccagctccccactggccactcaggaaccaccttttcttcagccagaagccagggtgtagatgttccagtttcagcaaaccactttcttgctgagatagctgattcaggactgtgaaacctctgttggaacgtggctctgaacttggcctgaggcccacctggggagtgggaaacagaagggctggacttgaagggagggggctgtgaaggccagaggtagtaggaagactgttccagaatgttaccagggtctgtaagagcaagcaaggacatgaaagctgggccaccacctgcccacaggccacattcctcatccaaatggaatgtgtatcataaaaagcaggcactcctgaccttgggcctacactaaaggccagctgagcaggcttcctacaggcagggagccctgcccactctcctctggctggaaagcttggataggaatcgttcttgaatgtgctctggggactggcgtggagcaagggcaggggcagcagagagagtcgctgatacagtgttctgtcagcagagaggaaagggtccctggtcgcagggcctcttgcattgtgaggtagatagaggagaccatgttccttgtcatctgtcctccgtcagtgtttcctgactctctcactgtgtcttctcatctcagcccttggctctctctgctccattgagtcttcacagtcccttctgcccgtttgttgctttctggtcctgtttttcctttctgtccatattgtgtgtttgttcccacccctttggtgttatttatctgctctggtctctgctttgtctatgacatctggctcccttcctttctctctggttactctccactatgcacacacacatagagacagacacacagagaaacacacttacgtacacacattcacagacacagacagaaaaacagacacacacccactcatacacacagatatacatacatatacacagagacacagacagaaaaatacacacacatacacacactcacactgaaagacacagtcacagagacacacatatatacacaaattcacacatacacagagacatacacagacacacacacatacaccttagacacacagacatacacacactcatacgaatagacacatacatacagacacatagacatagatagacagagacagacaggcaaacagacagacagacagacacacatacacacacacacacacacacacacacacacacacgcgcgcgtgcgcgcgcgcataccttttctggtgtgtatgtatatctgtgtgtatgagactcaaagactgctagctgggctgcctgcagtcaaaatcattccttcagctttgcagcagctcgcaggttagctcacacccaggttttcctatgagctcctacccctctagccggctagaccgctgcaggctggtgctgggagtggcactcctccaagccagttcccagtttcccagacacatctcaggctggaacaggtctgtacaggttgctcttcttctggctacatcttagagcctcagctgtcctgagtcctccccggtaccacactgaggcaggtgagccacaggggcctactggcactcagggagaaaggacgcaaggctgggtgtttgctttgagacaggatgctgtagcttgcaggctgcacttagcactggctggtgatcaaggactgggtgtctgtcataatgcttcggtggagtggtttcattaggggccactggtccctgaaaggtcaggctaagactttgggagtctcagagccttctgatactgtaaatctgcattaatgtgaactcaaggaaggtgatgacgagagccttcccctaattgtttttctctgtgtgtaaatgtgcgttcatgcataaatgcttgtagtgggtgctattgaatagaggccaggggttgaatctggtgtctttctccctggtttctcaccttgtttgttattattattatctttgttacatttatttatttagagagagttggagggtctatgggcatccatgtgttagaggacagcttgtagaagttcattatccttcctaccacattggaaatggatctaattcaggacctcgggtttggtggcaaatgacaagtcactgagccacctccttggaccctgtcagtcttaagttttttgagacagggtttcataatgagtaggagattcactgactagccgggcaggacaaccagcacactccaggaccgtcctccctgtgccctacccagtccccaggactagggttacagacaaatgttaccacacctgacttttatctgtgtgctgggtgcctggacttaggtcgttttgcttctatttaacaaggcgagccatctccttaactccacagacattgaagagatttgagacttgtgtctgtagtctttagagcattgtttctcactgtgtttctgagccatcccagccctctgtgtgcacgttccttttccctgtttgttaaccaagcatatttgcttggcctaggagcaaactggctatgctccccttagaggctcacgtatatattactataaactgaggtatgagtcagactgaagatgtatatggaatctcacttcgccactgtaggattcgggacagtatcacaagaatggagctggtcttagaggatgggacttctgtgaggtcaccagatgctatgtcctgaccaggtttaggctctttccctccttccctgagggagactctagggtgccttcccctatgaggacttgatatcacctgcattctctttggtttcccaacaccgaccagcagaagggaattcctttctctttctttctttaagactcattgcttgtgtgtgcacatatgcatgtgggtgtatgctgtatgtatgaaggtccacacagaggctagatgagagcattggatcccctggaactgagttaagaagtaattgtgagccacctgaggtgggtgcttcgaaccaaagtcaggtcttcctgaagagctggtagttctctcaactgctgagccacctctccagcctgtctttctttttaacgataaattatatttgttaattataccatttatttacttgttcgttttgtttatttatggatgtttgcatgccacagtacatatgtggtggtcaggataacttgagatagtccattctctccatctgccgtgtgggtcttgaggatcaaactcaggttgtcaggcttggtcgcttagccatctcactggccctaagagggagatgtccttgtgctctgtcccaggtgagggtgaatgtatacttagcacccctttgccttgtcaaggatgccagagtcaccatctccctgctcccttcacctataaggccagtgctcagggcagcagagagagagagagagagagagagagagagagagaggggaacagctgggtggaaggcacccagcaggttccctacacatctgtcttccagcccccaaacctgtatgacaggtcccttgctggggcccattcacacccacctcaccagctccctcatgagagtgtgaaacctgggggcaggggcggggcagtgacatgaaagaggaggtggctggaatgaaactgagcaggagggtggacaggcagcagccccaccctggtctttcccccacatgcaggtctcagaccttcctctcacacccagacacatcacctcactcttcacctgatgcccggtggctggagctatgcttgggtcctggtacctaccatgccacccagcacagtgacaggatcacagatgtagctgaagggctttgtctggccagtgaaggcttcctgctccttggcctgctgtcttctctctgtgtgcttcgctttgacgttagcttccacctgggcctggcctggcccttcccctgcagccctgccagagcacttcccctcctctcgggcaagtggattttcaggctgttcttgaaccagggtccatacttcctgggctgctggttccctgtgccatctgcctgtcccctggcatctcatcttgtctctttgctgccccagcctagtctccctcttttaccagactgcttccccgacaggtgttcttccgggcaggcacgttggcacggttggaagaacaacgagacgagcaaaccagcaggcacctgaccctgttccaggcagcctgccggggctaccttgcccgccagcacttcaagaagagaaaggtgctgatctagggatgcctcggcctagatggcagagtacctgtgggagggcatgcaggatacatgccagggaggccaagcagttatcttcatccgagaaggaggtggaacccccccccccccaagagcatcgtgcctgagccagagtgggaagcgagcttgagtgctgagcagtgtgggcatgtgccccagccagggtgccgtgttgtgggagtgtgggggggaagcagggcccaggcaaaggtgggctctggttcatgggctgctctatgaagattaaggagctgtgtcagcgactccttttcttattagcaagtccataaaacagccagcactgccgcctcttgtgtttcagcaagattaggttttatagcacagccaggccagggtgctggaaataatcaggcagcaaataaagcagatgaaattattcctaatgacagtgggacgtgagcgtcctgtgcaccgctcccggggccgcccaccctcagagggaatgtgggagccaaggtgggcaggaaaagggtctggttctgggtcgagagtcctggggaacccacccaggggctgtgcggatggtgggaagtggcttggccaggggaactcagagtccattcgtgtggcaaactcaactgcagatccaggacctggccattcgctgtgtgcagaagaacatcaagaagaacaagggggtgaaggactggccctggtggaagctcttcaccaccgtgcggcccctcatccaagttcagctgtcagaggagcagatccgaaacaaagacgtgcgtgacctccaaagccagctgggtcccgggagggactccatgtatccaagggtcttgctggtctgtcttgggctagggtgctcttaggatcagatggaagatggtgtctttgatctatacccatcaagcagaggtccctcccgagtgctgtctgggccctaggtagctgcttaggatagaatggcaggcaccccatgcttatagagaagggtctaggctcaggagtcccgggaggctctcctgtggtgggtgtgcctcccctctgtgtcctcagggacagacctgggtcttcgcccctcacgacacctcgtttgctccccgcaggaggagatccagcagctgcgcagcaagcttgagaaggtggagaaggagaggaacgagctccgactcagcagtgaccggctagagacccgggtgagtcagtccagtcaccagacagactggcccactggcccaaaacgcccggccctggcccatgagcccagggggttctggccgagtgaggctgaggcagtcatttcaaccggtgaccgcctccctcccccaaccccagatctcagaactgacatcggagctgactgatgaacgcaacacgggagagtccgcctcccagctgctggacgcggagacagccgagaggctccggaccgagaaggagatgaaagagctacaggtgagagcggggtgaaggccgcaggctagtgaccgccacactctgcttcccctcccaaagccactctgcacctcctctgctagctcggcatctctgtctgcctggggtaagagtgtggcctctggtttaggacactaggtaggacaagccaggggaggactggcaaggctgacaggctatctcctgcagacccagtatgacgcactgaagaagcagatggaggtgatggagatggaagtgatggaagcccggctcattcgggcagccgagatcaacggggaggtggatgatgatgatgcaggtacgtgtggagtggaggagggaggcggaggcctgaatggcacgccctggtgtctgcccatccctgggaaatcacacaccctgtctagccttgtctcccctctccaagctgttgcagtaccaaagaatagtaaatagatgagaaagtagagttactcaaaccaggcatgggattacgtgcttgtaatcccagaggactgagttcaaggccattgactacctaataaactcaaggatggcctgggatacaggagatcttgtcttaaaggccaaccagacaaagacctcaaaaccacgatgccaaggtgctggaaacaaatgggttgaaccactacggtaatgacaagggctacggtcctggaggcctccagggagaagattgcataggtgcccctgtcaccctctctagagtttccccttgtagtggctccttctaaccattgttccagaaacttccctacgtccttctggctgtctcccctgccccttcctgttgaccctcaacaactcaggagctgtctgcccccaccctgcagggggagagtggaggctgaagtacgagcgagctgttcgggaggtggacttcaccaagaagcggctccagcaggagctggaagacaagatggaggtggaacagcagagcaggaggcagctggagaggcgggtgaggctggccagggaaccacagcctgtgccctgaggctggggctcagtgccacatctattggcaaacaagcccgaggcaggcagaccctgagaggaacagggaagtggtgtgctagccggtcctgaaggggcaactaagaaccactgtgtgggtatcaagtcttgggttccgaagatgccctggtctcgccctgtgctctggtctcgccccgcacccccgtctccccctgcaccccggggcccctcggcacctgctgaccttgcacacttcctcctcctctagcttggggacctgcaagcagatagtgatgagagtcaacgggcactgcagcagctcaagaagaagtgccaaaggctcacagctgagctgcaggacaccaagctgcacctggagggccagcaggtccgaaaccacgagctggagaagaagcagaggaggtgggtggtccccccgctgagccctcagagccttcaagccacaggaccaccagcacttggccaaaagcctcacctgcatggtcagccatgctgtgacacgaaacaggctctctcctcatctcccaggaggacatgggccgtgtctacttggaaggccatttaggcctctgttcacatgtgttccactcgaagtgagctttaccaagtccagaaccactgggtcccagcccctggccctgcccccaccctgccctgcctgagttgctctcacttccctccactacataacacactctcctgactaatgtcattaaactaccgtgccacttccatctcattatggtaatggcacagaggaggggggcaaccctcataggagaaaatccaatctaaattaatttccctggctggggatgggatggggcgcttttattagcatcgtgaggagcccacacaccctgggaacagtggggtgccctagggagtgggaacagcgcctgtctccctctgtcagcttctgtaaaggcaccgattacctttgtgaagggtaacctcaccccgtgaccctgggactgagaggggcagagcagagcccccactcctcccagtcatggattaccttacatgtccccaactccctgtcacattgcttgtggaactgcttcctgtgactctgaggagaacaagggggctcggaaggttgttctgtcccctccaggacagcttgggagtccatttccctgattctttaaccccactgtgtccctttacctaaagactggcgctctgagcaggaacccctccttcatgagcaccccaataatggtgccagcttggcctagttaccatgtcactgcaccccccgctgggcaacttattaggtttcagctacccggtgttttcttacttttcgtctgctgtgggatggagagggggctgtaatttccacaggaacctgattagctatgcagggaaggtataagagggattttggcagtttgttcccagatctagagtcactgggcaggaggtggaaggtcgggaagtagaggagttaaaggtggcctagcagccgggcgtggtggcgcacgcctttaatcccagcacttgggaggcagaggcaggcgaatttctgagttcgaggccagcctggtctacaaagtgtgttccaggacagccggggctacacagagaaaccctgtctcggaaaaaaaaaaaaaaaaaaaaaaaaaaaagagtggcctagcatggggtgactctggtattgaccagagcagatgtcagaggcagcagctgtacctggcgttgctgagttgtatacagagtgagttgaacacacagaacatcatttctactcactctggctgctggctctctgtctcaccccggcaccttacttttggatcagttggagaatgtagagatttgtctcctgaggcaagggttggcctgcctctttctcagaagcaatgtgtgggaccctcttatacccacttgatgaagcatggagtgttcaacagggcctcaagttgtctgacctgtcggccctggagtccaattccgtgtcagcagggccccaagttataacctcgtgagccgctcccctcacccaccccagccctgttggtgacttgtccctgtatatggcaccacttcctgacagttgccgggtcctggagacctaggctctgtccttctgatgtggtcaccgtgctttcacacaggttcgacagtgagctttcccaggcccacgaggagacgcagcgggagaagctgcagagggagaaactccagcgggagaaggacatgctcctggctgaggctttcagcttgaagcagcaaatggaggtaccgaggctgacccacttccttctccatctcctccaagacgtggggacagcccagtgtcagcctcaccttccccctctctctctaggaaaaagacttggacattgcggggtttacccagaaggtggtttccttggaggctgagcttcaggacatttcttctcaagagtctaaggatgaggcttctctggccaaggtcaagaagcagctccgggacttggaggccaaggtcaaggaccaggaagaggagctggatgagcaggctgggagtatacagatgctggagcaggtaccaggggctggccaagggagggaggaagcacagcaggaagtgtcgccaccctcgccattaacacaggccagggaagggcaagggccacatgcattcattcagtcagtctctcaatcactcgttcacctgttcatacaatgtgtgagcgcttggtctgtgccagccacagggtgaagatagttaagccatcatagagctttttcacaaaatcagatcctggttggatccagagagaaaggaaagagaggataatgcagccagagccagagccagagccagagccagagccagagccaggagcccacagagcaggtgactgaacagccaagtgagttccgggggacctgctcagggaggcaaagcttcgagttcattctcccctccagcctcctccgagcctgggatgggcacttagtaaggaggcacgcacactacaatgtccatggagaagctgctgccaggggcagagcagagcaggcaaagagaactagggcggggtccgtgcacctcagacagagccctattgggaaaggaaccttgtcctgactcacaacccacaggccaagctgcgtctggagatggagatggagagaatgagacagacccattccaaggagatggagagtcgggatgaggaggtggaagaggcccggcagtcatgtcagaagaaggtacggcatctcagctcctaggctggtatacagacctgttctttctcaccgctttacaatgaggggctttgtttttctaccttagccccctgtaatatactgctattctggaccagtgagtcctctcttagcactcaggtctgacctgggctgtgcctttcagtctgtagaaaagcttaaagaacagccgctcctcacctgtcatgtcagccagcctcgctgaacaggtccccacactccccactctgtacgggggtctacagtggctctggtgacttgtggcctgctgtccccatccagcaactgcacctcaggttacccacactcatccctgccccattgttctgggatgagacgctcagcgtgtatgggaagggtcgatgaacccctgtccccgtgactctgcagttaaaacagatggaagtgcagctcgaggaggagtatgaagacaagcagaaggcgctgcgggagaaacgggagctggagagcaagctctccacgctcagtgaccaggtatgtgggagcccctatagctactggctccactggcccaagactggggatcctgagggcagaacgctgaggatggggccgtgctctgctgcaggtaccatatcatggggttgatgagggcatcatccatcgcccaggcctttctcgctgggcagtacaatcctgttatacccaggacagcatccttgctcattttagagggtgtgaagatggataaagttagcgtccagctggggaaggacccaagggagtcaaatggtggagctcagtgccttcccgggtggtgtctccaccaggtgaaccagcgggactttgaatcagagaagcggctacggaaagacctgaagcgcaccaaagcgctgctggcagatgcccagatcatgctggaccacttaaagaacaatgccccgagcaagagggagattgcccagctgaagaaccaggtaccttgcccagttgaatccactggttccaggggtagccagggcactcatttgttcaattaccttctctatggcttgctgtctcttaagtccttgagaaggaagatgtctggacaagccactccaagcagtcaggttccctagggtctgtatatgccctacagcatggctgccaggccctagggtggtgtggaggggcctcgtgcctcctggaggaaagaacagtgtatgcaccacagcacagctgtggctcttagactgacattcaagaagaaattagaggagcaaggatgaggaggaggaggcagaggagggcagggagaggtggaggagggcagggagaagctgaggagtacagggagaggtggaggagggcagggagagtgtctgagcctctcctctcttgtgagccagtgccctgcacagcccttgtgccccagagcatggctgatgtttctcccctgggtgggggtggcttgtgtccagctggaagagtcggaattcacctgtgcagcagctgtaaaggcacggaaagcgatggaggtggagatggaagacctgcacctgcagattgatgacatcgccaaagccaagacagcggtgagggtcagagtacacaggggagggcccgggtgcagagggagagttgaaccatgactgtcttcacccgacaccggcctttccctgccagggatttctgcagggtagcaccctcctctcccacctgagtcctctgctttctcccaactcaaagcagagtcttaagaggagggagagctggcagaagagggagccagccagggcgcacatctccccgtttaaccacctgcctctgggagcttggccgcaggccctggaatcataaataaaggcagctaatgtggctgagggatgtaaacaggtgcctagagattagcagaagctccgataagaggctgggatgctgggcttccttcccctccccctgcccagcccactgacaagcccaagagcagctaattagagcttttatttaatgcctcccttttaattccccacctctcccacggcccatccatccatagggctgagttttcactcctgggatgtggccacccgtaccatctcgggccaggagtgggccaggggaggagggtaagcttagctgttggcttcacacacagccccttagctacccatcctgctgctgagagatgccaatctcacaggtttgatttatcttgtgacatttgtgctcctcagcagtttccaggtgaataattcagattccttaattttgttaaaaaaggctgttataaaattaccattttatttaaatctgagttaataaatttcttggcggaggcttccccagctccccacagcccagtaacaagatggatagggcagagaaggagccaacgcagtcattttggtttggaattacaggctaatagattcgttcatttcctgaagctgctggtgcccgtcttttccccacccccacccccaggctgggagagccggatgacccaagagtggaccatccccagggagaacaaaatctaagtcagggggtgtcaccaacttgacaggtccttccctatgggctgatgtgggcagagtacatgccagtcaggctgatataactggacgatgggtcatttgtaataggcagaatttctaccttctcattagccttgaaagaattgccagaaagcagctaacaattagctcccagaagccccagggtcctcctgtcccatacaaacagctctgtccctcatctcactgcccagaacccaccaggtagcttctctggttctggaacccactccaacacgatctccccaccaaggagaggcgggatgggtgggacaggtttggacttgctgccccagggcctgcagacacaggcctgatgccctctgatctacccttgccccaaccagctggaggagcaactgagtcgacttcagcgtgagaaaaacgagattcaaaaccggctggaagaggatcaggaggacatgaatgagctgatgaagaagcacaaggcagctgtggcccaggtaccctgacaggaatgacaacagagtgaacatcctcggggcctgaaccacctcacaaatccctggctagattcctcctcctcctcctcctcctcttcctctcctattcttcctcttcctcctcctcttcctcttcctcctcctcgacctcctcctcctcttcctcctctccacttcctcccctgcgcttctccgtcacccgctcttccactaccactcccacctctcctcctgtttcatcccctcccccccccacccctcgcgaccccttccccgcttactaccccccccttgcattcccccacgctcnnnnnnnnnnnnnnnnnnnncctcctcttcctcctcctcctcttcttcctccttctcctcttcctcctccttttcctcttcctcctcctattcctcctcctcctctcctcttcctcctctcttcttcttcctcttcctcctcctcctcctcctcctcttcttcctcctcttcttcctcctcctcctctcttcttcctcttcttcctcctccccctcttcctcctcttcttccttttcctttttttgatatctgtaaccctggctggcctagagctccccatgtagaccttgtagactatgtagttcaggcaggtcttgaactcagatccacctgcttctgcctctgcccccacccctggctctagatacgtctttggagagacttagtctaggtgccctggcccatgctggggagaggttgaatgtttgactcgaggggacctttctcactcttgctctccttttccaggcctcccgggacatggcacagatgaacgatctccaggctcagattgaagagtccaacaaggagaagcaagagctacaggagaaggtaggtaccctgggtttccccggaagggagagctcaggaatcactgggcagaagccttgctctcccggtatggagggtgtttctctctaccaccagtaagccacagagcagtgtgagctggcaggaagagctaggcttgcagccatatctccatggtacatgtgttggcttcagctgccttgcttcacatttctgtcccctctctgctccctaacatccttcttcctttcagaagggcagtaacagtgccaaatgcaggggcaggcggggcatggctccgctgggcggggctcccctcaccctccaccgtgtatctctccctgccttgggtcttctagtcaccatggtgatgttgcctgtcccagacttggcgctgcccctccccgttccggacttactctggactcagtcctttctcctctcactccttccacccctagctacaagctctgcagagccaggtggagttcctggagcagtccatggtggacaagtccctcgtcagcaggcaggaagcgaagatcagggagctggagacacgcctggagttcgaaaagacccaagtgaagcgcctggaggtgggttcggcttcatgtgcaagccaagcagagctgccctagtggctggacccacgcatgctccgaagggctgagcaagccagggacactcctgagtcctctgccaagctgccgggccagctgacagggtgggagctcccttcccgcctgcctggtctgctctctgggccccgcagagcctgcctattttatattctgtatccgtgcctgctttctgccaagggacccgagcggcttagcttttcgtcttcatatttccctctgccacgagctccccctcctgtccccctcactcactctctggtagggtcataaatatgcagcggatggcaccactgctctgagggctgaagtctgctctgcatctcatggctcgctcatctccccccttcctttttacacccccccctttccctcacttcttgcctccctttccagctctgcttttcttctttcttttcctccatcactgtcctaggtctctcttattctcttccaatgacttcatttccctcctcaccccccaccccgtattctccttaacaccccacttttggttggcctctttccatgcttgattcctctgccccccacagtggctacttcatactctaccccagccccttcctcttctgctctcctataaccagcatgctccagccctccctgtgtgaaagagagcggcatcaggactgtgtccccgagggttcacctgtagccttgtcttgaagctcttcttctgagcttacggacatctgtccaagcaccatcaggcctgcctgagagcgtgttcagtgcggtggatggagagcttctctgttgcccctcccccagcaccctctctgtcagcagagcaggcagtaggagggggtggaaacaggtgggcagccaagggcatcacccacctggacatgggaagccagagagaactagagggagcgttatgccttctttactacccccaggaccccaggacaggtggtgacatttcaggccccacagcacatacagaatagggtttgtgcagctgctggggaccagaagaagccattggtggtggatgaaggctctgcctcctgcatctgtcacctcacttatctctcagagttccttctactcaaaagggcaatattgtggtttggactcctgagagataaatacagatgccccccgagtgaccctgtagcccaggctgtcactttgcagagccaggctggggtagatagtcattggaatgacactgacttggttctccctcacactctaacctctgctccaaatcatttcctgcctagcatcctaccgctgccaaggagaacacattcgtgtttctgaagtagacagattcacgaggctgagagagagagagagctctgcctgggtcttttaatcaaacactctcagcagaaccagttacctctgaacactggctgtagctctgggagcttctgggttcaatgtctctgaaaaagcccagatgaccatgagaacattcacatgacaggccagcctctgtgtagagctgccagagtctctgcagtaacagtcacccccgcctttcctcttccagattacctcttccaaagacccctgcagagatgcaggtgtcatctcccccctggaaggacagcaaagctcagagggagtcagatcagttggctaaccctacatggaaggagacctgagtttgctcagcacttatgtaaaaagccagatgcagtggtacttccttataatcccagaaatgaggagtaaagacaggaggattaccagggctaggtgggcagacagacagacagcctaattggtgagctctaggtcttaatgagagaccatatctcaaaggacaagatggatactacctaaggaataatacaggttgacttttaaaaaaagattttatatatgtgtgtgtgtgtgtgtgtatgtatatatatatatatatatatatatatatatatatatatatatagctgtcttcagacacaccaaaagagggtatcagatctcattacagatggttgtgagccaccatgtggttgctgggatttgaactcaggacctctgggagagcagtcagtgctcttaaccgctgagccatctcccagccctagactggcttctgttctacattcatgtagaacctacacacacacacaggaagacagaacagacaggggtggaggtgggttaaacgtaagtaaacctctagcatcccttagccatagctgagttggggcttggccagacttcctggtccagaccctgcccacagtgcctctctctggctgacatcctacctgccggtctttcctctcaacctgctcacccagaacctggccagtcggctcaaagaaaccatggagaagctgactgaggaacgggaccagcgcgccgcagctgagaaccgtgagaaggagcagaacaagaggctccagcgacagcttcgtgacaccaaggaggagatgagcgagcttgccaggaaggaagccgaggctagccgcaagaagcatgaactggtaatgtcctgctcttcataggtcccaagctggaggcctgccaagaacacacccaccccaccctgggctgggtggggtcacttcagtccccaagtcctgttaagtatatgcttacctcaccatgggttccggtaggggacagttcagtcctgacaggcaagtcagggtgaccgcacaaggtgaagccaagccccgccagccaacccagtagcccttgaatagagaagcctttggaggcttagaggagcaccagagtggctcctgcctgccagggagtgacttgctgcaggctccttcggagatgctaggggacattgtggtcctcctgtacactagacccccctcctaggagatggacctggagagcctggaagctgctaaccaaagcctgcaagccgacctaaagctggcgttcaaacgcattggggacttgcaagctgccattgaggatgagatggaaagtgacgagaacgaggacctcatcaacaggtaagaggtggagtctgtggcatttccggcagggcccaggccctctcaagcagcagaatcaggccccaagcgacatgcaaccccttacaccccacaaccaagctaccatatcatcttcccagtgctagacccaggtgggaaagatggttggggggtcgggtgggggtgtccaccatcctttcctcctgtgctctccttcccaggccccccatagcccaggctctggtgttgcctgttccccgtgagttatctccccgtttagctgcatttccgttggcgcctgccctactctagggagagcagagatttaagggctgtggtgctttgttacttgtgctagagattttctcgcataaaacccacccagggaatggttttggagaacgagagagatttgtagtcctaggctgaacagaaagccacaaatccagagggccggcagtgtggcagtggggctgggacttaggtagatcccagaggctccccacttcctgcctcagggtcaggtcccttcccatgcccagggtggggtggggtggggtggggcagggcagggcagggcagagcaggcagcccaggaaccttgctcctttgggatgagtgctggcagtgaatgaggcctggttctgaggattctgttgctcccttgtacctgatctcagccagccagagatgccattcactgaagaaagggagccttggatggggatactcctcaggatgtccctggatgtccccgtcggcttcttgtggcccctttgcccaccattttctttctgtttccagtttgcaggacatggtgacaaaatatcagaaaaaaaagaataaactgtgaggaccagagccatgtgctctttgcctctccccatgggtgtctaaccatccctaacacagggcttcctgccaggggcccctgccgcatgctgcatgcagacacagcctcctcacactctctcatgctaacactgctgactgtccttaggctggggtggaaggactggctggcagtgaagtgtgttcctagaaagctagactgatcctcatagcccgagtagccaggatggggctttattgcctaagtcccagcttctcctctctgggatccaagtgtgccaaccaccctggcctgtctctctggaggtcgagcagtcaggctacatcagtctacacccttgggctcttggaacccaagctgcccgaaagggacgggtatgttttgtgtttaaggtctgttatcttcctcaggcagatgaggggcatctcacagctgctcctttggagaaagcattcaggcagctaagctctgccctggcagggagaggagacagcggggttgtgtttacttgctccctgggggtacctcaggcagaggtggtagggaacacacatctgtgttggtatgcctgtcaggtggtgggagacccaggacatctgcccttctctgttccctcttcctggtgggggagctggaaagtggtgtagatatgcaggccttcaggcagatttgctgatcctctgtcaggttcgacagggttgcttttggaagttgttttttcagcatggcactgaatttcctgcctggcaggcctcctcccctggccaggatgggctggcggccgtgcaaaggactccgggagagctaatgataaatgtaatagtgtgtaacagtgatagagggccgctggagcccggttgtcacacacaattaatatcccctgccgttctgtctccgtttgtttgttcccccgtgattcggctcccagttaactaatagcacatgagcccggacataaattgtatttgacgcgaggtttaattccgaccatttaaaatttcaactgccccctgagcctgcctgcccctggagtttgtttacgggcctgattatttaaggaagagaacttgaacattgtctggattcttacaactaaacagaaggtgagggtaggcatgctagcttctcagaccactgacgactctgaatgtcaggaatgaaattcatattctgggcctcaatctgtccctagtgtgttccatcctgccattcttgggcagaaggaactctgagggctgataaaatgtgcattgaatatcatattctaaagcatagtcaggcacacagaccccctccccccccacacacacaccagcatgcactcaaagcaggtgcatgagaacatgcaattctaagcaggttccactgttagcagagaggctctgtcctcagcagctccaagttatcgagcgagcatgctaaggcgggcagaaaaataatgtttcgatttacttagagatacagttgttattgccataaccttaatgaaagcagtaaacagtgcagtattaagggagatttatacagaaacacttttaacatgtagacatagattttgcgatgcatacagcacctcctttctaaagccaatcaatatggttatgaacggcagtgataaattacaggctctgaagctacagagggaggttttttgcacgggtgtataaatcaggtagtattggcgttccatgggacccatgcaccacagtaaatctgccaggctcgaatgggcacagagcttgcattagtggtttgggggctgcctgctaaactcctgtttacccggggcatcggcaggcctcgcctctgttataattctgtatttgacggaagctcataaaatatgcctctttgttccccttccccatgtgcgtggctctctcatggtccctagaactgtggattcctctgatgcgtgtgtatgtgtatgcgcacacacatgcgcatgcctgtgcatacatgtgtgtgcccgtgtggctatttattcaagaacataattcaggaccagggccgctcttgttgatacagatgaaaggaaatttacatcaaggagaaatcttagcctatccacagcaggggatagggagtagacattttgcagaatttgcaaagtgcttgcactcagaaaccatctccgtgcccctgctgcttcatgagggggtcaccatgactctagcctcaaaattagactctttgaggctttcttgcaggtcctgagggtcagcctatccagcagtggcagtggggagcagggactggaggttgcctgagggagggatgaggagacccaggttcaagtcaacctgaggtcatgtggtaggtcatgaggtcataggacctgtttctgtcctatgtctagtaacccctgcttttataatgaagacagaaagtggtggtagttgtagccacagtctgaggcatgcacacacacacacacacacacacacacacacacacacacacgtgcatgtatttgtgtatgtggatatatgtatgtgggtggatatgagtgtgcttcagcgcatgtgtggaagttagagaatatcatatgtctcctagggattgaactcaagccatcttgctttgtggcaagtgccgttacacactgaatcatcttgtcagccgagacttctttttaaccgggagccattaggctagaatcgctaagtggatggcctgcctatccttttcatccagtaggccagctgagtagcttgtcactcataactgggatggaacagttggtgcccccattctcctcaggatcttcttagtgactgtcacacagtgtggtctgccgagcgaggggatgggcaccttgtgggttgtgtgctcactctaacctttctcttctccccaactcactgatgcgcatgccacctgcaccccaacctggcccaagatgcgccccgcccccttcttgctctccatcctggccagcgagtgattctcacctgcccagccttgcctaccctttgtgctcctcgccctaacagtgagggggactcagatgtggactcagagctggaggaccgggtcgacggggtcaagtcctggttgtcaaagaacaagggaccttctaaggcaccttctgacgatggcagcttgaagagttccaggtgagcactaggcctccagcagggaggagaggtcacctcagccaccggtcatgggtagacagtgtcacggcaccaagggtgcaaccctcaggctacgagtgctctctcctggcctgtggaaagcacacagaacagctgcctaaccagggaatgtcccatgtttgggtgtgggctcttgtgcaggcttaacctcatcccacctactgggtcagcaaccatctcactgttggtaccttgaaatcaagacttggttggggcactggggactctgagtcctagaggcctgcacagacaaccctggtcagctttggctctctggcctccatagagcggcaacccatacgcagagcccattcccagagagccagtgtgcttcctcccttctctcctcgctctctccttctgtgctcctcagcgcccacccctcaggcttgcctgctagtcttggaggcctgggggtttgttctcctattttctggccgatcataacctgatcacacagtcagctgcttctagaagccagggctcccactttgggtccatcgctggcctagtccctgcatcccctcccccacagagttccttgccgccttccccacctctccagagacaggctggataggaaaagtgatctctctccttcttttccaaccatcccagaccccttcccccaggtccagcccctcaccactggtacccagcggccccctgtaattggtttaatttattcgaccaaacaacattttgttattgcagataatggtgcgtccccgccccactgccgttcaccacagtgtggcacaaggctccaggtagttgacaatgaaataaattgaactaaacgttttagagggggaaaagtgatgaaatagaacaatagtctaatttacatgacattctccatgaagctattttcactgacgcaaattattttgcttcatttccttggatgctcttgctaccgctctgccagggctgtgccggtttctcctcctccctccctccctccccctgtgtctttattttgttaatccattctctctctctctctctctctctctctctctctctctctctctctctttctcctctcctcctcctcctcccccttccccattctcctgtcgttcactcgctctgggtctcttctcctgggcctcccttcccactcaggacggctctcaacagcctccctaaggagggcaaggggccagaggagagaccctcctctgtactcagctcccttagctaccgcaagaggctcaccctgaaggactccatcgggggcactggagaccaggactcgctcctcaccaccctgagtgagcgtgccacctctcctgaaaggccgcccaggaaggcccgtgggggccccagggaggaacctgaccaggcccagggcaggaggtgcgaggagctggacgattgtagctccatcttctcaggggttgggagccgccctggccggggtctggagaagcgctggggctcagactttgaccgctcctcaacagtctctgctccagtcagccgagcctcctcagccacgcgaggctccggggaggatagggctcgctcctcgctgagcttctcactgtcaggctcacccagctcccgccgccgtagcacatccaggcttgatagcttgtcaagcgccataagcccttcctggaaccgggcctcaggcctgggtcgggagagccctgactccaggctatccctcggccagagctgcctggatgagtgggatgatggagccagcgtggccctcagtgaggcacactcacagttcagccatccatcactggcccgaagcctgtctgtgccaccccagccacggggctcttcctcagcctcagcctctgtcattgagggctccagcgtccgacctgtcagtcgccactcctaccttgatccagacctggaggctgccattaacgaggtcttgagctacaagcctgtgccgttccagcggagcaggctggagcctgactctgaggatgatgaccggaagagcatccagagtgcccggagcgcacagctggagcacccagagaggggcagcagcatccgccgctctgcctctgccgcagatgtctcttcccgcagtggccgcaaaagccgaagcaagcataggagcaaacggagcagccccagccccagctccagctccagctccagctccagctcctccagctcagaaggttcctcagctcacaagcggcggcgaaaagggcgctctcggaagagcaagaagaaatccaaatcaagaagaaagaaaacagagagtgaatctgagtcctcgtcatccagtggctccaccgtctccggccatagccgctccagtgtgaaaaagggcccaaccacagacgttgaggaagcggggcaaactccaagacggtcaaagaaggaagagaagcagcgaaagaaagaggtcgacagcctcatgatgcggtacctgtaccgaccagagagtgactagctcagtaggtgccgccagactgcctggtctggcatggcgtggagtgcagcatggtgtgtcccaccctttgtgaactaacgtgctccccgcccctccaaacaccacctcaggctcccctacaacctcttgggcctcagagagcctcctggctcccacatgagctctgagcccagtcagctgactttgctgatgttggattagagctcccacctcaccctgagctacccgggctgtgtttttggaactaatctaccctgtaacatcataacaaacgtccgaacagctctgtttcataaaaagttatagttcagagagattaagatacacaactggcacataaggctaccaggagctaatggggtctgtttaacctttaaccttaactggctctccatgggctatatgcagagcatgcagatgacgtatacaggtcactgtgtcaccgacacccacatcagagcgtccatgcaacaggatggacccagaaaaggatcctagctgatgggatacttcggctgtgaactctgatgaggcactttgctctctgctctcccctctgctagctacctccctagcatggatctggagccacagcctacacggagccacaccctacagtagacccaggagacacctgccgcctccccaggcctcctacccacactcggcccacgtgtgggcgtcacctcagctctgctcatcttgtagagttctaatgaatagaaattagcagttgttgagtgacagccccctccctgctctcctgcctcccccagctcctctccccgtggggatatggggacacggggaggagatgtaacagtcaggccctgtgcccacaccttcaacagagagaggcagagcctgaatcactggaaccccattgttgccagtttccctggtgggcggtgacattttgagtcacccctgttgtgagatggtgggaagcattttcagcacgcggacatgcttgctgcttcccagaaggcacaaccccacctggggtcccacatttgtttcctagtcgtgaactaacacacctgttgcatgcgtgtgccatggggcatctggtgaaaggggaagttggcttttgtccatctggaaccgggaggcacagaggggaagtgactgaaaagtgggagtatatggagctggagcttggatccagccctggcttatggctgctccggcccaagctagaccactccttggtctctgcgctgctctgttgcttcccctgcccccgcacacaccccctccgcggtttcagggtactcaagggagagcagggagtctgcggcctttgttagttccattgggaggaaagataggagtcaaaatatttggtcaatgattttagtctccttaaggtttagccttgctaaagaccctgcaccccaggttgagtcagtttggtgggtggaaggggaggtctaggcacaaagaagaccaggcacctctgtacctcttcccagaaggaagcaattgccttgctgagcaatcccagactgaccggtgactagcagactatacctgaatccctctagcgtccagtcatatttcacagtgactaagacagaaagccctgtttctgcagcccccctctcacccacagttcagttgcctttgtctatggaaaagagccaactggtcccgaaaccctgtactgtgccactatgagacttggagctagcgatggtaaaatggtctccaattagaacctgccctactaccatgaagtgtgtggggtaggcagtgagggatgccgtgcaaaggcagaaggtggggtagagccccacctagggttaaggaccagtgaagaagtccaaaacacaaaatacagtgttgtcaccctgggctttcccagcaggaattagcttgtgtaccaaatcgtttgtgacagcacagagcaggagacaagcaggaggcttgtggggaaggaaagctttttaaacaatttagttaaaatgttccaattgccagccctgactcttgctctggggacagggagctgcctgctgttggccctactgatggtagtagcagtaaaagcagatatggagactggccagagagagctcaagaaagattgcaaggggtcttgcagctcctcagcccagggaagagcgcaggacagggtttgccccatgcttggttgtctctgcttctccgaggtgtctttagagcaacctgaccgctgtttatctgggcatctgggatgtgggaatggagtctgtgagaagagatgaaggatggaagcatcacagggctgtgccccatttatactcagacccccagccctggcatctgctcatgccctctgctcacagaataaccccactgtgtgtcctcaaagccaggcattccttagctggaaagcaaacctttagcacaggaggtacgaaaattccatgttaagaaaacaagcagccctcactaattcaggatccaaacaagcccaaggctaatgacctccattttttctgtgttacatagttagtactgagctttataattttgtcctggagatgctgtgaggccttaagtgcttctggcccatcagaataagactcatttatgttcagtctagtttgtattaagtgtgttttgtgctattctgattcctttaaaaatggtaattcattcatgagaaatacgataactattaaccagactgccccgttgctgagccattttgcataattgagcatatattttcccagactcttcccttccgccagggacacggagacctgtctttacataccctagctgctccccggccggcagtagaccttaggtttggtcttgttttcttgtctaatctagtggcaggagtgctcgaaggctgaggttcagttcaggtttaggtgttggctgtgaccttgggcaaggtgcttccttcttccatttgaggcagctctttcattatatgatactgggaggaataagacagaacagtgagtccaaggtagtagttctcagccttcctaatgctgcaacccttagtacagtttctcatgttaggatgaccccaaacataacattatttcactgctgcttcataactgtaatgttgctactgttatgaatcgtaatgtcaatatctgatatgcaggatatttgatatgtgaccccaaagggtcatccaaggggctcgggcagtgcttacgacaggaggacttttggtggaacctttacctctgcacctccactgccacctccagggaaacctaaactactgtctgctccctcatcttactttaaagatttatttatttattttatgtagctgtattgatggttgtgagccaccatgtggttgctgggatttgaactcaggaccttcgaaagagcagtcaatgttcttaaccactgagccatctctccagctcctcatcttactttaaaaggaccagtaaaggggcaccctcaggtttctagttcagaatatagtagacctagcaattgttgacacttaccttgtccaagtagaaggtcaccaggacctgtatcccttgtctcttggaacacaggcacccccgggtacaaacaaagctgggtccagggcaccagtagaggtaatgctgtgttgggctgtgtcttctccagggacattagactgtactgcatgggcttagggacagtggggacaggaggaggctctgggaaagaatgagagtggatggagccagagaatgtagtcctgtctgctctgttggatgttacagtccttctccctccaggggatcatacttcttcatatctttggagggacagccttccagagccaggggcccgattgaagactccaaggagttgttaaggacccctcccattggcccatcctcaaacaggtcctgccagcctctgtcccgagcctccgttccttttccagtagaggatgccatggtcaaggactgaagtcttccaggcccagggaaaccctgattaggggaaatagatcagacctggggtcctgccaggagtaatctacctgagagtttcctccttggacaggttgtagtcaagtagtcacctgccttaaaccttcatccgtgtgctcttggactgcttacacgggagcaagagagctgaaaactccgagtcccagggttcctccctcaggactcagtctaagcttctcaggggaaggagacaggaatgcacttcttaggcttatggaagcctggcccttgctgccaccagccttcccatcatgttagtctgaaaagcttaccaactgcagactctgtgctcctttggaccctggagcgtttgggtcttagagtgcttgagcagagctccgtggcccagcgtagaagtgttctttggccctgaccctgtccctctctccctgcagcccaaccagccactggaagccactcgcccctgacccatcggatgatgagcatgatcctgtggacagcatctccagaccccggttctcccacagctatctgagtgacagcgacacagaggccaagctgacagagaccagtgcatagcctgggatggctcacgactctcccaccccacagcctctcccaggatagaggggcaccactgcccccacctgactgccgatctgcatggaaaacaccttggctttctgtcagggggactttccaggctgtgggcgtctgacagctccacgcggcagaggtgggcgaagcagagtctctccaaagagagcttccgctcttgcctctgaacgccatgctcttagctcccgctctgggccactatggaccacgtcaggtggcctggcattccatggagccggtggtggacctccatctcagcctcctgctcagggatggtggataggttacctgctgggccgctcgaagtcgctgggccccatgggaaagagtcaggagggagcagtgatgcctcccctctgctggggtgagggctttctcttctcagtgcctgctgtctttttactgtttaatttaaatacccaaacctccatgcagctgcatccctgagagtgggaggggctgccgctgcagctggggcctgtgggatgccttgggaatctcccctccatcttcacttctccagaggcccttttctcctgcagcctgctgccaggggacagcggttagcagagccggggccctggttctttggaggcagggtggggaggatggcagctgggtgcttctggcttggaccgagccagcctcgttagagtattaagtgcaatgagcagttatttaagagctgatctcttccacctgcacccacccgcggcttccagctctgcctgcctctgaccgtattatagccggggccgctcattcggcgctgaggacctgtggtgggcacagtggaaggtagatgttttggtctgtttatcagactggagtcctaaccctttgtcatctttcttctgcccataaccctgtccccacacacttaccccagacacagcaacaagtggtctgttacttgttacttctcggtttcttaccataaagctcatctgacttttccactggatctgggggccccaaggcagtacctggtgctggacctgtttgccatcccccttcccttctgccattgctttgtactcattgggctgtgctctccctgtggacctgattgatgtaaggaaataaaaggccccttccctcctggccacaagtttccctgcctctccttgcaggctcaggggaagtccagggtggtcccgggcaggggcagaggtggaattctgatggggacatggaagaaccaccttggtctgtgtggccaatgtcactcactcccagagcctcaccaggtcacttgccatagtgggtaaagaggctgtttaaggaggacagagcctcccacatttgtgttgaggtgagtggggctggcagcttgtccccaaccccttctcaaaactttagtcactccagaggtgactttttggtcaaaatttggcagcatgttctctgttcctcagccctctttagccacagaaaactcgagaagcctaggatcactgccttagatggctgctcagtctctgcctgcaggcctgagctatactcgccagactttcgtggccttgcaaaagttatagggcagctcatgcagatgaggaagaaaccaaaggccttccctaccctcctcctcctcctcctcctcctccttctctgaacattatccatgtctagatctgttttccacaggcgttcaatggtctgaggaggtgggtgggaagagctctggtgatgtctgtctggaaagtcaaaagagggaaaagtcaccaccaaaacaagctggggagagcttggatccttctgggacaaaggcgcctgccctccaacaaagagaaaaggcgatgaaagtgagagcctcactgtgtagtccaggctgacctctaattcacagttctcctgcctcggcctccctaagccccagattgcaggtgcaaactaacacaccaggtctggggtgagaatattttctcaagtcaggggacttgtgttactcagtctgctcagcatttgagtcgcctcattaacctgggcccggtcctggtgctgagaatgaagtcctttcagatcggggacatcccagggtggaatcggacttagagcatatgcctcacctgctggtaagtatcatcttccgacctgagcggagagatctcagtgcctgtcctccagggatgggatcaggggccaccgcagaagggcagagaaggtgcttccgagctatgagctacgctatgggaagagaatgaatgcctttgtggagagggagactgcgaagggtcatcaaaacggtattcagggcttaggccttcaaggagaatgattgctcgggtagttattgctaggacatgcatggggaagaaagaacttacaggatggtcttgacacagagggataaacaatgctcatgccacacactgcctgggaaagcccgagttcacagtccgcctctcccccacccccaatgcttctcccagttcccacaaacatcctaacccaggttaggagggcagcacttccttcccttgtttcccactccagaggcccagaaaccaccaaagcctgtcttcacttgaggttactcctggagaactctgcaagctcctaagtacccacagtacctcttcccctaagatggttgtgatcccacaaaacaaagccactggccctgtgccccaggcccgcctcacagccaccctgagtccgctgtcaatcctccctgctaatttccagcctgcaggaataccctgactccagaattagaggcaagggaccaaagccctagggaagtccccgcagtgcccagacacatcagcagcaggcagtgaccccccaaactgctccctttgtcctcaagtcctcttggcagattatcccagttgtccttcccccattctgcatagtgagtttcagggcagttattttttttctgtctcacacacacacactcggcgcgctcacacacacacacttagatagagagagatatagagagagagatagattgttaggagagaatgccattcacatggccctgacaactgcttgagacatagctaacacagcctgttactaaagctatggcttaagctggatgctggatggtggtagcattggctnnnnnnnnnnnnnnnnnnnncccccccccccccccgtgcctggtggcacagacacttagcgatttgctccttaattgtcccccagctaggctgcgcagatgccgctctttaatctctcctgataaatgaatcgcgccgctcctttaatcatatgttcatatccaagccaatttgaatcaatttggcagggagcgtgttgcaagagatgccatgactgctgttctccccccagggccccagagcctgaaagctgcagtcctcactttcagcagagagcccaggaggcccatctaggaagaggagtgcctacctgaagtgaggactttttaaagtcagccacctcatttgcttcccgccctccaagcaggctgtgtgggaagagaaaacggattcccaaaggcctcaggagtgggagggacaggggatgagttcacagccagccttggtcactgaataaagggccatccctgggagaaagtgctgtcttaaatctaaccttaatccctcctgttcccctttcatttcctcggagccggttctcaggaacttggaacactttgtagcctcttatatagcaacacatgtcagaccagactatgctaatttgtccccgcctggtactcccagctacctcaactgctttcatcttcccctaggctatatcctctctaaatcttccagcggaggggcacgcctgatgatggacgagttctgcccttggggtagcttctttcccattgccccagttggaatccgggccagtgagaaaaatagcaaaagcaaacagctactgacaccacaacctgggaaaggggctgactcttctggcctcggtttccccatttgtaaagtgaggtggtgttgctggcacgaacctttggttgctaagttgagattctgttgctgccgccaaggcacccttgggtggcacccatggagttggtgagacgggtgctgaggaagttcatggtctgcctgggcttggcttccagccagcggcctctgactttcagcccctctttcatttcctattggcctcccttcctgactctgtcaggccaggtaggcgccctgtctttcactgtgaaactgggaaatcactaccatttattccgattttatttgcaagttcacagccctgattttagagctcagtagcttctggctccatcccacacttggagattctgctcttgttgctcccagaaaccacacacctccacagggtttctctgtgtagctttggctgtcctggaactcactctgtagaccaggatagcctcgaactcccagagatccacctgcctgtctatgcctcccaggtgctggaattaaaggcctgagccactgctaccaccatccagcatccagcttaagccatagctttagtaacaggctgtgttagctatgtctcaagcagttgtcagggccatgtgaatggcattctctcctctctctctctctctctctctctctctctctctctctctgtgtgtgtgtgtgtgtgtgtgtgtgtgtgtgtgtgtgagacagggtctcactaactgccctgaaactcactatgcagaccaggctggcctcaaactcatagaggtccagctgcctctgcttcctgagtgctttgattctgtctcttcccagatcaaattgcaagagtgatctggagtgatctggagtcatgccatgatgcttagcattgcccttttaatgatttcagatcaggaccaagggagcagcttcccacccctttaagtcttagggggagctgaagcaatgatggacctggaggctgggtggtgcttccaagattatcacctatttggtgaggaggtaacaatggctcctacgcattgagttactgggtccccagccctcacaccttgactgacatagtctctcccaagtctgttaagtgtcattgtcctctaaggtaactgaggttccagtgatgtcagcaaggtcctctgcttggatccagcagctggctgggcatctggaactattctaggcttgtcaggatgcagaagaagcaggaaggggagtgaccactgtcatggccccctccaacccttatgtgcttagtagtcaccagacctggcctgaggaagaaaacacttttggcaaattcaggagaaaatgtcttgtgcacatccatgttgctctttagaattttagacccccccttcatgcattatcacatttgtgctgtgctcccactgcgccaacagtttgaataacagttctgcacggctcagaatgcatattttaagcaatattcacttcatctaattttgtgatggtaagacagaacaatccggaccattcttgcgattcgatcggggaagaaagagatccaaagcaatagccattttggagctaacaaggatgctagatctgtttaggaggaattttacagagaaattgggttttctgcagtgtatgctcctctgatgggtcatatccataagggagatcccagagacgctgtgtgctttgtgattgaagttggtgacacaaatctcccagcagaatacttatatgtgcagatagaatttgcttttgatatcaaaagtcagctatgacagttttatcaaaaaaaatgttttaaaggatattaagttttgacaccgttcaggcaaattatatttgaggtgacttaagagtcaaagagtttccacattttaataaattttatatgttttgtgccagatttaccatctgactagattagggagaaaagcaaatgcattgggggaagagagggcactgaggggatttcaaagtagggaataaaaatttttaaagggagttaaaaaaaaaaaaaaaagaaatgctgctgtgtggaagatgtagccggcagcttttgaaacagtaagtctttaaaagacaggtcaacgactgcagccagacatataaaatcatatgtgatgaagaaggtccagtgtctcattttaactaacactggggcctggcaccatttgcaggttgtcatcctggggcagagtctagccccagggactactagatcatggaaagcaactgtgggggtggcactctctgacaggttttgtgccagaaggacaggtcctgtgaagtgccaccgtggaccttggatacacatgtacttaaccaccaagcaggtatctgggatcagaaatgggcccctgctcacaaggacctgctgaaataagccaacagagcagtgaggcaggttggggctgaggatgtagctcaagactcttgtctagcctatgtaacacctaggttctatccccagagtggaagaaggaaagggaagtgggagggagacagggagatggttttatattacatgtgacaacctgctgaggtagaggatgcctttaatcccaaccctcaggacatgggcggatgggtcttcgtgagttcaaggctagcctggtctatatagagagttctaggccagctaaagctatatcatgaaaagaaaataagtacacatgagaatgcaggttagttaataaatgagggagtcaggagacatgagtgtatgtgtacgaccttgggttctgttcctggcaatgcctatgggaaggagctggaagggtggtgagcatccgcagtcccaggtactaggccaaaacacgctttccctgttctcatctccacctctctgtgtgtctgtctctctctgcctctctccctctgtctctctgtctctgtctctctagtgtgtgtgtgtgtgggggggtgaggcatctgttactgttagcatgaaatttgtatgtgattttgaaagtcaatgcacacatggacactaacaccaaagagggtcccacactgacccacgtggctgacgagaagaatagtttttccttagtctcccctgtatagctgtcagctgtgtagggtaggtgggggttgggtaagccatgtggcaaagctgcttaaacactgcttggctccttgctcagggaatgtcgcccttaaagcagcaggcatctgctggcaggcctgagcgtggaagctgggaaagaaacagattggagggtggaagggtggggaggagaagagattccaaacctgtctcttccatcagcctggagccctgcaggtgatgggtttgggtaaggacattcctattgataaaggggttggagataaaattgagaaggtcatatgattatatatgccatatatatatatatatatatacacacacgtatatgtatatatgcatacacacacacacacacacacacacacacacacacatatatatatatatatatatatatatatatatatatatatatatatatatgtgtgtgtatataaattttcctgtctctaaagagacactgctcactgacccaacttcatactggttaatagatttgtgtatctaatgtctgttttatcctcttgaggaaaaggaaaaagcgttgttgtcaaatcaagaggccagggagtttttcctaggaaataggaaggtttgggtacagaaaaggccatcaggacttcagtcataccagaagttctgggaaggacagtgggtcccccagggcccagagtgcaatctccatgtgcctccccacccccacccctggctctccagtagaaatcagctacaaatctcagcttgttgggaacagatggccttggctgacgaataagccaccgcaggctgccccacctgttctggagctggaataatcagctcgagacaaacatcgatgctgaaataactcatggcagcgggcgatgcgcaggcacggattccaacactcctagaagcagaccctccccagccctccccgctccccagcccctggtggccatcaggaaaagtaatggagcagagaagatgattgaggcccaaatggagcaagattggcagggtggagggcagggctgagttcgatgacagggcgagactcccccaatcagggtgaagaattatgtctccggggtccttggagaaggtgcagagggtcggtgaacggatggcttggcaaggctgaagagactcgatccgtacagggcgggagagacccgagatgctgagttttgtttcattaaaggagtgctgtgcaaagagaacctagctaggagagtgactctcagctcacagcaacaaccacagaccttctcccaggctgctggtgggggtgcctggtgccccaaattccctccagttgctctcagcttcccctcacctccttgatgacatcagcagggctagtgtcccctgcctggtggaggcagatgagcccagggagacttgctgagtcaataggggtcaggcttcctagagagagcgagcaaagcttcaagcagtgactttctgatacagagcctggggcttctgagcccctagggcagcggttcccaggctgtgagtcacacattagatatcctgcatatcagatatttaccttataattcataacagtaggaaaattagtcgtgaggtagtgacaaaaataattttatggttgggggtcaccaaagcatgaggaactgtattaaagggttccagcattaggaaggctgagagccactgctgtagaggatggtaggtacaaaaggagaagagggaggggtaggaggagggggagaggaggaggaagaggaagcagcctgatggtgactctgcagccctagtttcatccctaaatgccaagtttctgtgcccatgtagcctgagtccgcagacattagaggacgtcctgtatggattgagtcttcccttgttatgtaggatcatggaaaaccccttctagaagccagttctgttctcaaaggggcactgggtccctgcttccctaagttctggttccaccgagtgtcaccgagctgccaccatttctgtttgtgaataaaagtaaaaagtgtaataaaatgacttttttttttttaacccttagagcctcaacaaagatcaacagtgagctgtgccccacctgcccacttcccctgccagttgatggcagatctgaaggttcatcaggaaacgcttttgtattgatcccccatagaaaagaaaatggctcttaaaaaaggcataatcacaatacttttatcacacttgaaaacaaattgatagttttttactatcaaatatttggcccatgcttaaattttcccgatgttattacatagtttttacttcacatatatttatacacatgttttatataaaacagatatcaggcctgtaactctgagtactcaggaagccaaggaaggaaaatcataagttcaaggccagcctaggcaatttagtctctgcccaaaagtcaaaagaaaagagggctggggctgaggaaatggctcagtgggtgaatctcttgtttgtaagccaaagacctgagttcagatccccagatcccatgtaaaagctggactcatagcacagtgctctagcaacaatcccaggaggctctctggccagctagcctggagtacttcacagtggtgaagaaggtgaggacagatagccaaggccttctgacttctgcacatggcaagcttgcacccacatttatccacatttgtatgcatgcacacatgataaaaatagtagagccgggcgtggtggcacacgcctttaaccccagcactcgggaggcaggggcaggcggatttctgagttcgaggccagcctggtccacaaagtgagttccaggacagccagggctatacagagaaaccctgtctcgaaaaaaaaaaaaatagtaagagtggggtacggctcaactgtatatcatttgactagcgtgtgtaggaccctaagtccaatccctagtattaaaaaatgaaaaggttggtttgtttcaaaacaagactcaaattggattaaaggacttataaaaaataaattaaaaaaaggttgtgttcacagccttgtctctgggggattctgatttaaatggtcttgggtgtcgccccggcgtcatatctttaaaaacctctccaagtggttttcatgtgcaaccaggtttgcacatgccctgggagaaatgccctgccctctcagcactcggaggttcctgcaagatcctcccatccagactgttcaatacatctatctcccaggcttcagccagcagagccagcagctccaagggttgccagcatgaacacactggctgggagggtacacagctcctcgggtgcctcaggtgtgctggaggaacaggtgtggctcctctgcaaattcacacactgtgctcatgctccctgctatgcccagtgctggttcttgcagattccccctccccaccttcttttgagcaaatagcaaaattcctgcctcaggaaaaagtgagaacttccccgggggctatactcattcggctgttcaagtgcctgccggcagggcagtgctggagctgagcgaaggcctactgggagtttggcagctgatggaagacaagagaggggattgatcaggatttgaacccagcacatttcagagaatctatgaaatggctctgtcttaagatgctggccacaggatcaacttaaagaagtatgctctggtctgtaagtgccctgtctcagcttggagctggccttgaacttccccctgcacctccctaccatctttccctcctgcgtcccccactccatgcctcactggatgttggtgaaacaaatctagcctaaaataatgagcaatcagctaccctgatgctcattttaggggcaggctgggcagggctgagggaaggggtagggagctgaatcatttataaagcttaataaagatgcagatgagcggtgctgagtaggaaccccagagctgggcttattcattattcaaagttatgcaaatgccaccgggtcctgtgtgatagaattctgcccctcgcccctcccccattcccacccccaccccagccgactgatccaacccaccctgtgtttcccttcctgcacttaacaacccatttccaatcctgcaggtttacagggatcctagattgccctcagaccaggagttttccagaggaattgccacatgccccagtctttaggtggcttctcga

SEQ ID NO: 2826 - DNA, 7414 bp, Mus musculus
gaggtggtggtctcagctgctggagcctttcatctgaggacaggagccactggcaagtccaaggaatctaagaaggctacaaggtggggtccaaagaccctgtgttaagcactcatagtcagctggggatacaacccctaaaaacagcacacccaccatgtttaacctcatgaagaaagataaggacaaagatggcgggcggaaggagaagaaggaaaaaaaggagaagaaggagaggatgtctgcggcagaactgcggagcctggaagagatgagcatgcgccgtggctttttcaacttgaaccggtcctccaagcgggaatctaagacgcgcctggaaatctccaaccccatccctatcaaggtggccagtggctctgacctgcacctgacggacattgactctgacagcaatcggggtagcatcatcctggactcaggacacctaagcacagccagctccagtgatgacctcaagggtgaagaaggcagcttccggggctctgtgctgcagcgggcagccaagttcggttcactggccaagcagaactctcagatgattgtcaaacgtttttccttctctcaacggagccgggatgagagtgcctcggagacctcaaccccctcagagcactctgcagccccatcacctcaggtagaggtgcggacgcttgagggacagctaatgcagcatcctgggctaggcattcctcgaccaggaccacggtctcgagtccctgagctggtgactaaaagattcccagctgatctacgtcttcccgctctggtgccaccaccacctcctgctctccgggagctggagttacaacgaagacccacaggagactttggcttctcactgcggcgcacaaccatgctggatcgggcccctgagggtcaggcttatcgacgggtggttcactttgctgagccaggggcaggcaccaaggacctggccttggggctggtaccaggagatcgactggtggagattaatggacagaatgtggagaataaatccagggatgaaattgtggagatgatccggcagtctggggacagtgtgcggctcaaggtacagcccatcccagagcttagcgagctgagccggagctggcttcggactggcgagggacaccgcagggagccggctgatgccaagacggaagagcagattgccgctgaagaggcctggtatgagacggagaaggtgtggctggtccatagagatggattctccttagccagccagctcaagtctgaggagctcagcctacccgaggggaaggcgcgtgtgaagctggaccatgacggagccatcctggatgtggatgaagatgatatagagaaggctaatgctccttcatgtgaccgtctagaagatctggcctcactggtatacctcaacgagtctagcgtcctgcatacactgcgccagcgctatggggctagcctgctacacacctatgctggccccagcctgcttgtccttagcacccgaggggctcctgctgtgtattcagagaaggtgatgcacatgttcaaggggtgtcggcgggaggacatggcaccccacatctacgctgtagcccagactgcatatagggcgatgttgatgagtcgtcaggaccagtccattgtccttctgggtagtagtggcagtggcaagactaccagctttcagcatctggtgcagtatctggctaccatcgcgggtaccagtgggaccaaggtgttctcagtggagaagtggcaggctctgtccaccctcctggaagcctttgggaacagccccaccatcatgaatggcagtgccacccgcttctcccagatcctctccctggactttgaccaagctggccaggtggcttcggcctccatccagacaatgctcctggagaagctgcgtgtggcccggcgcccagccagtgaggctactttcaatgtcttctactacttgctggcctgtggggatgccaccctcaggacagagctccacctgaaccacttggcagagaacaatgtgtttggaattgtgccactgtccaagcctgaggagaagcagaaggctgcacagcagttcagtaagctccaggctgccatgaaggtgctggccatctcccccgaggaacagaagacctgctggctcatcctggcttccatctaccacctgggggctgctggagctaccaaagaagctgctgaagctggacgaaagcagtttgcccgccacgaatgggcccagaaggcagcatacctgctgggctgcagcttggaagagctgtcctcggctatcttcaaacaccagctaaaaggaggcaccctgcaacggtccacctccttccgtcagggccctgaggagagcggcctgggagagggcaccaaactgagtgctctggagtgcttagagggtatggcgtctggcctctacagtgagctctttactctcctcatctccctggtaaacagggctctcaagtccagccagcactcactctgttccatgatgatcgtggacacaccaggcttccagaaccctgaatggggcggctcggcccgtggagcctccttcgaggagctgtgccacaactatgcccaggacaggctgcagaggctgttccacgagcgcaccttcctccaggagttggagagatacaaggaggataacatagaactggcgtttgatgacttggagccagttgcagatgactccgtggctgctgtggaccaggcttcccacctggttcgctcactggcccatgccgatgaggcaagagggctactgtggctcctggaagaggaggcactggtgcctggtgcgacagaggatgccctccttgatcgtcttttctcctattatggcccccaggagggtgacaaaaaaggccagagtcctcttctgcgaagtagcaaacctcggcactttctcctgggccacagccacggtaccaactgggtggagtacaacgtggctggctggctgaattacaccaagcagaacccagccacccagaatgcaccccggcttctgcaggactcccagaaaaagatcatcagtaacctgtttctgggccgggcgggcagtgccacggtgctctcaggctcgattgcaggcctggaaggtggctcccagctggccttgcgccgggcaaccagcatgaggaaaaccttcaccaccggcatggccgctgtcaagaagaagtcgctgtgcatacagattaagctgcaagtagatgccctcattgataccatcaagaggtccaagatgcatttcgtgcactgcttccttcctgtggccgagggctggcctggggagccccggtctgcctcttcccgcagagtcagcagcagcagtgagctggacctgcccccgggagacccctgtgaggctgggctgctacaactggatgtgtccctgctccgagcccagctccggggatcccgcctgcttgatgcgatgcgcatgtaccgccaaggttacccagaccacatggtgttttctgagttccgccggcgctttgatgtcctggctccacacctgaccaagaaacatggtcgtaactacatcgtggtggatgagaagcgggctgtggaagagctgctggagtccctggacctggaaaagagcagctgctgtctgggcctaagccgggtgttcttccgggcaggcacgttggcacggttggaagaacaacgagacgagcaaaccagcaggcacctgaccctgttccaggcagcctgccggggctaccttgcccgccagcacttcaagaagagaaagatccaggacctggccattcgctgtgtgcagaagaacatcaagaagaacaagggggtgaaggactggccctggtggaagctcttcaccaccgtgcggcccctcatccaagttcagctgtcagaggagcagatccgaaacaaagacgaggagatccagcagctgcgcagcaagcttgagaaggtggagaaggagaggaacgagctccgactcagcagtgaccggctagagacccggatctcagaactgacatcggagctgactgatgaacgcaacacgggagagtccgcctcccagctgctggacgcggagacagccgagaggctccggaccgagaaggagatgaaagagctacagacccagtatgacgcactgaagaagcagatggaggtgatggagatggaagtgatggaagcccggctcattcgggcagccgagatcaacggggaggtggatgatgatgatgcagggggagagtggaggctgaagtacgagcgagctgttcgggaggtggacttcaccaagaagcggctccagcaggagctggaagacaagatggaggtggaacagcagagcaggaggcagctggagaggcggcttggggacctgcaagcagatagtgatgagagtcaacgggcactgcagcagctcaagaagaagtgccaaaggctcacagctgagctgcaggacaccaagctgcacctggagggccagcaggtccgaaaccacgagctggagaagaagcagaggaggttcgacagtgagctttcccaggcccacgaggagacgcagcgggagaagctgcagagggagaaactccagcgggagaaggacatgctcctggctgaggctttcagcttgaagcagcaaatggaggaaaaagacttggacattgcggggtttacccagaaggtggtttccttggaggctgagcttcaggacatttcttctcaagagtctaaggatgaggcttctctggccaaggtcaagaagcagctccgggacttggaggccaaggtcaaggaccaggaagaggagctggatgagcaggctgggagtatacagatgctggagcaggccaagctgcgtctggagatggagatggagagaatgagacagacccattccaaggagatggagagtcgggatgaggaggtggaagaggcccggcagtcatgtcagaagaagttaaaacagatggaagtgcagctcgaggaggagtatgaagacaagcagaaggcgctgcgggagaaacgggagctggagagcaagctctccacgctcagtgaccaggtgaaccagcgggactttgaatcagagaagcggctacggaaagacctgaagcgcaccaaagcgctgctggcagatgcccagatcatgctggaccacttaaagaacaatgccccgagcaagagggagattgcccagctgaagaaccagctggaagagtcggaattcacctgtgcagcagctgtaaaggcacggaaagcgatggaggtggagatggaagacctgcacctgcagattgatgacatcgccaaagccaagacagcgctggaggagcaactgagtcgacttcagcgtgagaaaaacgagattcaaaaccggctggaagaggatcaggaggacatgaatgagctgatgaagaagcacaaggcagctgtggcccaggcctcccgggacatggcacagatgaacgatctccaggctcagattgaagagtccaacaaggagaagcaagagctacaggagaagctacaagctctgcagagccaggtggagttcctggagcagtccatggtggacaagtccctcgtcagcaggcaggaagcgaagatcagggagctggagacacgcctggagttcgaaaagacccaagtgaagcgcctggagaacctggccagtcggctcaaagaaaccatggagaagctgactgaggaacgggaccagcgcgccgcagctgagaaccgtgagaaggagcagaacaagaggctccagcgacagcttcgtgacaccaaggaggagatgagcgagcttgccaggaaggaagccgaggctagccgcaagaagcatgaactggagatggacctggagagcctggaagctgctaaccaaagcctgcaagccgacctaaagctggcgttcaaacgcattggggacttgcaagctgccattgaggatgagatggaaagtgacgagaacgaggacctcatcaacagtgagggggactcagatgtggactcagagctggaggaccgggtcgacggggtcaagtcctggttgtcaaagaacaagggaccttctaaggcaccttctgacgatggcagcttgaagagttccagcccaaccagccactggaagccactcgcccctgacccatcggatgatgagcatgatcctgtggacagcatctccagaccccggttctcccacagctatctgagtgacagcgacacagaggccaagctgacagagaccagtgcatagcctgggatggctcacgactctcccaccccacagcctctcccaggatagaggggcaccactgcccccacctgactgccgatctgcatggaaaacaccttggctttctgtcagggggactttccaggctgtgggcgtctgacagctccacgcggcagaggtgggcgaagcagagtctctccaaagagagcttccgctcttgcctctgaacgccatgctcttagctcccgctctgggccactatggaccacgtcaggtggcctggcattccatggagccggtggtggacctccatctcagcctcctgctcagggatggtggataggttacctgctgggccgctcgaagtcgctgggccccatgggaaagagtcaggagggagcagtgatgcctcccctctgctggggtgagggctttctcttctcagtgcctgctgtctttttactgtttaatttaaatacccaaacctccatgcagctgcatccctgagagtgggaggggctgccgctgcagctggggcctgtgggatgccttgggaatctcccctccatcttcacttctccagaggcccttttctcctgcagcctgctgccaggggacagcggttagcagagccggggccctggttctttggaggcagggtggggaggatggcagctgggtgcttctggcttggaccgagccagcctcgttagagtattaagtgcaatgagcagttatttaagagctgatctcttccacctgcacccacccgcggcttccagctctgcctgcctctgaccgtattatagccggggccgctcattcggcgctgaggacctgtggtgggcacagtggaaggtagatgttttggtctgtttatcagactggagtcctaaccctttgtcatctttcttctgcccataaccctgtccccacacacttaccccagacacagcaacaagtggtctgttacttgttacttctcggtttcttaccataaagctcatctgacttttccactggatctgggggccccaaggcagtacctggtgctggacctgtttgccatcccccttcccttctgccattgctttgtactcattgggctgtgctctccctgtggacctgattgatgtaaggaaataaaaggccccttccctcctggccaca

SEQ ID NO: 2827 - protein, 2029 aa, Mus musculus
MFNLMKKDKDKDGGRKEKKEKKEKKERMSAAELRSLEEMSMRRGFFNLNRSSKRESKTRLEISNPIPIKVASGSDLHLTDIDSDSNRGSIILDSGHLSTASSSDDLKGEEGSFRGSVLQRAAKFGSLAKQNSQMIVKRFSFSQRSRDESASETSTPSEHSAAPSPQVEVRTLEGQLMQHPGLGIPRPGPRSRVPELVTKRFPADLRLPALVPPPPPALRELELQRRPTGDFGFSLRRTTMLDRAPEGQAYRRVVHFAEPGAGTKDLALGLVPGDRLVEINGQNVENKSRDEIVEMIRQSGDSVRLKVQPIPELSELSRSWLRTGEGHRREPADAKTEEQIAAEEAWYETEKVWLVHRDGFSLASQLKSEELSLPEGKARVKLDHDGAILDVDEDDIEKANAPSCDRLEDLASLVYLNESSVLHTLRQRYGASLLHTYAGPSLLVLSTRGAPAVYSEKVMHMFKGCRREDMAPHIYAVAQTAYRAMLMSRQDQSIVLLGSSGSGKTTSFQHLVQYLATIAGTSGTKVFSVEKWQALSTLLEAFGNSPTIMNGSATRFSQILSLDFDQAGQVASASIQTMLLEKLRVARRPASEATFNVFYYLLACGDATLRTELHLNHLAENNVFGIVPLSKPEEKQKAAQQFSKLQAAMKVLAISPEEQKTCWLILASIYHLGAAGATKEAAEAGRKQFARHEWAQKAAYLLGCSLEELSSAIFKHQLKGGTLQRSTSFRQGPEESGLGEGTKLSALECLEGMASGSELFTLLISLVNRALKSSQHSLCSMMIVDTPGFQNPEWGGSRASFEELCHNYAQDRLQRLFHERTFLQELERYKEDNIELAFDDLEPVADDSVAAVDQASHLVRSLAHADERLLWLLEEEALVPGATEDALLDRLFSYYGPQEGDKKGQSPLLRSSKPRHFLLGHSHGTNWVEYNVAGWLNYTKQNPATQNAPRLLQDSQKKIISNLFLGRAGSATVLSGSIAGLEGGSQLALRRATSMRKTFTTGMAAVKKKSLCIQIKLQVDALIDTIKRSKMHFVHCFLPVAEGWPGEPRSASSRRVSSSSELDLPPGDPCEAGLLQLDVSLLRAQLRGSRLLDAMRMYRQGYPDHMVFSEFRRRFDVLAPHLTKKHGRNYIVVDEKRAVEELLESLDLEKSSCCLGLSRVFFRAGTLARLEEQRDEQTSRHLTLFQAACRGYLARQHFKKRKIQDLAIRCVQKNIKKNKGVKDWPWWKLFTTVRPLIQVQLSEEQIRNKDEEIQQLRSKLEKVEKERNELRLSSDRLETRISELTSELTDERNTGESASQLLDAETAERLRTEKEMKELQTQYDALKKQMEVMEMEVMEARLIRAAEINGEVDDDDAGGEWRLKYERAVREVDFTKKRLQQELEDKMEVEQQSRRQLERRLGDLQADSDESQRALQQLKKKCQRLTAELQDTKLHLEGQQVRNHELEKKQRRFDSELSQAHEETQREKLQREKLQREKDMLLAEAFSLKQQMEEKDLDIAGFTQKVVSLEAELQDISSQESKDEASLAKVKKQLRDLEAKVKDQEEELDEQAGSIQMLEQAKLRLEMEMERMRQTHSKEMESRDEEVEEARQSCQKKLKQMEVQLEEEYEDKQKALREKRELESKLSTLSDQVNQRDFESEKRLRKDLKRTKALLADAQIMLDHLKNNAPSKREIAQLKNQLEESEFTCAAAVKARKAMEVEMEDLHLQIDDIAKAKTALEEQLSRLQREKNEIQNRLEEDQEDMNELMKKHKAAVAQASRDMAQMNDLQAQIEESNKEKQELQEKLQALQSQVEFLEQSMVDKSLVSRQEAKIRELETRLEFEKTQVKRLENLASRLKETMEKLTEERDQRAAAENREKEQNKRLQRQLRDTKEEMSELARKEAEASRKKHELEMDLESLEAANQSLQADLKLAFKRIGDLQAAIEDEMESDENEDLINSEGDSDVDSELEDRVDGVKSWLSKNKGPSKAPSDDGSLKSSSPTSHWKPLAPDPSDDEHDPVDSISRPRFSHSYLSDSDTEAKLTETSA

SEQ ID NO: 2828 - DNA, 127044 bp, Homo sapiens
  misc_feature (1)...(127044): n = A, C, G or T/U
ggtcttaaactcctgggcacaagtgactaggttgatcctttctgaatcactccaaccataataacataaagctctctttgtacagcacttgaccattgtatgacctcatttgatccttacaataaccctgcgaggtaagagtttgtagctgcaattgcacaggagtggagatggagaggttggcgtttgatgaagcacctgtgccaagtaagtggcaaaggcagggctcaatctcagccttttaactccagaagcatttgcctggctgcctcctggttgtagatgtccatagtctggggagctgggctcctggctggcagggctatggatcccctgctcactgtagaatcaggcagaggtcaggaaattcttggaagtgtagaaggagccccacagctatgtgtagatcagtgcaagagtaaggctgtaggttcatagaaaggccactacataaacttatgccatcaggggtttgtaagaggggccatattctatgcaatagccaggctcttaaacaaatttttctgtggtaaaatatgcataacctaaaatttacctttttttttttttttttttaaagacagggtctggctctgtcacccagggtggtgtgcagtcatgtgctcatagcccactgcagcctcgaactcctgggctttaattattttatgtataaaatagttaatctctgcattttagctattttatgtgtacatttaaattattttatgtgtacaattcagtggcattaagtacattcacaatattgtacaaccatcaccactatccatttccagaactttaaataatccccggtagaaactccatacccattaaacaatgactcacaattccccccacccttagtccatggtaacttctattttctgtctctatgaatttgcatattctagttagctcatataaggagaatcaaacaatatttgtccttctgggtctggattctttcacttagcataacatttttaagggtcatccatgttgtagcctgtattaaaatttcattcctttttatggctgaataaaaatgtgcatacgttgtatgtatatgccacattttgtttatccatttatctgttgctggatagactctttttatattcttatatttcaagtgaagacaatcattaatttctgatatcttaaagtatcgtttcagagacaactggatactatgtgcttccagatataagaaatattcttgccaaaaaaaaatcaaactcaaagctgatcaagccttagatctatctaccaatgataggatatcaaactacattatgtggatgcaataaacaaaatcctgactgtgagaaaatctataggataaatgaccatgtttcttcaacaaataagttgcagggggaaaacagaaagagatagaagggaaacctgtagattaaaatatacttaaaagtcatgtcaactcactgcaatgtgtggaccttgattcaaacagacattttttaaaaaaagacatttacggagacaattggaatttatggagatcattccatcatggagataatagaatgtttgacgatattaaaaaattattgtttaaggccgggcatggtggctcacgcctgtaatcccagcactttgggaggctgaggcgggtggatcacctgaggttgagagttcgagaccagcctgaccaacatggagaaaccccatctctactaaaaatacaaaattaactgggcgtggtggcgcatgcctgtaattccagctactcgggaggctgaggcaggagaatcacttgaacccaggaggcggaggttgcagtgagccgagatcgcaccattgcactccagcctgggcaacaagagtgaaactctgtctcaaaaaaaaaaaaattattgtttaaaaattggtatgaccattgtattatggttttgtttaaaaaataatcctggctggcgcagtggctcacgtctgtgaccccagcactttgggaggttgaggtggacggttcgcttgagctcacgagttggagaccagcctgggcaacatggtgaaactccgtttctacaaaacaaacaaacaaaaatttacctgggcatggtggtgcgtacctgtagtcccaactacttgggaagcagaggcaggagaatcacttaagccccagaggcagaggctgcagtgagccaagatcgtgccactgcattccagcctgggtgatagagccagaccttgtcaaacccttaccttttagacatacacaatgaaattccctttctttctttctttcttttttttctttctttctttcttctttcttattttgacagagtctctctgttgcgtaggctgaagttcagtggtacaatctcagctcactgcaacctccacctcctggcttcacaggattctcctgcctcagtctcccaaatagctgagattacaggtgtgtgccaccacgtctggctaatttttgtatatatatttttttaacagacagggtttcaccttgtcggccagctggtctcaagctcctgacctcaagtgatccacccgcctcagcctcccaaagtgctgggattacaggcatgagccaccgtgcccagcctttttgattattttgagacagggtctcgctctgttgctcaagctggatgcaatggtgtgatcttggctcactgcaacctccgcttccctggctcaactgatcctcctgtctcagtctcccaagtagctgggactacagacacacatcatgccaggctaattttttttgttttgtatttttttgtatttttagtagaagcagggtttcaccatgtcagccaggctggtctcgaactcctgacctcaagtgatctgcctgccttagcctcccaaagtgctgggattacaggcatgagccacaacgacctgcctgaaatttttttttatcctaattttttttttgatttttactttttttgagtctcactctgtcacccaggctggagtacagtggcatgatcttggctcactgcaagctctgcctcccaggttcacgccattctcctgcctcagcctcctgagtagatgggactacaggctcctgccaccatgcccggctaattttatgtatttttagtagagacggggtttcactgtgttagccaggatggcctcaatctcctgacctcatgatcctcccaccttggcctcccaaagtgctggaattacaggtatgagccaccgcgcccggcccggcctgaaatatttttatataaaattatttgatatctgggatttgcttcaaaattatactcagtgtgggggttggggagtaggtggaaagatagttgaaacaatatttctgtgagttgataactattgaagttgtatgctggctacttgggggtttattatattattttgtttacatgtatatgtgtttgacttcctgttagtagcttttttacctcatttcagagacgagtttcttcattttggactgatcttcagccaatactctaagaatttagctttaagtttcctggagagcattctccacccacactccaagtttctgcacaaagggtaaaggatcttaagctaataaatgcaataagctaataaatgtttgaggaacaatatttaaaggtgtgcttttgacgtttgaacaacaccagctatcaggcagatttgcaattctgtggacttttaaaaaagcagacttgcttattttcaattctttttggagagtcatatcgtggtaacttaccacatgataggcatcatcttacacactttaccatttgctatatcttctaagcctcacagtaactctacatattattatcagcctccattttacagatgaagaaatagaggttcagagagattaataattcctaacacttgttaaccacttactgtgtttcgagcactgggctaattgctttaaatgaatttgcttattttattatctcacacccttacaaggtaggcaatattaatattattattattattatttttgagacggagtcttgctctgtcccccaggctggagtgcagtggtgggatctcagctcactgcaacctctgcctcccaggttcacaccattctcctgcctcagcctcccaagtagctgggactacaggcgcccgccaccacgcccggctaatttttttgtttgtttgtttgttttttagtagagacggggtttcaccatgttagccaggacggtctctatctcctgacctcgtgatctgcctgcctcggcctcccaaagtgctgggattacaggcgtgagccactgcgcctggccacattattatacctcttctgtagatgaggaaattgaggtttagagaggctaaggagcttgctggcagctgctagagccaagcatcctctctgtgaggccccaaagcccaggcactcaccactccacccaggatgcagcccagagcttcagggcaagcattccaggctctgctgtttattagtcacagtgccttgggcaaattaattcactttcccaagcctggtttctaatctgtgaaatggggataagactagcatctccctaatatggtaattctggggattaagtgagacattggattaaggggttagcatagtgcctgacccatagttaggctcccttgatataagtgatttttattacccagcttctttctggggtggagggcttcttgattaaagtcggatcattttaggactttaggaatcttctggaaaaattggccttcccatgaccatctgggtgattttatgtggatactgctctggcttttttctgtgcgaagaggagaggggtgctttacttttacttttacttagagctagggcagggtttattctggcatttgggaaggaaaagactaaaatcaagtgacgaagaaccagagttactgtgtcagtgtgagtgctgccctggagtttcagtcttgcttagtgtctgaaactggttcctggttcaggcaagaagagctctcagggacaccatatgctacccagagagtgccctaggtgtagacacatgtaaataaaagagttgttgactggcatgtggtggctcacgcctgtaatcccagcactttgggaggccaaggcaggcggattacctaaggtcaggagtttgagaccagcctggctaacatggtgaaaccctgtttctactaaaaatacaaaaagttagccaggtgtggtggcgggcgcctgtaatcccagctacttgggaggctgaggcaggagaatcgcttgaacctgggaggcggaggttgcagtgagctaagatggcaccattgcactccagcttgggcaacaagagtgaaactcttcctaaaaaaaaaaaaaaaaaagagttgttaatatacctattcatttcactgccatggtgtagggaaaagaatgggctttggagccttagggacctcagtttgaatcctgactctgctactcttaggctgggtacaagtcacaaagctgtctgtgcttcatttccacaactatgagttaggaaagataaccaagctaacagctatagaatgcttaccatgtactgggcattgttctttttatatattaaatcatgtaatttttaaaaattaataaatacaaggccgggcaaaatggctcacgcctgtaattccagcactttgggaggccaaggtgggtggattacctgaggccaggagtttgagaccagcctggccaacatgatgaaaccccatctctactaaaaatacaaaaattagcctggtgtggcggcacatgcctgcaatcccagctacttgggaggctgaggcaggagaatcacttgaacctgggaggcagaggttccagtgagctgagatcacagcactgcactccagcctgggtggcagactgagatcctgtctcaaaataataataataaatattattttaaaaatcagtttaagttcacagccaaattgagcataaagtacagagatttcccatatgccccctgccccgacacatgcacagccttccccacgatcacactcttcaccagagttgtacatttgttacaatcgatgaacctacattgacacatcagtatcccccaaagtccatggtttacattaggattcactcttggtgttgtacattttgtgggttttgacaaacacataatgacatgtattcaacagtgcggtatcacacagaagagtttcactgccctaaaaatcctctgtgctttgcattttcatccctccctcaaccttaatccatggcaccactaacctttttattgtctccatagttttgccttttgcagaatgccatatagttggaatcatacaacatgtagccttttcagatcagcttctttcacttattaatatacatttaagtttcctccatgtcttttcatggcttgatagctcatttcttttttagtgccacataatatgccattgtctagatataccataggttatttgtccatttacctactgaagttcatcttggttgcttccaagttttggcaattatgaataaagttgctacaaacatcatgtgcaggattttgtgtggacataagttttcaattcatttggataaataccaaggagtgggattgttggattgtatggtaagaatatgtttcattttctaagaaaccaccaaactgtctttcaaagtggctataccattttgctaccagcagagaatgggagttcctgttgctctacattcttgctagcatttggagttgttggcatttcggattttggccaaaatccaaatttaggtaaataaagtagttttacctcatggtcatcttaatttgctattctcttttattttttatttattattattttttgagacggagtcttgctctgtcacccaggctggagtgcagtggtgcaatctcggctcactgcaccctctgcctcctgggttcaagtgaatctcctgcctcagcctcctgagtagctgggactacaggtgcatgccaccacaccaggctaatttttgttcttttagtagagacagggtttcaccatgtaggccaggatggtctggatctcttgacctcctgatccacctgcctcggcctcccaaagtgctgggattacaggcgtgagccactgcacctggctttaatttgctattctctagtgacatacaatgttgagtatcttttcttttgcttactactatctgtatatcttctttggtaaggtgtctgatcaggttttttacccatttctaaattgggtggttttcttattgttgagtttttaaaactctttgcatattttggataacagtcctttatcagatgtcttttgcatatttttagtagagacggggtttcaccatgttagccaggatggtctcgagctcctgatctcatgacacacctgcctcagcctcccaaagtgctgggattacaggcgtgagccaccgcacctggctttaatttgctattctctaatgatatacagtgttgaatatcttttcttttgcttactgctatctgtatatcttctttggtaaggtgtctgatcaggttttttgcccatttctaaattgggtggttcattttcttattgttgagtttttaaaactctgcgtattttggataacaatcctttatcagatgtcttttgcatatattttatcccagttgtggcttgtcttctcattctcttgacagtcttttgcagagcagacatttttaattttaatgaagcccagcttatcagctctttcttttatggtgcctttggtgttgtatctaaagagtcattgtgatactcaaggtcatctaggttttctcctatgttatcctctaggagacagttttatagttttgtgttttacatttaggtatataatctattctgagttaatttttgtgaagggtataaagtctgtgtctagaccccccctttttttttttttgcatgtggatgtccagtttgttgaaaagccccatgtgttgaaaagactaagcttatataattttcaaaacaaattttgagggagggagtcactgttattatcccaattttttggatgagcaaagtgaagcacagagaggtgatttataaaaaatcacccagagtaacacagctagtactttacagaactgagattttgaatccaggcaatccagctccagagtccatgcactcaacccctatctataataataatgtctccctcataggttcattgtgaggagtagagatagtgtctagtatataataggtactcaggaaacactaatgatagtcgttgtcctacttagcctgcaaggttccgctcaaatgtcatgtttttggggttttttttttttcttttttggagacagagtcttgctctgtcgcccaggctgaagtacagtggtgtaatctccgctcactgcaacctctgctccccaggttcaagagattctcctgcctcagcctcccaagtagctgggattatagacatgcactaccacgcctggttaattttttgtatttgtagtagtgatggggtttcgccatgttggccaggctggtcttgaacgctggcctcaagtgatctgcccacctcagcctcccaaagtgctgggattacaggcataagccaccatgcctggcctcaaatgtcatgtttttgaagctgctcttctcactcctcaagccaaataagcctcccatcatagcacctatctcatcatccaagtaatgccagcatggtgaaccctactactgtcacagctcaggtctacctgttccccatgtgatttccctggagatatgccatgtctgatctccttctgtgtcaccccaagtgcctggggctgcacttggcacttagcaggcagtttgttaaattgaatttgagttgcatgttattccaaaatgtgtatcccgcctgggtctattcctcaggaactccctaactcttactcaactctctgctttctgagcctccttgctccagccttccctggtctgtcaggttgggctgcccttgcctggagaagttcctgtttgggctgtctagggaggtagcagcatttgtctgctacacccttcttcctgcaccaccccactcagtttcttccacattctggcacaccccactccagcatggacactgcccagggaagtgtccccatttctttctttctccaaactctagacatagcacctatcttggaggcctggtatctggatgtcccttggcctctcccaggaagtataaactgtcttcttggtgggtacagcagctcacttgatatttacagcacacagtggacccagggacagactgcattccaaagagcttctgaaagtgttaatcttggcattggtgaactcctttagggagtgagtggcacttacagccatggctcccgggccctggtacgcctcttgatccactccattttgaggcagggctgtatcagaccaagctattgggagtctgtttttaccttggggagtgcattctggcagtgccatctcggacatggcaggcagtacctggtctggactgagcctggggcaccatccagcagggccctgtgtgtgcctctgcagagccaccttgggaggaggcggccagtaagacttaattgcttcctttagacagcactaccttgaacacagcctgcagagttcggtgcctgccttggacagcccctcttctatacgttcatcatgaccctggtgcctgtcctaggcagtgccactcagcccctttcggacccttttcggacagcctccagtgcccagtgcagacagaaactccaggcagggcctctctcagacacagcgagaggggcttcggagtccacagcggacggaggctgccagggcagcgcccggcccgcctggcccacgtctggcggcgcgcactggcgctgccaggcaggccgggcgtttatccccacagccgccagcagggagctccctttcggctcggcctgcgcggtcgctgggggcggcgctgagctgcgccgcgctgcgctctgctccatccctgaccgggccgaggctgctggatgccgcgtctccgcttctgctgcctgccgggcgggctccggtggccggtgagtgccggtcggcggcggcggccgctcggtggcgggcccggcttggtggggcggcggggcgggctccggccgggagggagggcgggcgggcggcggggcccgccggctcctcctcctcctcccccgtcccctggaagcagcggcccggactcccggctcccgtccctggcggcgccgtggagctcgacgcccgggggtgggggccgatcgggagcggcggggaagggggaaccaccggcccttccagccaacctggggggcgcagggaggcaggacagggtggccttcagtgtggggggatttggggcttggaggcgcccaggtggcccggagctgcggggtgggggctgcagcctcgagggtggggggacttctcctgcccccgtccaggccccacgatggagcgagcgagagagcggggcgctgaggaaggcagcggggaaggggagcacctctaccgacccttttatccctcccagcggccttcactctttcactgccgggcagactgcgggctcctctcaaaggagcagctgctagacagctggcaaaacaatggagaccccgcttccctgggccccctcctcttgggacagaagatgagagggtgaatggtggcaggctttggggattagggagtgcaggctgtgccctgagactgaatgctcacctcacctttccctgcagaggggtggggtgcgtgtgggaaggtcggacaagctgccccaggcctctggagagaccgccccgacgccccgccctgctaacctgtcatgccagttgtttcgccaatgggaaggggaggtggtaggggtggctgccccctcaccctgccccttgttagtgggggtgcgctccttggtcccaaacccggccaggagtgtgggtcatgttcctgggtgcgataaggcccgcagggacaggccaggcattggggctttgttttgggggtggagatgggggagttgccctactgcaaggcacatgtgtcttgctgattagttggaaaggttgcggccagaatgagctagaggtggggggtgggggagatggggaggaagacagccagtttgtttttgagcgggtattcattttgcctgaccactttgccaatggggcatgtgtttggcgctggcctcatagtttgtatttgtgtggggagggctgggggaatgcttcctgagagggactgtcctggctagggctttcattccctcagatggccaccccgaattaaagaattggattccctccctgcttcaccctgccaatgacttgggctagttagtgtgggttcgtcttgtcttttggagcccctggcgtgtctgtggccgagaaggcctcatcagtgcccctgtggcaagtgagctctgggaagtgtgtatgcactggggtgtgctggaagggaggggaggccacctgggtgattaagagcaagatcacctgagcaggacggtgagtacagagcccattgaatcagccgcctttcccttgtgctttggagcccttttcttgagcaggttggtgccctgttgttgtggcaacaggcctggcctaatgttccccaccctttttagttcaggggctactttctatctggagatattgaaagttgctctcctgaggtctctggcttcctgacaagcctcactggctctttgtccatggcttcccacctcctcagcttcctctctgtttttttgtgatgaagtctttccaggaaacatcctcctggtttctggatttgacatgacgggttatatatagcctcgggtggaggtgtgcttgtccattttgggttgaggacatgggggttgtggcctcaattccaggaaaaccatggctttgggggcagctattgtgttgagggattaggggaatgagaagggttgtaggtgggggtggagggtgggcatgggaggggccacaggctggcggtcacttcctttgggagctttgaactttgaacagttgatgacctggtgcctggtagctctgagtgtctagtttgtttactctctcctggcctggcccaggtgccagagtgtgtgcctgagggcttcctcctgcgccccagactttcctcatgtgggttatgcccttcctgactcccacctggtctctcagcctcactcctgggctgtctgggtagccagccagttccctggaggccccctcactggccctggtagtggctattcattgaggactgcatgtgtcttcagaaactgggcctgaaaactctgggtcccccagaggcaggtacctaaaggtggactgggtggggcagaactggggctcatgtgaaagggagaatccaccctgctgaggtggagctgggagttgttggaactcaggaagccttcatctggacttgctgtgtcacaggtcttcagggcagcagggctgttcttaatccttcaaaccagaggtctctcctcagccagatcctctcacctggggtggacgccacaggcaggagccagagcatccacgtgagctgggttttgttggtggcctggggtcccaggcctgagtgtggtgggaaaactgaggggctctggctggttgtagtttaaaggtttggggcagtaggagggcccagcccactgtctgctgtaattgacaggttcccacaggacttgggattggtagggcagcttgatggagtttaagttctgctttgggtcagacccccgggtgctttaagatctgcacaccccaccccatcaccatttcttccccctagcattttccaaggtggcctgaattagaggagttggggaggtgccgaggtaggagctggattgggaggggtggtgagcagacctggtgagcctccacttcccaccttcacttccctgcccttcttttgaggtaggaattgcagggcttgtaaaatgtcaatttcccttgacattttaaacagtttagagtcaggcagcagttttggttgttagactgatgattttacaggacccagggccctttctgtctgccaagtagtttatcatcacttacaagagattattgtgattattctctaatattcagagaggttggatgatgggctgaaggtcacacagcaagtcagaggcagagcgggattacaacctgcagtgtgtggttgagcagaatagctctccagcagaggctgagggccaaatctgagctgtcaggcccttgaagataactgtagctgaaatagtggaggcttagagaggggaggggacttgctcaaggtcacacggaaggggatgttagcggaactgagcgccaggcggtgcacctggaagagcagcagggaacctggcgaggccgcaggagctctcccgctcgcgttcctccatggcccgcgggattgctgccttccgggggagatgggatcgcagcgggaggcgccgcggggctgcggctgcgccggcccagccgcggggaaacgccaagggccgcccggctccccgcgcggcggcgtgagggctggctaatgtcacgtgagaagcgtgcagtcggcgtgagggagcacacctggagccagataagctccgtgtgacctggcagggagtcacccggcgctgcggagctcagcacagccggccgggaggaggctccccctggagcacggggccaggccaggtgctggctacccctccggccgctgctacaacccttggcgaggggcagagcgcggggagagagccggggtcccggggctggaggaaacggccgctcagggaggtcagaggccaagggagagaggccggctctctcgggaaagtatttcctttgtatttatttatgagtgtggtctgggggtgggggtgggaggactgacctaagtatctatccaccacagccaactctgggcacccttgtcttgggactctaacgttatagtttccatttcctgggttttttttttcttttgccagctgctaggtgacccatttaaatgtgtccccacttacagccacaagacaccagtgaactctattttaaccaagtcccccaagccactgaaactttttcaagacatgaaggcaatccttaaactgaccattaccctgtttgcagctttactgctggtggattgcctactagtttgtccatttttttttagtctggaaaaaagttgaatcattaggtagaaagctaaagcgttactaaagtgttacccttcttctcccctactctccagagatgaccactgataaatttttggatcgaatttttccagactgctgttttttttgagaaggagtctcgctctgtcacccaggctggagtgcagtggcgcaatcttggctcactgcaacctccgcctccggggttcaagcaattctctgcctcagcctcccgagcagctgggattacaggcgcccgccaccacgcccggctacttttttgtatttttagtagagacagggtttcaccatcttggccaggctggtcttgaactcctgacctcgtcatccacctgcctcggcctcccaaagtgctgggattacaggtgtgagccactgcgcctggccagactgctttttaaaagcttgttatatatattttaggcactatatatgtttatagtttaatatatgttttataaaatatcatcttatataaatatttaaaaaatttctgtagtaggccggacacagtggttcacacctgtaatcccaggactttgggaggctgagataggcagattgcttgagcccaggaatttgagaccaggctgggcaacatggcaagaccctgtctctacaaaaaatacagaagttagctgggtgtggtggcgagtgcctgtagtcccagctactcaggaggctgaggtgggaaggatcgcttgagtcccaggaggttgaggctgcagtgagccgagatcgcaccacactctagcctggaggacacagtgggaccctgtctcaaaaaaaaaaaaaaaaaagatgaaataaaagtagaagaaaaatgatagataattccactccctgaagctcctaggtgtaagcaaatacacatttaccagatgaatgttcttataaaaaattaaaatatagcccgagtgcggtggcccatgcctataatccagtactttggaggccaaggtgggtggaccacttgaagccaggagttcaagatcagcctgaccaacatggtgagaccccatctctgttatttaaaaaaaaagaaaaaaaattaaaatatggatgaaacacaagtctatttgacccttctaaaattccagtctcctccccagagcatatatttttcctacacatatgcaaatattgtacacaatgtacatgtaatatattcatgcacatatatagatataggtttttaaattttagcaaaattataaactatcctgcaacctattttttcacttaacaatatagtatagaatctttccaggtcagtgtatacaaatctacttcattctttttacttttaattatacaactgctcagttgtataatttagcttttttttttgagacagagtctcgccctttcgcgcaggctggagtgctgcaatggcgtgatctcggctcactgcaacctccgcttcctggattcaagcgattctcctgcctcagcctcctgagtagctgggattacaggtgcgccactacgccggcaaagttttgtatttttagtggagatggggtttcaccatgttggccaggctagtctcgaacttctgacctcaagtgatctgcctgcctcagcctcccaaaatgttgggattacagttgtgagccaccatgcccagcattttatttttttttattttttttattttttgagacataatctccctccacccaggctggagcacagtagcacgaatcttggctcatgcagccttgacttctaggctcaagtgatcctcccacctcagcctcccaagtagctggtatcacaggtgtgcaccactgcctagctacttttaaaaaatttttttgtagagtcagagtctcactgtgttgtctaggctggtctcaaactcctggactcaagcagtcctcccgccttggcctcccaaagtgctggaattagaggcctgagccgctgcacctggccagttttactattctctagtaaggacttttatatttatagacttgctattataaacaatgctgcaaggattagccatgtatattatgtgaatgtacctatagatgtcttataatggaattgcccaaagaatatgtacataaatattttcatatgccaggtgcagtggtggtgcctgtaatcctagctactcaggaggctgaggcaggaggattgcttggggccaggagtttgagaccagcctggacagaatagcaagaacctgtctctaaaacaatttttaaaaagttagccagtaatggtggcgcacacctgtagtcacagctactcaggaggctaagacaggaggatcacttgagcccaggagttcaagtctgtagtgatctatgattgagccaccaaactccagcctgggtgacaaagcaagaccttgtctcttaaaaaaaaatttttttttcacagataccactgacttgacctctgaaaatacattagttggtgcaaaagtaattgaggtttttgccattaaaaagtaacggcaggccgggtgcggtggctcacgcctgtaatcccagcactttgggagccgaggcgggcggatcacgaggtcaggagatcgagaccatcctgggtaacatggtgaaaccccgtctctactaaaaatacaaaaaattagccaggcgcggtggcgggcgcctgtagtaccagctactcgggaggctgaggcaggagaatggcgtgaacccgggaggcggagcttgcagtgagcagagatcgtgccactgcactctggcctggtgaaagagcaagactgcgtctcaaaaaaaaaaaaaagggccgggcgcagtggctcaagcctgtaatcccagcactttggaaggccgaggcaggcagatcacctgaggtcaggagttcaagaccagcctgaccaacatggagaaaccccgtctctactaaaaatacaaaattagccggtcatggtggcgcatgcctgtaattccagctactcaggaggctgaggcaggagaattgcttgaacccgggaggcggattgcagtgagctgaaatcgggccattgcactccagcctgggcaacaagagcgaaactccgtctcaaaaaaaaaaaaaaagtaacggcaaaaaccataattacttttgcaccaacctaccaatttgtgtttccaccaagacttatgagactccctgcatcccatgccctaattgattgatattatcaaccttgatagtttttactaaactgctaattgaaaatagtatacctcaatttcacatgtctgtgaatgttatggaggctgaatacctgttcatgtttgatggccatttgtatttctgcccctacaaattgcctgtccatagtatccttggcactagctacgtgggccctctggactcaagccagtgtgatccagcttggccttgtgcttatcaagttaccttcacttctttgggctttactttccatgtacaaaggttttgacttattttagtcatacttgtgtactctgttatcctctctactgtgtcatttagactgcaaaaactgtgccctgctactattaggtacctctctgagggtaattaaatatatttcatttaattcccccaccttaggtggtaggtaccattattatctccatttttatagatggggaaatggaggcatggaggccttaagtgatttgcctgagatttcatagctatttactcatattttttttcatttttatttaatttttttttttttagacagagtcttgttctgtcgcccaggctggagtgcagtggcatgatctcggctcactgcaacctctgcctcccaggtttcagcgattctcctgcctcagcctcctgagtagctgggattacaggcgcatgccaccatgcccagctatttttagtagagacaaggtttcaccgtgttgaccaggctggtttcgaacacctgatctcaggtgatctgccctcctcggccttccaaagtgctaggattacaggcgtgagccattgcgcccggccctgtttactcagatttgttcacaggtttgttacttgatatccaaagcctgagctctgacactgggcttatttatctttatgttgcttgcctttaggaagtggctgatagatacatattttttcccaaaattttatcacaatgacctgcaaacattcagaaaagttaaagaattttgcaacgaataccctccatttcctagattctacaattaacattttcctatccttgcttttacacatctgtatcccttgatccatccatcaggctatggttttttttttttttctttctttcttttgagacagggtcttactctgttacccaggctggaatgcaatggcatgatcgtggctcaatgtagcctcgacctcccaggctcaggtgatcttcccactttagcctcccaagtagctcccacaggcatgcaccaccacatccagataattttttgtattttgagtagagacagggctttgccatgttgcccaggcttgtctccgactcctgagctcaagcgatctgcccgtctcggcctcccaaagtgttgggattatagatgtgagccaccttgcccaacctcatcaagctgtcttaaaattttacacatctcaaagtaaaacgtagacatcagtatatttcgccccaaatactttaacatacatatcattcactagagttcaatatttgtttatagttcttttcttttgagtggatatttacaaacaatgaatgcacaaatctttttttttttgagatggggtcttgctctgtctcccaggctagagtgcagtggcgcaatcatcttggctcactgcaacctccgcctcccaggttcaagcgattctcctgcctcagcctccctagtagctgggactacaggtgtgtgctgccacgcccggctaattttttttatttttattagagacggggtttcaggatggtctcgatctcttggcctcatgatccacctgccttggcctcccaaagtgctggtattacaggcgtgagccaacgcgcctggctgaacgcacaaatcttatgtgcaccatttgataacttgacaagtgcatatacttatcaacccaaaccgctatcaatatacaggacatgaatatcaccccaaaaagttccctcatgcgatcccactcctacccccaccataggttagttttgcctgcactagaacttcatataaagagaatcatacccatatgtgctctttgtcaaagacttctttccctctcacttgacatcatgattttgaagtccatccccattgtgtgtatctttagttgtttcttttttcttgctgagtagtattccattgcatgaatatgagcattgtttatgcactctgatggacagatagatgtatatttgaggttgatggtcattgccttcgggatgcttactctcttaaagtgatagagcagctgagttgacagattgtactttctttttgtttttggggatagtaagagcaagattattcgggtccataccctaacttacatagatgccttccttttcttaaaattaggaaaaacttcttagagtatgatgaggagagaaacgcagaaaaggaggtcaggaaaattataaggttacctttactggagtggagggagagggtaggagaggaatgggaggcagatggaaactgcagcccgggatagggggtaggaaggtagtggtatcagagctgttggagactttggacctgaggccaggaggtgccggaaagtgcaaggtctacaagaaggccatggagcagcagtcgcattgcagatctgatcctggacaggaggctgcaggcagccaggcagctctagactcaggagagaaccagtccacagccaggcctggcgattatggggatggcagtggggaagaggtgccttgtgagctgtgaagattatggtggcaggacaggggtggtgagggaagggctggcacagcctcattttctgaaggccccagggttgggatgagaggggtgcctttggcagaaggttaataacttaacctgtgtccacaggagacttagatatttagaattttagagccagaagagatctagatcatgtagttcaaccttgagcagagtgacaggctcaaggtcccccagcgattttttggcagatccaggcctagataccaaatctcctgaaacttctggccagcgccatcccttgtgctgctgctgtgaccgtctgctgtcctgcctgctgcaatgacagtgaggaacaagcttttgctcagactttttcagggacctttccagcccaaagatcctagaattctgggagatcctttccactcatattactcagcgatctagcccccagcaaagagccaggattgggtaagcattatagaccgagaattgggcgtcttggtgggacagcattctagtcagttgggttctctgtggttgaactgaggccatgatactcttgtttgtcccatccaagtccccaaggtggatttctttcttcatttcttccacaagtgcccctggagttatcttctaaaccatccctttaagatggtgcaggcagtggtgggtaaggtataaggtgggcagtaacagctgaagaccccacatcttggtttatggtaggtctgtgccacaccccatcaacagtcaggaggagagagactccccttgtcacagtagagccccgaagagagaatgctggctgtcaggtactcctccaccccaaatcagtccagacctacctggccaaggcccctggctgtgtgccttttgggccctagatttcctgttttctaactcccaggtactgtgcatgtagcatttagaaccaacaagttcaaggctaggcgcggtggctcacgcctgtaatcccagcactttgggaggccgagacaggtggatcatgaggtcaggagatcgagaccatcctggctaacacggtgaaaacccatctccactaaaaatacaaaaaattagctgggcgtggtggcgggcacctgtagtcccagctacttgggaggctgaggcaggagaatggcgtgaaccctgggaggcagaggttgcagtgagccgagatcacgccacctctgcctcctgggttcaagtgattctcatgcctcagccacccgaatagctgggattacaggcgtgtgccatcacacctggccagtttttgtatttttagtagagatggggttttactatgttggccaggctggtctcgaactcctgacctctggtgatccgcccacctcggcctcccgaagtgctgggattataggcatgagtggtcttgaacttctgacctcaagtgatctgcctgcctcagcctcctaaagtattggggattacaggcatgagccactgtacctggccttgaattatatttcttatggacagcactgctctagaaaggagatgagttggtatgtcaggagcaacacaagtcaggatgctgggcagggggaagcaattagccattgcactacggcctttgggaatttctgaccttgatgccttcctgagcattgtaccagggttgaaggatggtccctctcagtagactggggatcccggagggccctgcttggttgtaggggtggagcacacagagaggaaaggcctgtccagggcctggcaagaggccattactagaagggataagcttgtagatcctctgtgtgaaactcagaggggtaggctttcagagagagagaaaaaatgtcatttaatttccaattaggtggcatggcctatttcttcttcttgttccctgctggttagaacaagaaagactctctcaactcttcccaccaggtttttattggtcctgtccccagttagatgtgcagggggttgggtaggttggtgggtaggtttcacacaccctggggctgggattttctttcaggctaccacagttttcttcctggggctatatttaggtgttggtctggggaaaaggatgtgaattttttaggatcctgtttatccagtggaccctaccccacccccacctcgcagctgtctatcctctgtttggtctggaacttcccttctttctcttgctgctttactttggtcacccaggccctagaaagaacacaatatttgccactgaatcccaacatcaccatttattagctgtgtgacaactaacatatacttaattttctgtatcccattttcttcctttgtacagtggaaataatgatatctaccttgtaggaatgctgtgaggttcagaggagatagtgcatgtaaagtgcctggcattaggcctagccagtggtagtcattaaataaatgttggttcctttgagttcttctgttaggcggtggctaagggtgctactctagggataacaggctcaggaaagagtccaaagaatgggatgtctgttgcttaaacgaacattgtctgtgggaggtgatgttgcattgagtcccttttctttttcctttgagtttgaatcttttttttttttttgagacagggtctcactctgttgcccaagctggagtagtgtgatcatagttcactgcaacctcgacctcctgggctcaagcaatcctcaaattcccaagtagctaggaatgtgggcatgcaccagcatgcctggctaatttttaaaattttttttagagatagggtctcactgtgttgtccaggctggtcttaaactcctgggctcaatcgatcctcttgcttcagtctcccaaagtgctatgattacaggcatgagccaccctgcctggcctgtgtttgaatctttaagtcaggtcccaggttggtttgaagcattctctcaccaggaggtcaggtctcccacatactacctccagatacacctaagccttggtctatcaaagattcaaggaaatgacaggctttggaatctgggcttttaccgcctttttggaatctgggcttttaccgccttatctaaaccttaagtttccttatttgtaaaatggggtaataatagtaactacctatagaagggttgtaaggattaaatcagtggagacaatattgggtaaggcagagtgcctggcacatagctagcacccagtgaggagtagctgtatcatttggttatgtctggactggagacacatgaggctctgttcgaataacctttctctctgtgtgtttctgtttgcagcagcaaagtggggcaccaaggccctgtgctaagcactcataatcctctgggggtgctacccctacaaacagcacccccaccatgtttaacctaatgaagaaagacaaggacaaagatggcgggcggaaggagaagaaggagaaaaaggagaaaaaggagcggatgtcagcggcagagcttcggagcctggaggagatgagcctgcgacgtggcttcttcaacctgaaccgctcctccaagcgtgaatccaagacgcgcctggaaatctccaaccccatccccatcaaggtggccagcggctctgacctgcacctgactgacattgactccgatagtaaccggggcagcgtcatcctggactcgggccacctaagtacagccagctccagcgatgacctcaagggtgaggagggtagcttccgtggctcggtgctgcagcgggcagccaagttcggctcactggccaagcagaactcacagatgattgtcaagcgcttttccttctcccagcgtagccgggatgagagcgcctcagaaacctcgacgccctcagagcactctgccgccccctcgccacaggtggaggtgaggactctagagggacagctggtgcagcatcctggcccaggcatccctcgaccagggcaccgatcccgagcccctgagctagtgactaaaaagttcccagtcgacctgcgcctgccccccgtggtgcccctgcccccacctaccctccgggagctggagctgcaacgacggcccactggagactttggcttctccctgcggcgcacaaccatgctggatcggggccccgagggccaggcctgtcggcgtgtggtccactttgctgagcctggtgcaggcaccaaggacctggccctggggctggtgccaggagatcgactggtggagattaatgggcacaatgtggagagcaagtccagggatgagattgtggagatgatccggcagtcaggggacagcgtgcggctcaaggtgcagcccattccagagctcagcgagctcagcaggagctggctgcggagcggcgagggacctcgcagggagccatccgatgtgagtgcttccctgggcacctgggctaagcagggatggggaatgtgggcacctcctgcttgactgggtaatcggggtacccaagagctgttatcagagcctagcagtgtgtaagtggggaagccctgctgctctctgagcctgtggggaagcatgaactcaggagaaggtgccccatgctcataatcctctgggggtgccacccctacaaacagcacccccaccaggtttaacctaatgaagaaagacaaggacattaaaggagtcacaccttcgtctctcaaccttgtctgggagctgaggacaagtccccaaaggttcactgcagtagaattctgagcagtttggccaggcctcatggttttatggttccctcctgtgttctgtgtctgttggattgacctaactgaattcagcggaatgcctttctcaacggtgctgggctagaccaagctctgcctgaaccttagtttcagccctggagcccttgagagagctctgctgttggttagtaattaccgtgaaagtattcagcttcttcattacaaggacaggtgaggggtttgggcaccatatttcctgagccctaaattggggtgtataggctaacatgtgtcacttccagatataagagacaatctggacagtaaaatacaatatttccatggtatttagatcttggggataaaaaaggacaaatgatttcaaattagggccgtcatggaacatctgagatgtatagctggtatgattatatctttgggaaagatgacctcaggccagagcctcctcttgcccctgagtgagcaaggaaatatcaggtgaggctgcagagaaagcaggggcagatcataaaggaccttgtaagtcacagttggaattcagatttcatcccagtgaaatgggactattgaagggttcgaagcaggggagtaactggatctgatttataatggtcacttgggctccaagagtctttattacctctcctggaaggagaaaaagcatggacctggaaaagcaagagggataaaacctacacagatagtatgtcctgactgtcactgagaccccagctgcccgcgcaaaaagagcagcaggaggcacaggagcagagaggtttagatcagatggaggagcggatctccatggggcatcaagctcactaatcccaggggtcttttgatagggtggctacatagcagtttgaatgtcctgcctggagatagtatacgaaggacaagtgaccacctctggccatcttcccttcccagctgtgggttttaggaccgtccagatctggcccctgctgcttgaccaggaccttttggtactaagtgaccagccagatgtgtcaaagtcagaaatgggaggaagtgctaatgggaggaaacaggcagagtcccggtcccagctttctcccagggaggggaagcagctgctactcaacccagtagtaccttgggcctgaagaggggctggcagtggtagggtcagactgtcaggaagcactgtagttgggttccaggccttcctttaacccggagctagctgggtttaggcagctttgctagtcagggaagggtagtgaatgggaggaggaggcctgtgtggaagacctggactcttcattccagaagcacacattgagcacctactatgttttagccaccaggttaggtggaactcagagaaccacgaggtagagagggaagaacaaggaggggtctttatgtcagaagcaaagactgggctgggtggtggtggctcacgcctgtaatcccagcactttgggaggctgaggcgggtggatcacttgaggttgggagttcgagaccagcctgaccaacaggaagaaaccttgtctctactaaaaatacaaaaattagctgggcgtggtggcgcatgcctgtaatcccagctactcaggaggctgaggcaggagaatcacttgaacccgggaggcggaagttgcagtgagccgagatcaagccattgcacttcagcctgggcaataagagctaaactctgtctcaaaaacaataacagaagcaaagactaacatgttgccatgcctgtctgcgttcttccaggctaacgctgcttttaacagatggaattttcttcttaaagaatgaatcccccaggggattgttgccagctccctgctgaaccacagcaaggcctctgtggggccctgggcctggcatcccagatgctgtttggttttctctttatagcacagggatcatcctggcatctcagattttcctagctttcccttcccaactatctgctgctatcccatccctggggaagtagatggtttagctttggaggccctggtggattccaagttatagctggtatccctgaaatgctggctcactctagctcctatggggtaagcccagctggtgcccagaggacttcttccccgagcctcagcctgtttcatctgccagaggacacagtagcaaaccccatccccatgcatctcctagagccatgtggcaggataaggagacacatagggctgaaagaagcccatatcttttctcacccaggtaggtggtggggactcataccacaagcagagaggaccagggtgagcccagcgtttccagcttcctgggacagggctgggagtggcgtggggtgctgcacctcttctgtaccctcagcctgtatctcctcctcttccttttactcctcctactccctgtcttggcagcagttctaatcccagttatgcgccaagagaagtcttcccgcctcctccagactcctgggagggataccctgatgactgtagccccacagggacagctcttgctggccaccctgccatcaggccatccatcaactgtgtccacacattgcctgtccccagggagctctgagggagctgactagccatctgttatcttcctgcacacagatggggccaggcccccggctcctctccatggcctgtttagaaggccccagggagacacagccccttgggtttccctctcacatggcgtgtgtccagaatgctgggttcacaccttcatgtgtcctggtagctgctagatgaggttccgctgggagcaggggtgagccacagtggtagggtagatttgtggcctggtagaaatcaaccagcaggcctgggagaacaccgttttcttctgccatcatccttccacctgcccatccattagggaagcatttgttgagcacttactgcatactaggtcctgggctccagcggtgagcagcacataatcccagccccaaggagctcatagtaagcgggagagatgttccagtagcagaccatgacagtaccctctgagaagctcaaccacaggggccagtcctggtgctgggagtgcagcagaggggcttcaagtccagtcttgtggatgggtcagcgaaagctgacatctgggtagtagatgagtgaagcggaggcaagaggaagggaaacactgtcacaaacacatgccaaggcctaaagttatggagagagaatcacatatttcaggaataaggctgggagacggtgtgtgggaagggaaagctgggagaagcactaggaggcatccacgggagccaggtcatggaggcccctgtgagccgtgctggggaacgtgaactttaaccaaagggcactgaagcaatttaatcagggagcaataggaacaggttttaggaaatcactctggctgcttatggagcatgctctagggtgtagcaaagttggctgtggggagagtggtgagggagtgattgtgatcctagaagaatggatggagacctggactcaggtagaggcagtgggatggagagccatctcagactcgagcaactgagtcagactctggggtcttggtgacccactggtaggggcctgagggagaggaggggtcatgtgaccgccagagtactgggaagatgctacattctttcccctttgattccttagggaaagttcttggggggcatctgtatttggatcagttactcttaagtttgctgaaggccaagtgtttcctaagtctggtgagattaggggagatgttggtaaagttgaggatctcaaaaccccagttggatcaaaattccctcctccacttccataagtccggatgggaaagtcaaggcccattgagaaggggcagaggccaggctggagactagggcctgggagaggagaaggcgagtctgtctgtatcctcagtcggtccattctaggggaggacaaatggagtcccttaggacgaggcatgtcctcctgcatctgggagtataggacttttctgctgagctcagaaaagcccacccagctaaaccctggccaatgtggttgtcctgccatggagagccagaggtgctggccagaaagcaaggcctcctgagcatttttcttttttttttttttttgagacagggtcttgctgtcacccaggttggagtgcagtggggcgatcttggcttatatgctcaagcgatcctcccacctcagcctcctgagaagctgggaccacaggcacacaccaccacacctggctatttttttttttttttttttttttgacatggagtttcactcttgtcacccaggctggaatgcagtggcgcgatctcagctcactgcaacttccgtctccctggttcaagcgattctcctgcctcagcctcctgagtagctgggattacaggtgcctgccaccacgcctagctaatttttatatttttagtacaggtggggtttcaccatattggtcaggctggtctcgaactcctgacctcaggtgatccacctgcctcggcctcccaaagtgctgggattataggcgtgagccaccaagcccagcctaatttttgtatattttattagagacagggtttcaccatgttgcccaggctggtctcaaactcctgagctcaagctatctacctgcctcaggcctcccaagtgctgggattacaggcgtgagccactacacctggctctccctgagcttttgagaatgtggtgggaagggagagggggtcttaaaggaaggcttaccactccctcccagccaagtctagtcgctgtggtaggggtacttctcctggtggaccgtgaggctgctagttggaggttttagtgtgtggggtggagtttctagtcaaaggctttcaggctgtcgggttcctcatgaggttgccatgttcacataaaccacctccacgctcaggtgggtttgggagaggacatgttacagtggaaagagcatgggctttggagccagaaagacctgggtttgggttttaccaaagttatcaaacctttcagagcctcagtgttcacttttccctcagtaaatatttaatgaagttgacctaaggaccgggcactgtgctagcactgggggattaaataaacaaaatataatctttccttgaggaagcatagacctaagtaaagaaatgcaaagctgctatcgcagaagtctgtgcaggcatacagtggggcaggaggaagttctgcctgggggaagtggggggcaatcaggagaggcctcctggtgaaggtgacctgtgatctctatgaaataggcctattctatcctcccagaggttgagaaggttaagttggagaaagatgcatacccagtgaattcactccaattgcctctgagaagcagaatagaattgcaggctgaaaggagacttgctttttattctgtatattttgtgggtctttatataaggtaagcatgtttatgttaggcaagttcacgtatgtgagatgttggcaggtggtaaatgcttagaaacattagtacccttcccttccctgtgcccagtctctaaagccaccctgggagggtaattttgcagcttctttaatgaatccatcctagtgttcacccatccttgctcctgaggttttctgatgctttcgtctggattttcctgtagccctagccttatagacgccatctgaagggagagatggccttctgggtgcttcctatccttttctagcttattagaggccagcttctcgggcctgcaggcttggccattggtggccctgcaggagatgggcaagtcagggttgcctgcatctgggagaaggacaggagagcccttttgctgtaggggaagccctagacccctgggtagaaactgtatgagcctcatcaaccttgtccctagggtacctggctgctgccaggagtggggcctgcaggattccaagggaagactcaaaatggtcttgcctccaggtctgccaggccgggtttggagcactgggctttcctagggccttctggtggtggtggagcagctgtgtgctgcctggctcagtgttctacaatgcttctgttcctgattttactgcaagtgatccttggagcgtttttgttttgttttgttttgctttgggtttttggtttctgtttctgttttttttgtttgttttgttttgtttttaaaaacaggaaatttgtcttcattttgtgccaaagcttcaggcacccctggcatctgagtctcgccatgtgagaatcctggcttgagggctcagtgagggaccctatctaagtcctttaggtaatgaagggctgggggcagggggcaggtgtcaagggcatgggacgtggtgggtgaaaggtctttgggattgtctattgtggagtagtgggatgcatgggactgtcagggcgaagcagtggactagatcatttccagggctcccttctctgtccttggaggcaccattctgccttcttccttatgagatgctcgatgaattgcagccctggagtaccgtggccatccagcctgtgggtggtgggcacagtgcccaggctgcactgacctgagtatgggtacatgacatggtcatggctgcttctgtgggcacagcttggagccttggtgcaggggcagggtcttaaaggtagcctgcccttgcctcttcctgtcatggtcccttcctgcctgccctgacaccccaagtcaccctgccctctgctcccttctaatctctcttatttacattggactggttctggaaaataccagatatgcaaacaccctgactgggggtgagtggggagtagggtgaaggggagtgtgtggcgggtgggaacacaagtattttaaaaatgctgcaaatctctacagcatttcccagaaaccacaggcacgcgctgcctgccagcagggctcccgccaccccaatgcactaagctgctgtattctactcactgcagtcttggggggacggtggggactggtgacccagctgaggtgagggctcccctgctgcctgggcaggcagcctggcgcctccattgtcagtcctgggcagcgggtatggttgtgccccaggcatctggcagcactgagggcgcccaccatgccagacagccactgcgaaagagcggagttttcagggcccccacctctgctgtgcagtttgatggggggcagccaattcaagagtcccgcatggtgtttggcagcagcttctgttctgttaaatacaggggacagtgttagcaaagcttattttttcagttgtgggctctagtttggttgggaaactatttccttagacctgggtcacccctcgggctcccttaatctcccgccatatgttctccagaatcagggcatggtgttctgccctggtgcgactcagcccggttgctttgcacagactctgggccagggcaggatgtcggtgtttgccgggtgttcgccgggtgttatctgtggcgctcagtatggtgcatagtgtagacacgtgccctaggtggtgtttaattgatctgggtaagactcagccaaggcagggcacagtggctcacgtctataatcccagcactttgggaggctgaggtgggcagatcgcttgagcctaggagtttgagaccagcctgggcaacatggcaaaacaccatctctgcaaaaaatacaaaaattagccagaggtggtaatgcacacctgtagtcccagttacttggatggctgaggtgggaggatcccttgaacctgggaggttggggctacagtgagccgtgattatgccattgattatgtcactcaactccagcctgggacacagagcaagaccctgtctcgaaagaaaaaaaaaagactgaactaaacagaaatgccttgggggaagggcatgaaaagttctggcaaggtgaggatcacgtctaacattcactgtaggttaggcactgttctcagtgtttacatatattcacttatttaattttctcaacaaccctttgaaggatcataacaatctgttttaaagtgaggaaactgcattactgagaggttaaagttaggcaaattgtgtaaggttgcacaggtattaagtgactcaccaggacttgaactcaggccatcagctcttgactagtctgctgtataggggagagcaaggcagtatccggatatccatataaatccactgcctagctcagaccttctgactcctgctgccctgtcactaaaagcctcttcacctccttgtcatccttccagaaggaaaccaggagtgatgggccactcttgagctgtggtggtgtgctgcagaagggtgtgaccattgctctcagtgtctcctgagggttagccagaggaagtgagcccaagtggcagcaggcaggattcaatcttgtgggagccgggagagggaagggtggaagagggacgccttaagaagagaagtggcacctacattggcagcatttgatgtggtccccaggagtggagggccatatgctagatctgggagtctgggacgttgcccctctcacctttttggcccatactggcatgctagtgctgatctccatagcacttggggtgacaggatccctgcagtgtcacctctgaccaagagtgggctcgccgtgttgctcagggccacgctgttgtttcctctgtgtgttgtggaaaaacagtggcggagcacagcctggcagagggcctagcagtggtgggggcaatgcaggcttctcactggcgtctacccttgagctcctgctgttccttttgtctgtagcccctttccctgccctcccttgtacacttctacacattggcttcagtttgaatatcacttgtccctgatcctcccagaccatgtcaggtccccacctggcaacaccccagccttctcatagcattcacaagatggtaattactgagttatctcattccttctccagtgctggagcactgcatgagggcaggggatatttgttgaaggaaagagatggttctgtactcaggaactggtttctcattctctctgttcggtcttccagaccagaaccaaaactttagctcagttttgggtcctggacccctcctgctctaactgaccttggtgacttgtctctaggaccttagcgtgtcccatctccacccatggactgtttcttgcatgcctggggcctggcatctctcacaggactggaggagaggcagctctgtgggcatccaggagcaggagcctgggaagggaggtcctggggacaggctgcctcctgcccccacacaggagcccacatgaaggtgccaggcttgggtgagaagaagattcaggattacatgggggctacgcagtgtctgtctcagaccttggaggaatgcgcctgtctcactggctgtaggtctctgaggggctggaatgtggcccagtggggcttcctcttcccttccgctgctctccctgaactgccttcatactggaatgtcagcaggatgggaattttcacagcaaggatcttacccagtcacagcaatggattccagctggagcctggggacagctcccacatgtccctaccagggaggagagagtgggtgctaaggcagccccagttgctctgctcctggggcccaggctcagctcccatcccctctgggagacagttttggttcctggaaccttcccgctctgactggcctaggtgacttgtctgtaggaccttagcatgtccctactaggccaggtcatggggaacctgggcttctggagctgtagggctcaggagagggagtgggaggccttggagcccagagactccatctctgaggagagaatgaggctggccatgtcccacaaggccttgctacctctggtgtgaacatgagtcagggaggggagccgcctcggattccatcctcaggtggggccaggcctctggacccaggttctctggcctactggggccacccagcctcggttggaggtggccctgccgaattcatcacctgtatctgtcttgtactctgtgggtcccgcaacaccttcggggcctggttccctctcttagtgacctttctggctcctgtgccctttgcccccgatctcatttctgctggctcctccctcccactcagatttctgcagggagctgactcacttcctccctccctccccagcacctctcactgccaggccctggggcaagcagggtccacacagggcggcaggttcttcccatggagctcttctctggcagcaggactgaggctgccccggccctggggcagaagagggctgcatgtgtggtggggaggaggcagagctctgtgctgtaggaaaggccagatgtggatgtccccagagccttgttgcaatcagggtgggacgtcaggacaccttgatgaacactgctccgtgtcagcccctgagcctggttctgtggagaagaaaggctgaagatagcaccctgtgatgatggagcctgtgcttctgcaaggacagaagacgtgtgcaggaagatctatctcagccctgggtggcatgggctagaggccaggcagtgacagcaccgtcaggcagcgtgagactgtcatgactctccgtgacacccagtttcatgcccggccccaacacatcaaggggaaagtatctagagattccagtagaaccttccagggacatggcgaggggaagggtctgataccatctccttgtgtggttagttcttcctgctgggggcccttccctcatgcccctgcccctccctcatgtgtggactgctttggttgtggagctgattgcagaagcactgggctcagagcagtaaaagatttcctccccggctgggctggcatcttctgcctcgccctccccagagctgtccaggctgtgggagctagtgtgcctggcacttcaggcatggggggaacccagcatgtgctgagcctggcacagccctgcctcctctcagcaggcacctaggttccctaaaggacacgggcacaggctgggtcgagtccccactcacttggccatgcctcaagatcaacagaggcaagagggaaactgggccccctgcctgagaagcctggggggactgctgtggcctgtcttcctggaatcggtgaccagcaaacatccctattccccttagcacttggctttgcctggcagagccccgattgccctggcagcctgagattctggcctcaggatttctgaacaagaaaaggggtttcttgcttagatgaggtgaggggcaggcaggaatgaagccttctcctaggggtaccagcctgaccacctcaccccaaatgcccttgccctccctcgagggaggtgagccaccctgtgcgggcacactgaggcctgtctacacgcctctcccagggctgcctgatcactcttgcctccatccatcatcacctaacttcgacctggggaagagaaccacagaactgggttctgtggcaggacacccagcttaggaatggcctaggcgccacatacacacgcacgcgcgcgcacacacacacacacacacactctgcagaatttagagtgggttgtccttttctcccagacccctccaatttctgccatttgcttctagcccttaccttctctgtccagaggaaagcagctggcttcgcaccagaggactttgtctctggggtaggggaatcagttttcctgctttaatcagggctttggggtcctcccccagcccccttgtcttcctttgatgactgattttgaggtctctcttctgtgctctgaaagagggacccatcttataaagggtcctctaccctttgtcccgcccattttcttcaaaatcccaaaactgctgctctcattgttgctgtagaaacagatgcttgtcaaacatgaagttgcttggaaggactagttttggctgcaggaactgctttcagctcatctggggaggagagaggaggaagagaggaggagagagagagagggccctaggcaaggacccacaggtgaggagttgtgtgtggttgcgaaggtgttgttaacacattgctaagtattggctacagcttggcctctggagccagactgcttgggtctgaatcctggccatgctgcctactggctgagtgaccttgggcaaattatttaattcctctgtgcctcattttcgtcatctatgaaatgagaataatcatagtagttttagtccagtgtggttgttcatgcctgtaaccccaacactttggaaggttgaggcaggaggatcacttgagcccaggagttcaagactagcctgggcaacatagtgagacaagcccagacaacatggtgagaccccatctctattaaagatacaaaaattagctgggcatggtggtgtgtgcctgtagtcccagttactcaggaggctgaggtgagaggattgcttgagcccaggagtttgctgcagtgagccgtgattgcaccactgcagtccatcctgggtgtcagagcaagaccctgtctcaaacaaacaagcaaacacaaaataatagtactttccttgtaaggttgtcttgaggattaaatgaatcaatacatataaaccacttagagcagtgcctcaaaatagtgcctagagtcagtgagcattggccaggcatggtggttcacacctgtaatcccagtgctttgggaggctgaaatgggaagatctcttgaggctaggagttcaagaccagcctgggaaagatagtgctactttgtacaaaaagtaaaaatattagcccagtgtggtggtgcatgcctgtcctagctacttaggaggctgaagcaggaggatcgcttgagcccaggagtttgaggctgcagtgagccatgatcacaccactgcactccaacctgagtgacagaatgagatcctgtttaaaaaaaaaagaagaagtgaacattatcatcatcctcattaatctgtctctggtacgtcaggaagcactggtgcctggtagcttggtacccgcaggaatgtcacaggtgctgttcctgttaatggctcagctctgctcacggggagtgttggagaactgctttattcttgtccccacgctgatgcttatgcccaaagtgcctttcaggtagagatggggaacaggcctaagcttactcagggctgcacagtaatcttagcgagggattgctttggcctgagtttccaatctggtctgaagtttgattccagtttttaaaattgggctgctttctctgtgactccctccagtcagattcttagctgatggcaagacctctggagtaccaggtgtctttctacctatttgttttccatttgaacaaactcaccctactttttggtctttctacaatttattttgtttcttcacacctgtcttgctcctgacagcccatttagattaggactaagcaggaattgaggcataaaacagaaagacagtcctgacctgccagttccagagtctgtcctctgctccttccaccacccatatgagcatgcctagactctcccacttgtgatttttactgcagcaaaacctctccagtgaagtctctgtgacggaacacaacagtggtcagacccgccaatctgttcctttgctcttctgtggatgcggggctggggggcttctctgagcctcctctccagcatgtcagatatgtccagagtccattctccaccgtgtcctccccttcctactcctcctttgcttcatctagttggtgacacagggaggtgtccagttatgggcctcactgctccatggcagaaatcctggcatgccctggatgaggcttcattggccttatttgctgttgaaagttcaggattctgttgggacttctgattctataggagtactaacatcagataagtcctgcagcgggtggcttggggaagccctcaggccactgcattccagatgtcttactcgtgcttggcccagagaatgcagaaacaaggaaccattgtgtgattgtgcaggcactgaggggctttctcccaggcctgggacgccttggggtgggagtaggtttccattcagtcttggcttctgctcccagctgggtattaaattgtgactacagtcccctcctccacctcttttggaggcctagggaacaaggcaaggcatgtgtggataggagtctaagcagactctggggtgaggaagggagacaacagcaggtaggcgggggcatcatctgaaggaggcattggtagagggaccaggacacactgaaagggaacctctagaccagacctgcccaacagaacaatttgcaagggtagaaatggtctataatgctatccaacttagtaggaactgaaccttaaattttatttgattttaatttaatcagaagtatcctcattgtttccatttaactggaattttttctgagacggggtcttgctctgtcacccaggctagagtgcagtggcaccatcacagttcactgcagcgaactcttgggcttgagtgatcctcccacctccccctcccaagttgctgggaccacacttggctaattaaaaaaaaattttttttgtagagacggggtctcactatgttgcccaggctggtcttgtgttaacaacacctttgcaaccacagcaactcctgacctgtgggcccttgcctggggccccctctctcctcctttcttcctcctctctcctccccagatgagctgaaagcaattcctgcagccaaaactagcccttccaaccaacttcatgtttgacaagcatctgtttctacagcaacaataagagctacagttttgggattttgaagaaaatgggcgggacaaagggtagaggatcctctatagggtctttcaaaggcacagaagagagacctcaaaatcagtcatcaaaggaagacaagcgatcttgctgcctagacctcccaaaatgttgggattatgggcatgagccataacacccggccagcttcaatttgaatagccactcatggctagtagctaccatattgaacagtacggctctaaacagctcccagaaagaaatagttgggtgttcttgaaggtttgtttcctccttcagagtccccctggtaaggcaggggatggtggcatttccccttcctctcaagaaggaagagctgtcctctctggcaatttctacacctcaaccaccaccagctctggaatcctaatgccccagggccagcaggtccctggctgtgtgccaccacaactggggcagcgcttcctttcctcgccaaggatgtcttctgcccagctttgtaacacacaggtactcacatgccccagtggatttggcccaggctgttagcacagaggtggtgggttggtaggcaaggtagaggcttttgcttcttcctgtttctatggacatagggtttgtgctttattttttacttcagagggttttagaaacaggcccaataggggctccagaggtgaacacacagattctcaaatatttattggatgtccagtgttacgaggaacctgaggcttgtctagaagaacttctctgactttgagaataagcaccacaggcctccatctctcacacccaggaagaccttactgatattttatttaaattgctgtggctgacccttaagctggcttccttttttttcttctgtggaaatggagaagagttgtcatttatatgaaaaagagaacaatgcttcattatgtttattccctcctgtctaccagagggggtggataggagaacatagtgcatgtggtacatttaggagacccagaagtgacccaagtcctgatgagatgtggggcagggctgtggaggattttgggaaaggatcctcaaggctggctcatggctttgggccttgggggagcttggcaaagcagaggcaatttggaagtccccgggggccatgaggaaatccccagcagctgagagacctcagagagcagcaggcctgctgtcgggccagtcaggtggtccctgcagtcggccgcatatgcctgcctagtctttggggattgactcagggtcttggcagagaggacaagcccaggcgtccctacttgggctctgtgcccgaaaaggtgtggtggcacatggctctgagcaaactgatgggtgtgccaatgcagggactgggtgggtgtaggggctggggggagtgtcagagccccaagcctcggcgaccacctctggggcagtgatctgtggctcgccgtcccatacccactgaccttcctgattgcttgtctctagacaagcccctctctagaacaggctttcctggcgtcttttgaccttgcattcatgtattcattcatttattccatcaataagcatttactgaatgcctactatatgtaggaactgttttaggttctggggatagagcggtgataaaaacaaagtgggcaccgagctcatccctgcctcttcttgccctacgcgtcctggggacggcgagaggccatcttgccgccgcagccccctcgggccggagctcctgggggacgcctcctgggggtggggcccggaggccggcctggcggaggtgaaagcggccccagcaaagcgggagggtagatgagaagggggctgccaccctctgctgggcgccagcggcgctgcagggcggagcttccagggctctaggcgcatgtgctgggcttggccccacccccttggccccgcccaggctccggctggccggtgggccaacccgggaagtgccgccccgggcctggggctgactcggccctcacagagcctgacccgtgcgtagggtgctgagtggctggggtggccctgggcatgcgccgttggtcactccaggtttcctctcagccctccttctcctctctgagaccatccctaggcttcttaaagggagtctgccctataacccttcagaatccactggctatcggcactggtagaatttcataaaaaatcttggcacctcaataccaatcgctgtctcctaacactactgtttcatacgaggtgacattttgttacttacacacacacacacacacacacacacacacacacaaaagaataaaggataattcctcccaagaaagggaagggactcctgcgctggcattttctttgagacaggtgtagactctagtactggccctagggctggtgctgaggacctctgaagtggtcatcctggaagtgcacctgccaccctagtggctgggccctcccacttcaaaagcaagtgctccaggccctcctggccctgagctctgagtgctttaaacaggactctccccaactccctaaatatagttctattattgacactttacacaccgcaaatttgtaatacaaggatcatataattagtacccatttatggcaacagtgcttatagacttttttttaggagttttgatttacaggggaactagagggacaaatggggtcagagaagtattcttttgttaagatatattttgttaagatatatatatctcattgttaagatatatcttaacaaaatatatcttcccaagctttaaaccttggtatctttccttacttttctcaatctccacccagacccgcttgtgcccatttcccatccttccccaaatagtcaccaagtccagcttattttttctcttgagtcaccctctcttccccatcaactgccagaatcctaggcagacccttcttatctctcatttggcatcaccttttaccttgacttcctttttttttttttttttttgtcacccaggctggagtgcagtggcatggtcgtagctcactgtaatctgtaaccttgaactcctgggctcaagtgattgatcctcccacctcagcctctgaagtagctaagactacagttgcaggccaccacgcctggctaatttttaaattttttgtagacgggtctctgtgtttcccaggctggtcttgaactcctggtctgaagtgatcctcctgcctctgccttccaaagttttgggattacaggtatgagccaccatgcctgactaccttgactttctaatgttctttcaccttccagcctcctttctcctcctcttgcatcctgttagctcagaatgttttttggtttttgttttttgtttttaggcagggtctctcactctgtcacccaggctggagtgcagtggtgtgatcatgactcactgcagccttgaccttccctgggctcaggtgatcctcccacttcagcctcccaagtagctgggaccacaggcatgccaccaccacacccagctaatttttgtgttttttgtagagatgggattttgccatgttgcccaggctggtcttgaactcctgagctcaagcaatctgccttcctcggcctcccaaagtgccgggattacaggaataagccaccatgcctgacctgctcagcattcttaaggcacaggttaaatcatgccccatcactctccaaaagcttgttgtgcctcccattgttttccaggcaggtggtggtgtgtaaggagctgggctctggaatctgaacaatctgagttcaaatcacctggccagtcacaatctgtgtgatcacaggcaattatttaacctctgtaaaccccgtttccccattccacaattccccttctcattacctcgcagggttttgagaggaaaaccagtagcatgtgcctggccatggctagtgcttggtgtgtaccttcttgttcctttgactgcccaccttgctttcatctcaggtacagctctttcaggtgagagtaacagaaagcccagctcaactggcttaaaaagaagatatgtgttgtcaccagtatctgaaaagtccagcagtagaaccggctacaggctcagccttatctggaaacattaacagtgtgaccaagacctgaccttttctgtctctcaccccatcttctaggcagccttggtcctcagacaagtaatggcaaaatgtcacagccccaggttctagttgtgtggatagagatgtgtgactctttgaataatccccaagtttcattatgtatccttgaaactgattgggtcacatgccctccatgaacctatagcctgaggatattcttattggccaggatattcttattggccagggcgaagtcatgtgctggggtgggtccccagaggggaaaatggagtgctataatcagaggatggaggaatgggtggtgggcagcagaaacaacacatgtccactacagcacacacttgcttgatttgagacccagcttccttcccagctttatccctccctccttggtttcctatatgtgtcatacatttcttccagacttactgtccacatctcatgcttttccacttctttgccttttattttattttatttttattttatttttttgagatggagtctctctctgtcgcccgggctggagtgcagtggcgtgatctcagctcactgcaacctctgcctcccgggttcaagtgattctcctgcctcagcctcctgagtagctgggattacaggcacatgccaccacgcctggctaatttttgtatttttagtagagacggggtttcaccatgttggccaggctggtctcgagctcctgacctcaggtggtccgcccacctcggcctcccaaagtgctgagattactggcgtgagccactacgcctgcctggcccctctttgccttctcttacactacttcttcaccctggaattcccttcctacctcattgccacattataacatttctctctttcattggcctagctccaagctgtctgtaagctgtctacttaataccgtaactggaacagatctttgcctctgaacttccctagactgttattgacgtccctgacttgaattttaattattggggtacatttgttatctcctctgctgatctgtacatttttttaaatcaggaagtatttagttgaaaacaagaactaaattatcttctttcactcagtcactcaaacgtgcctcatattgtctctgagcagggcccagtgctaggtgagtgctggggatagagcaatgaacaacacacaacctctgcctcaggaagctcagtctgtggtggggaagctgaaaaagaagcaggcacggtgcttccccacagtgttcgccttgaggtattacagttcacagctagttgaataagtgaacgacttcctccagccctcagagcctcctgtctggccttcccccagctctgcttagccactctgcctggtcaagtgcctgaaacagagccaaggaccttccactcatccacgccaccaatgtgggagagcagagcagttgaagttgtcaccacacatggagatccccttgttccccactctattccagcccgtttattgtgcgtgcaccgttcagatcagttggttaaatccatatggattttcgtggaacaccttttgtgtgcctagtgctggggaacgggatgggatataaaggaagtaggaaatggtcccagctctccagggagagcaggcttaaacattcaacacgaatcgattatcattcagaacattagttatgctgtatagtcatggcacgtggacagtaaacttcaataagttcaactatatggttgtgaaagaaactatattactgtagcctaaaattataaaaataatattttgtgtgtttttactatatgctgtacatgactattatgctttcctgcagctatattataccaaatggcatactcaaaatcatgtgtactatactttgtgagcagtttaagggattttcaggagttttggactatattctatttttgccttacgtgctgactttggaatctaaccccacatagtgtgtgactccactgtatataatagagcaccatattgagtataaccaagaaccgtatgtatgtaatgtgttcaggtgtggacagtgagtgctatggtttatgataataatgatattaataatttaataactataatttgccaggccgcacatcagttgctttacatgtactgccttttctattcttataacagcctcataaggtggatatcatactattttaaggccaaaaaggtagaaactctaagaagtcaagtaactttcccttaggtcagacagcaagaaagaggctgggattcagacccaggtgtgtctggctgccaagcccacgttctttgcattgccgggtgggtcttgggtttcagggaaggcttcataagggaggcaggagttgagatgggcctggagagatggagagggtcagccaaggtagagacacattcgtaaggaatggctctggtggtgacaagggcaggcaaatgacggagagccaggctggctgggaagagggagaagagactagaaaagtgaaagtaaagtctgaggaggggccagattatagcttccagctgtccttggaggcaagctgaggggcttggggtggcctggctggctgtgggagtgtccacatggcctctggagccatcagttagactcatcaaagaaatggaccatgccctgatattgcaccaccacgctttgggcagcagagggactagctgtagttgcatgtgaagctgagtggagacaggcacactgacagacgagtgacagctgatggcctaatgaggtaggggacaaaagaattaaaaagcagacatatggccacaaagggcatctggccttcctaatataggcatatgcaaggcttcagcatggtggtgcctaagaggggctggtgcccttggagagaggctggggcattggtggggcagaagccaggctgctgtagccaggccaggaagtcaggagtcatcatggtggagatggcgtgcccttcagtacaggatggagcagaaatggattgggttcaagaaggaaagctcagagtgtgagatctttgagatgaattaggagtgttgtacttaaggaagcagggtatatatgttggttatttttaggattataaatagtatagaatttagaaaatgacttaaatcttttatcccttaaaaagggtaggctccagttacctggaaattttgcttacaatgcctcattttttcccccgcttatgatcataggtagataataatagttaaaatgtattaaggccaaatgtggtggctcatgcctgtaatcccagcactttgggaggctgaggcaggtggattgcttgagtgcaggagtttgagaccagcctgggcaacatagggaagccccatctgtgcaaaaaaaaaaaaaaaaaaaacctacatggtggcacggtggtgcatgcctgtgatcccagctactacggaggctgaggtgggaggatgggctgagcccaggagatggagatttcagggaaccaagatagtgccactgcactccagcctgggcaaaagagcttttgtttgtttgttttgttttaagtattgaaaatgaatgtgctggacaccgttctcagagctatgtatgaactaattcttttaacccatgtaataaccccatgtggtaggtgctattattttcccattttacaaatgaagaaattgaagcacagaggctgggcatggtgactcacgcctgtaatcccagcactttgggaggccaaggcgggcagatcacttgcggtcaggagttcaaggccagcctggccaaaatggtgaaaccccgtctccactaaaaatacaaaaattagctgggcgtggtggcgcctgcctgtaatcccagctacacaggagcctgaggcacaagaatcgcttgaacctgggaggcggaggttgcagtgagccgagatggagccactgtactccagccgatagagtgagtgagactctatttcaaaaaataaaatacaaatgaaaagaagttgaaacacagagagatcaagttgtgtagtttacttcatgcaagagccaagattaaaccaggccgtgtggccctggaggtcatactcctaaccatggtatgctgtgaatcattcctttcaagccgtgcttctcagactttaatgtgcctcagcatcacctggaagcctagttaaaacacagatgctgcaccccatatccagagttcttggttcagcaggtctgggttgggttcctggaatttgcatttccaacaagtccccaggggatgcccacgctgctggcctgagaacttggagaaccaaagccctttcacatacattatgtaccagtctcatactggttgggtaagagtcagtaaaggtgtaatcctcattttacagataagggaaatttaagtcacctgcctgtgttcacacagctaaatcattcattcattcactcattcatttaacaaatggacatttctgtgctaggccttatgctggccttagagtcttgcagttctcagccttggctgcatgtgagaatcacctggggagcttttatcaataaaaaatcccagtgtccagccaggcgcagtggctcacgcctgtaattccagcactctgggaggccaaggcgggcggatcacgaggtcaggagattgagaccacggtgaaaccccgtctctactaaaaatacaaaaaattagccgggcatggtggcaggcgcctgtagtcccagctactcgggaggctgaggcaggagaatggcgtgaacccgggaggcggagcttgcagtgagccgagatcacgccactgcactccagcctgggcgacagagcgagactccgtctcaaaaaaaaacaaaaacaaaaaaatcccagtgcccaggcccctgctcccagaccaattatgtcagaaactgagagggaaagggtgggctccaggcatcagtatttttttcaagttccccagtggatttcagtgagcagctgaggctggcaccattgttctaagtagccactgaagatgtgaagacctgtgacactgcacgtgcttcagaagggccagatgcttcccctggggggacatcccactccctagagagcaggacacaagcgccgtgtcctaagagtctgtgtatgtgactatatgacagtgagacttggacagcgcatggcaggtaggaggcagggctgggtttccatcctctctggcagtgcttaccaatcttttcatggagaaagtcagacaatgtatagaaccaatggcccttagagctggccaggggcaagaagcatggggtgtatgccagactggttaggaggcggttctgtatcagggcttcctagcaccacccccaccccattttttttttttcctaaagaggaagagggaggcaatgactgtttccttttttctgcagagctgacggcttctgagacttgctctccctgtcttttggccccttgacattctgttctccagctcccatttcagcgtctcagcgggtccctagtcctggtctaggcatcccatggtgctaactggagagccaggccaggatttctcttcacaagaaacactggcttttcacaggcagccatcactcattggctagacacccatgacttcctctgtctgcagggctgaggcccaccccaccctcctctctgcctgtgcagtccctggcgtctgtggaggggagagggatgtaaacaaagagagtgtaattgattctctgcatgtcccctgtgtgctgatggcagtggggcagtaagtgggcctgcccgtgtgggtctctgctcctgccagaccttacaggactgctttgcggctgctgtttgggcacagtgtgcagtgggccccgtgtgctgtcttggatgtgacgttagtggctgtcttggcctctgccgcagtaattagatggctagggtaggcctatgatttgggtgttctcaagaacactgtgttgattgaatgttcgtgcatgctggtgtgtgtgtgtgtgtgtgtatacgtgtacatgcacatgagtgcgcatgtgcttgtctcaagcttggcctgtggggccgggggctgcaggtctcaaattcctctgctatttttaggagccatatcagcccagctgtcccggagctggggtgtgtgtccataggcaagtctcaccctccctgtccttgccctaaccccctaacactgcctgccccccaccccaatggctttaccctaagagccttctccttcccttccacacacactgctgtatcaccctctccctcctggcatacctgatacccgaagtcctccgggctgctggctccaactagggctgggcagctcgggacgggaggggccggggagagggcgggaactgggcggggccacagcctgtgctattttgagctgctaacggagccagagcagcatcagagcggagtctccttgctctgggctgctccaggccaggccatgcgggtgagtgtccctctgaccccccaccccggaaatgtcccaggctcctcatgctatttcctcatttaggaaaggagggacctttttgtgatttccccagatgtggctgaagtaggtggggagaggggtggggcagccttggggctcctctccgagcttcttggtaagaagggagttactcagccccggaagcctcaaaacccctccgtggctaggagcagggcatcctgggcctgactcatgacttcaggagttttggaggggcactgtcttctgaacctcagtttcctggggttgcatccacccccaaggctgtgacacgccttccccaccaaccattagtgcttttttggccttcattccttagaacactgttttcttccaaagccccagccccacagcacccaaggtcctcggtagtcttgtctctgctttgttgctggtatagctctttcctctcttcctccttgagaggggatggtccttggagttgtcagggagcacccttctcgctgtccccaagagtagtcttagcatggccacctccatttctgtgcataggacacttgcaaggggcacagatggcgtgttggggatgctctgactggccctaagtctcttttttagtagagattactccagataagtaagttccttaaaaaagaaagtgaggagagacatagctgctcccagtccttcccgttcccctgactctacccctcccagccaccaagggtaaggttttcagttgtgtcagcagttggcagagtacgtgggctggcctggtgcggaggtgcatcaggagcctgagatgtacccgtgagtacttgtatctctctgtgctcaggactgccctgcctcagcccccaaactggcaccagggctgagttgtgtgggcagtatgcccgggggtgggggagaggtcagagagagctcctcaccctgagagatgggcgcttcctggtctagggtactctcccccagccacccccgggccactagcaccaggtcacagatttagggccatgcacagtgatatccaagcagacagcaaagtgccctccagaggggcagtgagcatccccagggaaggggggcctccagcaggttcagtcgttggaggaggaaaccaagacccttctgcaactgcagttgcggcaggaagccattccagtgcacctgcttcctctgggctggcctgcagtgaggcgggtgcccggctgctttctgttccgccctggggctggggagggctctggctggaggctggactgcaagggccaggttgtccctgccaagctcatctccccctcccccgctgtctggcagcatggccttcagttcattccttagagagcttcccttcctctcaagcagttccacgtaaagcatattcaggttggtgggtggaggggcgggtcatcattgggaacccctgctttcctcccaagctgctcttctggcagctgatgtagaaggacaacagtgcaggtgaaccaggggaaatggagggcagggcgtgcctccatcccttaaagtgagcagtggagggctctcgcaggagacctgagtgtgagtcccagatctgccacttgctgctgtgaggctttgggcgagtcacctgaccttctgagcctccttttgctcatttgtaaagtagcagtcacacagtcacactagtatctatttcagagggatgttgtgaggatcaaatgagatgattcatgtgagggattcagcacagcacctgacacataccaaatgctcaataatgattaaccgttttttactattatgctagtatttcttcccttctcctttgttcctgccacccttcctcgccctcaatccctagataagttggtgctaggttgggactgggaggaagaagtctcctgggagctgccctctgtgcctctgaatgggaaagagggaggagaggagaatgccctgcctcttggtcctcagaaggagaagcctccggtgtgtgagtgctgtcagaagcggcgaggcgggaaagtgacctcggccaccagctacgtctcagcttcctttgggcactctcttgagagttacctgctgctctcgggggcttgcagtgtgcagatgtctggtgtggatgcttgggcctcaaagcatttgtccaggccaggcattccaggcctgaggggctgcctgaggcgtggcattattctcccaggagcatttgtgcccccattccctcctgtgaggggcccagagagtgcaggttaagggcgggtaggctctgctggcatggtggagggtaaaccccagctgctcccagagtgtcagaagcctcctggggctgaggcttgacagtccctcagtacatttcttggatttctcctctttgagaacaaatgcttctagctattatctcctttgctttttttttgactatttagccatcttcacaataaaaataagcagtaagtaacaaatacataccaaaataaataccaggtgttcatgttgtgtctaattcacacagtttacaagattattatgatcactgtttgtatactatttgggttccagtttttttgattgatgtcattttatatggagctttccatatggttacattgtccacacatttgtcagtttaaatggcaatacaacaacgggttgtacctaaccatttcttaattctaggcatttgggctctttccaatttggagctgttatatagagtgcatctataaaaatctttgcgttttttttctttttctttctttaagtcagctcactggacatacattcctgaagatggaatgggtaggccagaggatgatgcattttgtggctattgttcacgaagagctactaagcaatttcagtgtccttgccctccctgcaaacccaggcattgagttcactatgtatttattgtgagcaggtttagagattatacctcccttgtttgtaccatgtccctgggaatcagaatgggcaagtgttgttctctgtagtttatatttggggaagagattagatgggaataagaggtttgtgcaaagaacccctgtcccagcactctcgtgcagctaacatttattaagcgcctacagtatgatgagtaagatgggtaagttctgctcagaggtgaatcacagtccagggatgacaaagacgcacaaacagctccccaagatacattctggttgtggctcccagctctgccacttaatagttgcagcgctctcggcaattcaccttctttatttccttatctagaaagtgtgttgttatgaggattcaatgaggagacctgtatgaagtgccttcccctgtgcctggctcatagtaagtgttcagtgagtgttggtctctcttgctgtccctcagaagtgccacagagggaggaggtgggtagacctgcagagtggcagaatcatggtggggtctccctttttgcacatccaaaaactcgatttggagagttgcacactagtaaaacacactatcaatccatgctttggcttgaccagatcttctgaaccttcacgccgatgaagtttatcaaccagatttggctaccaaagctgatgcctgcctaacataccagaaaaggtgggcactgaggaagcagcacaggctttggaggcagaccagtgtgggttcaagtctgggttcccccacttaactaactttgtgacttaatctctttctgaatcttttccctcctcgataaaatgggaataataataattcccatatcaccaatcctcagattgttgtaagatttacattagaaaataaatgttcaatatcttgtatagggcccatctcattgtaggtgctccatattcagtaatgttgctggaaatggctgaaatctctagagagagaacaagtcaaggaagagaggccttagatctaaacacccttgctccagagagccatatgttcccaacacatatgctgccaccacctttggggcctgagttccttacccattctgtcttggataacagtaacttgatcttttttttttttaatttttgtgggtacatggtaggtttatgtacttatgggatacattacatatatatatatatatatatatattttttttttttttttcttttgagatggggtctcactcggtcacccaggctggagcatgcagtattgcgatctctgctcactacaacctctgcctcccaggctcaagcgatcctcccacctcagcctccccagtacctgggaccacaggcatgcaccatcgttcccagttaattttttgtgtttttggtagagacaaggattcatcgtgttgcccaggctggtctcaaactcctgagctcaagtaatccacccacctcagcctcccaaagttctgggattacaggcgtgagccaccacgcccggtccatgagatgttttgttttgatatgggcatgcattgagaaacaagcatgtgcttgggcaatggacaatggggtctctaccccctcaagcatttatcctttgggttataaacaatccagttccaggataacttgctcttgatcctaaacaaattcagtgataagggagagaggaaaactgtctaggcaattctgcataaaagccacagagagaatttcctctggggagagccccacatctgtgttcagagtgaagctcataggaacagctgatgcagaggaacaggcctgggtggaaatggcccggtgtcctcacagcctgggccagatgggacctctatagacaagtaggaaaacttgaacaagagatcaaagatcaaacgagttaaaattacaccaacagacaaacttaaagtctctagcacattaactgaataataaaacagaagtcaacaaagcaaaatagaaataattaattgaaaacaaaacatttcctaatttttaactattattcatgataagcagttttaagaatgaaccagttcttggccgggcgcggtggctcacctctgtaatcccagcactttgggaggccaaggcgggtggatcacgaggtcaggagatgaagaccatcctggctcacacggtgaaaccctgcctctactaaaaaaatacaaaaaattagctgggcatggtggtggacacctgtagtcccagctactcgggaggctgaggcaggagaatggcgtgaacccgggaggcggaggttgcagtgaggcaagattgcaccactgtactccagcctgggtgatagagtgagatgagactctgtctcaattaaaaaaaaaaaaagaaccagttattaaactccactgaagtgccctgattctttggatgcagcctctccctggactgaggcagattctgacttgatttttcaagcggcccagctctggtttctaatccatagatggacagttttgcagttctccgggcctcttgccccacgtaattgtgtgttacagctggaaggcaaagtcgctggggtcctgaggcagattcctcaattcctctcctaggtcacaggcctgcaactttggtttactgtattaagggtttgagtgttggctgggcgtggtggctcacacctgtaatcccagcgctttgggaagctgaggcaggtgggtcacctgaggtcaggagttcgagaccagcctgactaacatggagaaaccccgtctctactaaaaatacagaaattagccgggcgtggtagcgggcgcctgtaatcccagctacctgggaggctgaggcaggagaatcgcttgagtccgggaggtggaggttgcagtgagccgagatcacgccattgtactccagcctgggcaacaagagcgaaactccgactcaataaataaataaataaatagagtttgagtgcctctccccacgtagactcctaaggtgccagacatggagaggccttgagccattgtctagactagcccctaattctacagagaggcccaaagaggcgaagtggcttattcaaagcacacagcttctggccgggcacgtcagctcacacctgtaatcccagcactttaggacgccaaggcgggtggatcacctgaggtcaagagttcgagactagtctggccaacatggtgaacccccatctctactaaaaagtacaaaaattagctgggcgtgttggtgccggggaggctgaggcaggagaatcacttgaacccgggaggcagaggctgcagtgagccgagatggcaccattgcacttcagcctggcctacagagtgagactgcatctcaaaaaataaaaataaaaaaataaaaacaatgcacacagcttccaagggtagggagtgctatgttctgtgcctactttccttcattttcctttaatattttattccttactccaatgccctcttgagttttgtaatccttcctcctccactccatccctcctttccccttgttgcccacagtgtttatcctggcaggttctggcctttgggaagactcagagacactgagagaccctgccccccatttcttctctgacccagggcacaggttaccttcagcgccatggccttttcatcaaggttcgccttctgggagcaaaaggaaagttggattttaaaatctttatgtttttcctgtgtgcttggcatgttgtatctgcaggcaggagactggcttgtgggagagggagctttggaagctagagatggattggggcatgtgtgtataattgggggtggcagggagaatgacgggggctggtgaactccctattctggctggatgggctcctgcactgagtcatgcttctcccctaagccccacctctggtaaggtgagctgccttttgtcctgctggtgtccctctgggttaacccctccacacccttcccaccaccctgctgccttgactcacccctggaacgtgggctgctgtggagggaccgctggaactgggtctccctgatcctgggggctgcagtgggttaggaggacaaggggccaagggtggggagtcaggccagttggccacctgggtccagagggtgattcaggccacagacttgggactgcctgtgtgtgtgcctttatgcgtgtgcatagtccccagctgggcagtgacctacaacagccagagcccttctgatgggggagggagcagtgagtcagcctgatgctaaatccagagctgagctcagagctgggcccagtgtttcagacacttggggggcacccagtgttttccccaatgccacaccttgggccagacatttggggtcccaaacttgagccactggagggaggacagatttggagctggtgaagaacacagagtggacttggaatctgggccaccccggcacccaagttaacagcactgcgtgcagtaatgagtgtgtctgtgtggtttgcgaacacttgtcctcccactaacctgtgtgccccagaactactgcatggtgtgatccctggggcagcaagggggagagtgatggcttggtggggggcagcaggcacagacctagaccctgccactcttcctccctctgtccaccagtccctcccttccctttctctgctccgattccaattcttaaagaagtaggctccactctggtgaatatttgccatttcccctcgtccttggcattgtgagctaactatgaagattgagcccgttgcagatagctctgtggacaagatgcagctttaaaactgcagcagccatcacgccagccagtgcccctggcactgctaatttgagctcaaaattagccacagaccctggttaaaattggagagtccccccaagtggatcatgtaaatgattctggatgtttctaaagattttttcccttaggaatcaaggacttcttgccatgctcctacccacattgtgctgggaaggagaggcacgctgaggaggaggtagggttggtaacagggctgtctttttcctgtagtcctaggtgacgcgggaaagaggagaaattaaatccataggactgcctgagcttttggagggagagatactggtgaggggaaaggagaagactttttaaaacttgaggcctggcctctctgaatctgttgtgagccagtttctgaactgaaagaaccttcagagcttccacatcatctgccctttttccagatgtgtgatggtatctgctgtttccacgactccactcctcccctctgactcaggccagccagctcctgggctccagcacaaacccctggccccagtgtccagagcttaggcatctttccttcctccataccccgcccctaacttcagggttccctccctcggctgcgtggttggcagttttgtgggtctgaggttgagaaaatatctggcctcctgaatctccgcctctgccccactccctgcctccagcaagatctcagctgagctgggggagttgtgcaggatcaagaagtaagccagagccagcccagtaggggccaaccttcactctactctaaaagctgctggcccacaggtacccacactgggttacttttacctcctcagtcactagatctggggctttttgttcaaaccacttcttgcctgagctagggatgactcttgtagtttggatgagttaaattagctggatcttcccatctgccacgtaaccaaagccacgatggcactgtgggtggacctctttagacagcccccaaagtgggcaaagtggctggttgctgagggcaagggtacttggctttttcccccacagactcttcattcttgaagtcatcactgaacagttctgattctaggataggatagctcttgcccaggtcccctagccccggtattcctaaagactcaggagctccacctcagggtgagggaggccccttgaatgttctctccctgtgcttttagtgctgggtctcccagccttgacctgccagtgacttcttcatctgctccctcaggttaaagaggaggacaaaactctgccaaagcctggctctcctggcaaggaggaaggggctgtaagtgcatccttgagttctccgaggcatgcgtgtgtgtgtgcgggcatgtgtgtgtgcatgcgtgcatgtgtgtgtgcgtgtgtgtgtttgcccctgcacccactagccctggactagcctgtgagacagctccatggagtaggtggggattgcagggggccccttcctgtgtggctcagctgaagagaattctagtaaaggggaagaaagtacggtgtatgtgatgccagcttcaggtgtgtgaaggagatggccaaggtgctttggggacctcccctaacctcctccccaatccccttaagttgcctccctttggttctggtttcctgaaccctttgggcctggagaggcttgggtgggcaaactcttaggtcagggagcgtcgaatgagagctcagctgttgggattcttcagcctgctctgggtggcacaaggcaaaggcatggagggacttcactgtagtcgctgctgtctcttccaagaccctgtcagctgcttggtgcaggtgacctggaggcaggctccagctactcactgcctccagccccagcgcattgggatagagaccctgaataaacctggactctcctaaggcaagaatagccttaggtttctgaatagccaagtccaaagatgtgtagttaggagagggcagctggtagcacagggggcaggagtgcccagggctctggggcagagctggatcacaacacatattcttacttcattaccccagatggtgcctgtcctggctccctgcacttccttggtcagtttgattagccaggcactgtggcttccacctgatctgcaaacaatcctggaaagccagcctgtgatttgaaagggttgtgtgtgtgtgtgtgtgtgtgtgtgtgtgtgtgtgtgtgtgtgtgtgtgtgtgggaaaggcctcagagttgcccagaatttattttattttattttttttgcaaaaactacatgtaaagtgcttggaagagtgccatggcccatagtgagtactgtgtaagtcttaccaattactatcatcatcattgtcatcattttcttttcttttttttttttttttttttttttgagacagggttttactctgtcacccaggctggaatgcagtggtgccatctcagctcattgcaacctctgcctcccaggctcaagccatcctcccacctcagcctcctgagtagcgtagctgggactataggcacacaccatcaagcctggctactttttgtattttttgtagaaacagtttcaccatgttgcccaggctggtgttgaactcctgagttcaagcagtctccctgccttggcctcgcaaagtgctaggattacaggcgtgagccaccacacctggcccatcgtcatcatcttaatgatggaagggggatgggaggaaagccagaagagggaggggaggagtgtaggatccagtggctagggccactggccaactctgcagtgccctggcatgccattgagcactcttggcctaagaggttgaggaagaggcaccttcaagcccttactctctctatcccttcagcggagccaacctgtaaccagggcctagattaaggcccttggctcagctctgctcaaaaggtggagcaacttctccttgtggcatccagaggcagcagctcccaggtgcgcctactgtgagcgtcttcctgcatccaagcaagcatgggcaggtgggccttcacggagcccagtgcccatatgtgttctagaaccaagatcattgttttgggtaacaaggactcaagcacagctcagctggtgacagagctctgcttggccaacaaggagaacccaggttgcccttacgctccccaggcaatggagctggctttatgggaaactctatcctgccgttagccagcctggccttccagtggcagtcccttgggacccagacagttagcaccagtgtgtgggggaagggtgggcacaccagctagagtataccagtccactccagggaagattggagctgaggctgcttgagggctatacacactctgggaactagggggtctccaaacccttgagaggtttgcaggaggaaaactgcaaggagactggcagaaagcaggctgaagtggaagcttcctggcccgtgctgggctcctcagtgcttgagaacatagatgaagggcagacagtggccgcagacgagggacgctgtgaggaggaggcctggcatgtcttggggccaggaagagctccctgatcattttttccttcaggatgggtaggctcttggtctgactgcccggaaaacaggtgatggaaggaccaaggactacaaaggtcaggacgccctggagttaggcctgggattggtggtaggaatggaggtgggactcggctgtttgacctctccatgctccatctctgctgtgtccatgctccatctctgctgtgtctgggctgcgaggcagtgggctcacctagaatgggacttggttgctgccctgacacaaagccagtaaccccagagcacctcataggcctctcggcgctctgtgccggcatctcacaggtccatgctaagtctggggatagacagcaggtgacagtagtacctgattgtgctgattgtgctttgtgggaaagaagccagactcttagctgcaattgtcctatctgtaagatggaaagtgggcttcctggggtagcctcgtggagccatgtgttgcttggtagatgaatgggagatctgttccagggcgtgaggtcacaccttcttattccctctgcatgggatgggcagggctgcaggggtgatgctaatgtctacctgtatttgtatgactgtagctagagggcagctcaaaggaaggcagtggcccatctaggagtcctcagcctcccaccagcccgatacccccagagacttcccagagagccaggagccctgcacccacactcgccatgaacggcccgggagctgccacagcagaaggcctaagcgaagaggcccagggcctgtcccggaagcgggtggcaaatgcagtgaggaaggtggtgagtaaggtgctgcccagcgaggagcttgggaatgccaaggagaccccaggcagaggagtcaagtcccccgagcacccgactcgaagcaagaggggagaaaaggcagcttctagtcccaagccgccaccccctcccccacctccccctgctccgcctaagcctgaagtgaagaaggaggcagccaaggatgagctctccctgggcctgcggagcctgatgtctcggggcaggggcaaggagcacaaggcccgcggcaagcagtcttctgggaagggggagaagccctccagccaggagccaggctccccagactgggcagactcccctgagaaagcaggatccccagccaagcctgaagccccaaagaagcagcgctccccagccccaccggaagagctggtgaccccaggctccaccggcccgaagtcagacctcactggagagcagcagtccaagtcaccagtccctggtgtgaagcaggaggtacaagagtgtgtcactaaccgctcctgcccctcaccaccctagctcaagggccaggcaccctcacagccggcttccccaagcgacctcagcgaaccccgcatgaccgagaggctgggcccagggtcgtgtgctgatggccggcaggggctgcatggctttccctaacccaatgcggaccctgcagttgcctgggctctggcctggcggctgggatggaaactgctaagcagcatgttggccttgccatagggagtcagggcctggtccccagctacatggcgccagcttgaggcctgagacccaaacccgaggatcagagtctcagcagatcagttccaggaggaaagactgttttctcaagtcagggatctgggcttgcattcccagccactcatcccctgggacctcagcaaagtcccatctcagacttcctctgttgagtggggataatacaggtccaaaatttcttctctgataccctgggtgtggcagtattttggaaattagtaatctttgtattttagtgccatacagtatacataatgagcaacaacgtgtaacaaacattaatatttccaaagcaaaatctatgaatattcacactacaggggcatagaggataaactgccaggttttgccgccaaaatagttaagaaaaatattttgtttgggggggcttttgggattttggaattgcaaataagggttaataagggttttaagtaaccagaagattagaaatgatacagataatgctccaagccggtccctggcatggtgggtgctccataaatggtagcgttgatagtggtgctaataacagttgttattgatgccctcactgccatcactgccttctttaggcctggccagcatgaccatctggcagcaggactcttgaggagccctgtgcttggatggcagatgggtacagtgggccccttgggatataggggcaaccctatcttcccagaaagtgttctctgggtggggcaggaggctgagaagcaggagggagggtcagtccagcctctttcccttggaaagtgttgccttcttggctggcctctgagttggggacagttctcttcaagcttcccttttttggaccctgctgaggcctcccagggtgtgggagaggagcatcaagttttgccactacttccctgtgctcatgcaggctccttctggctggaaggagaggggtctggagggtatgggggaatagcctgagaggccttgaggccctccctgactgttacctcctgggacctggggagccttgttgctccccattcttcctgggcattgcagcacttagagaaaagccagccgccgcttcccccacccacctggcccactctgtgaatcagggaagtgcctgttcctgctcacagggaggagctggcatgggcattttgggcagggtatgggcagaactgttggtcgctctggagaacccataagcaggtggggagtgtcgtggtcctgttcccgggcggctgccctcccctccctcctccccgtccctcctccccgtccctcctcctctcacaagggaggagatgggagctgagacatgccctgacctggagtttagccacctgtcacctgggcctggggaagggtccagagggcaagtgggataatagggccatttggtgctcaagataggcaggtgggaagaaataaccccagaactcccaggcacttgttcttttttttctaatctgatggtttaaaaactcagattgccgcgcggcttgctccctggcgctgctccccttccctagtgggtcccagtggcttcctgggctgggagctccgcatgctgtggcctctccatttctgggctgggactaatagtggtttaacctttaggcaggagctgccaaggtccagctgacccccgtggaagaggcccaccagcggctggagaggatcttcacagcttctgtaatgccactcttgtgtgtgggtcccagtccctggccgccctcttcctgaggctggcggcaggaccctgtgtgtgtctgtaggcgcgctgaccatgaagatggctccatggcggcctgtgggccctcatgttgggctctctcttaaagaaatgagagaagtgctctggggagagtggttcctccagagagcccaaagtcctgtgcatgtgggagggcacccctcctcgctcagggcccagtccctttctctggccacattgtcctgcctcgaggacatgtgttggtgtcagggcctggcgggtggtaaggaaggttgctgtcgctatttttggtgacctggctctctagacccaggtggggcctgataactccttgccgatttctaacaggtaacatccaagtcctggttgacttgccttcctccccagaaaggcttttcagggctttaagtaaccagagaggtcacggctggccacagggtttgcccacagtgcctttgctcttgggcagctgtcaagtggtccccaggttggatctagatggggtcggtgtgcctggctggcagaggtgggagtgctatagggtacgtcggggttgaggaagagattctagactgcaagctgctgggagctgtgttctatgagaggtgcagggcgacagctctgaacacagcccttggcctagggagtggcacccttgggctgtgttagaaggcaaggaacagctctgtgctggtggccacaggggagctaggctgagaaatgctctggagataaggcaagaggctggcagggggcccaggccttgggtgtggtgaggtggcctgacctggtagacacacagaagagggagcctgattcagaatagaccggatggccagcccaggagagactgcggccagaggcagagtggcagactcctgcccgggccaccgggaatgacttagaggagcatctcctctgagaggcctgatggtcactagtgtctcttcaccttcctggcctctccttgactgggtgcagttcacctgctcaggccaggtcccaggtcctggcaccaagctcccccaccttcaccccgagccttggacaactagagagtgccggcccacttgactcaggagcacttgctgaagggggcgtgccagtggtctgcttatcttcacccttcttctctctctctcctttgcttgctgtcggtagctggactctgaggccgcctctcatgcccacagccaggtagggtgctctccccccactcaggagccctccgctccctccagtgaccacctagccccactggcctgcacctgggctggcgtctgtgctcgggcctcctgctggagtgtaaggcctctttcccctccaggctcccaccctgtgtctgggaggaccccagcgggaggtagtgccgggagcttgagatggtgcagctctgtgtcaggcccctggggagcatctagaccgagtgtcgcccttcaagttgggcccatgtggcatgtggttctcagccactggagcccaaggggggcctggttgagttctaggtgtttcaactctgctcactctggagagagaaagctggaaaggcagaatctctgccctcttcccagcccatgcctgaacgtgagacattctctgtctccacctcctggccaatgtgagaaacccattttcagatgagctttaagggagttagttacaggctatgatgtcaccttattcatcagtccccaaatacctggcccatagaaggtgtctattcaacataaaggtctcccctgtcttatgtgatttgagaaaaaatatatatatacaacattgtaatgattttttttttttttgagatggagtctcgctctgtcgcccaggctgaactgcagtggcgcaatctcggctcactgcaagctccacctcctgggttcacgccattctcctgcctcagcctcccaagtagctgggactacaggtgcccgccaccatgcccagctaattttttgtatttttagtggagacagggtttcactgtgttagccaggatggtctcgatctcctgacctcgtgatccacccacctcagcctcccaaagtgctgtgattacaggtgtgagccactgcacctggccatgatttttatagttatagttcttcaaatataaagaactagcctttttaatgtcctcacttaacacaccaaaatgtggccagccacgtggtgatcctcctattcagagttatttcatgggtccgtgaaacccggagatctgggagccactggtgcagcccagccctcctactccaatctggggaagggccgtccagcactggagggatctgtctaaagccagaagccaacctgagaggagagcccacgtctcctttactttcaactccaagaaatgtgacaaagaacatacttcttatgttttcttatcttttcctgatttctcacccagggggtcaggacccagccagtgtccacgcctgggcctcaggtttcaggctgactgtgcctcacagctggggccctccgagagtgtaggggctcgggctaacctgagggtgggtccatgccactggggtgcccatcccccacccggggcacgggatgaccttgctgccatttcgcccacacacaacaagaggagcccgatgggccctgggtccctcgtctgtttccccagctcccccagacaccgtttcttcccagttcaagtgtccttcttagagggtgccaggtttgacagccccacaccgtcagtacctatgaatgcttatgtctgagttggtgacctcctgaggcctctgggggcttctagcccctttacaccactcctgtgcccatctgtataacgtgtaagcctctccctgtgtttgacagggcagggctgcccctacccccatatctctggccgcactgcctcgtgcctttgtgtggcattagcgtgtccactaggtctgtgtgacaggggtctttgctgatggcggcatggagaaggagcagggaggctgatgtgtgcacctgggcactgtcccccggtccgggtagagcaccctctggaggggagggccagggctgaggccagggctctgagcccacctatcattctgtactgcgaagtccaggcgactccccgctgagatctgaggacatgccctctcccagcttggcaaaggaggccctatcatttggatgaagggagaagctgggcacggaagatcctagtagctgtggctagggtctagggccttggactcaggacactgatctcctgggcttgacagggtggaggagcagagggtggctgagggagaacctggtgatttgctttcctggggtctcctctttcctgggcacaagatccctgtgtccctgtcttgccagaccctcactgatggtacggtctctagcctttgtgtcctgtcctcagggctccttagagccacccttgcctcctagcttccccaccctctttcccagacacctctgatgtccctgtgttctgtgtctgtcacctaactcattccttgcccagtggcttgtctcaaagcccatgccctcacttgtctcccctctacggctgtccttgtccctgtcttccatagcagggcctgtttattcttctctctctctgacaggcgaaaacagaagaacagattgcagcagaagaggcctggaatgagacggagaaggtgtggctggtccatagggacggcttctcactgggtgagtctcagagggtctgggggcacatgtcaggactcactggtctcagggctgggcagcgaatgtgccttctgcatctggtgagggctgagcagtgagcaaggagaggctggtgatgcagtgggggggaggataggaccgagaagttcccaagtggagtagcagaggcttcccaggcccatcccagctgtctgtccctcccctgcagccagtcaactcaaatctgaggagctcaacttgcctgaggggaaggtgcgtgtgaagctggaccacgatggggccatcctggatgtggatgaggatgacgttgagaaggtaggtgggcagggggctgggtgtgggggaggaggctcaggagtgcactgggcagggcaggcccatcctctggcagcggagatgggctctgctgctctaatacccacccgcctgtcctcccacacaggctaatgctccctcctgcgaccgtctggaggatctggcctcactggtgtacctcaatgagtccagcgtcctgcacaccttgcgccagcgctatggcgctagcctgctgcacacgtatgctggccccagcctgctggttcttggcccccgtggggcccctgctgtgtactctgagaaggtgcagcaccctcaaggctaccctgcagactcctggtcccaccccctgccctggctctctgcccttcccctgtggcaccccactgggctcctgtccactctcacagttgaccttgggaagaggagtcatttcaagagatgggggacaggacctccccacaacctttgatggagtccaggacttagtgtcttcatttccatgcatggccttggccttggaatccctgggcactacaggagggaaaatccagaaagatgtggaccttgggggtgaggggtgtcttaatgggatcagctaagagccaaccccttctctcccttgctctcctgcccaaggtgatgcacatgttcaagggttgtcggcgggaggacatggcaccccacatctatgcagtggcccagaccgcatacagggcgatgctgatgagccgtcaggatcagtcaatcatcctcctgggcagtagtggcagtggcaagaccaccagctgccagcatctggtgcagtacctggccaccatcgcgggcatcagcgggaacaaggtgttttctggtgaggcagggacaagggagaaaactgaaagtggggtgaggggaggggagtgaggagagagcaccctcttaagtgccagctctttttctccctggcctttccatccccccgaaacccctctgtccacgggcagttctggtctgaatggccccaagccttcatacctctggggtagctcctagctgggggataagctgcccctggctttcctgatatccccttgggcctgtattctgcagtggagaagtggcaggctctgtacaccctcctggaagcctttgggaacagccccaccatcattaatggcaatgccacccgcttctcccagatcctctccctggactttgaccaagctggccaggtggcctcagcctccattcaggtgagagtgctgcccaggactcggggtagtaggacacaggccacatgatttcatgacctagacatcaggctctctcccatgcctcattttcctgggattctaccctaacaaaattgacccaggcatgggcagggttggcctgcactatccagaggcatcaccattctgccctcagggcctcctgccctggatggggccagtccagctttctgcccagttcccttcactctcccaaccctggggttgtcctaactctactgctgggcctcagccttacttcccactttctgagattcatgctcggggcttctctcgggccgatttcacctagcagaggactggcttgtcagtaaagtaaggcccagccaaggctgattccctcccatgctaaatacctcaccacaagctcccatttccagaaggcaggcacctggggtctgggcagagcagcagggcccctttgggagctgggcctgtcttcttccacctcattctggtttctgtcccccatttgatcctagagggatctggtatctgattgagcaccttgggaataagatgcacctgcttaattgagccagatgtggtagtgcacgcctgtggtcccagctacttgggaggctgaaatgggagggtcacttgaacctgggaggttaaggctgcagcgagctgtgattgcgccactgcactccagcctgggcaacagagcgagaccctatcttaaaaaaaaaagacttaaaaaacaagatgcaggttgggtgcggtggctcacgcctgtaatcccagcacttcgggaggctgaggtgggtggatcacctgaggtcaggagctcaagaacagcctggccaacatggcaaaaccccatctctactaaaaacacaaaaatcagccgggtatggtggtgcatgcctgtaatcccagctactcaggaggccaaggcaggagaattgcttaaacccaggaggcagaagttgcagtgagccaagatcgctccactgcactccagcctgagtgacagagtgagactccatctcaaatcttaaaaaaaaaaaaaaaaaaaaatgcagctgcttgttccccagggcctagaggaccatgtgtttgattccttcttatgtggggtgggagaaacttgatctggcactaccctccttacccacacgtccatgctgtgtcacagacaatgcttctggagaagctgcgtgtggctcggcgcccagccagtgaagccacattcaacgtcttctactacctgctggcctgtggggatggcaccctcaggtgagatgggtcagagggtacacaagggttctctgaactccagcccactgactgggctcctggaccttgattgcatccagaattaaagccacttgatcgcatcctgcactgtttggtcagtgcatgtctgctatgtgctaggctctgagctaggccccagggacagtgagatggatgagacatagtccctgcctatcaagaactccctggtcctgggtactggggcctggctgtattggaggggaacagccagcccttcagtgttgccagggcctagctaggatctccattacccatgaagccagttctggaaagcaaagcacactgaggtaccagtggttggggacttgcctactgtcgcatgactggtagggggctgaactggtatttgaatccacactggggccaaaagcccatgcctcttccagtgccctccagactagcccttcctgccccacgttggctgcctctgccacgctcttcccttcagacattcagatttgccgcgtgtgttcactaaaaagagataaatgatgaggctgagccagcatccccaggccattgtcctctttagcccttcttgtaactgagggcatcgtctctgccttggcgggactcacccttcgggcaggttccctgctcccttccgggggccaggttgcatcctctcaccagggcatgtctggtggcttgtcctcaggagaatggtactctaaccaggcatccaggccagttaggaaagcagtgacagctggcccgccagttggggatgatgggatgatgggcagacaaaacttggagtctggaagctgagtctgtctgtctccaccctgggcggaaatggccttggcatggggaccaagtgccgtgctgatgccttatttgtacccctaggacagagctccacctcaaccacttggcagagaacaatgtgtttgggattgtgccactggccaaggtgaggggtctgtggggtctgggttgccagccctgggccttgggggtaggagaagcctccatgggtcctgtgggaatagtgggagcccagctccagctgctggctctacccaagccttgccctgagggcccagcctcatgggggtgtgctgggagggacagccctttgaggtcatctatctccacagcctgaggaaaagcagaaggcagctcagcagtttagtaagctgcaggcggccatgaaggtgctgggcatctcccccgatgaacagaaggcctgctggttcattctggctgccatctaccacctgggggctgcgggagccaccaaaggtaacctgcagtgggtcccagtaggctggcctgtcccctgggtgacctcacagggaccctgcccactcccagtttattcttgcccagcacagacttagccgttctgagacaaccctcttttgcttgtgcctcttctcagccccccacttcagagcagaaggcccgggaagcatctttggcagtgacgacccgaggcctggacttagctggctgtgctggggggcaccatgaggaagcatggagggctgggggttcagaggctgagggatgagaagggcactaaggcagggcagccccgctggaataactctccttcttgttcccttcctgacagaggcccccgaggagcaagcgggtaactgaccttggccccgcccttgggtataggggccgccgtgccctgtcttggtgcttgcccaggactttctaggggctgggcttgttctgttgctgcagagaggactggtctggggagaagcctggaggttgagagtggaagtggagcctgcaggctgtggggtgtcttagagtcccaggagtagctgcttctcctgccagttttagatctgaatcctggaacctctcaggatgcccaccgtggggtggggtagggtgggcttgctacctggggcctccccagaccagttttccccagtcctcttcccttctccactggttgggtagctccgtatcttcctcttgcatgtcagggtggcggccactagggggcagcaggcaccgtggtaacgaatgggctgcagctttggcacttgcgctcggggacttggcctggcttggaggagctctgctccatccttcaagatgacttacgttggaggatggcgattcgagcacctcttcaccccctttttctccagtttagggaaaggggatgctggcgctgaacagcaccttgggctttggctttggccccttctgggatgtgaagggccccaggctgctcagctggagtgagaaagtcctggcaggtggtgggtgtatggaggaatgggtgcccaggcgtgaggctccgtgcgagcgaccccaagaagtggcatccctgcccaggaggagccaggctctaggttagagaagttttctcgagaatgtggaggacagacaggcgggcaggcgtgtggctgtgtgttgagggaagttacttcactctgaggcggtgacaagcctagctttcctctaacctacccagccccaactgcaagcggaaagctccgggtgtcagcacagcgatcttctcaaacaatgtctgttagcgnnnnnnnnnnnnnnnnnnnnnnnnnnnnnnnnnnnnnnnnnnnnnnnnnnnnnnnnnnnnnnnnnnnnnnnnnnnnnnnnnnnnnnnnnnnnnnnnnnnnnnnnnnnnnnnnnnnnnnnnnnnnnnnnnnnnnnnnnnnnnnnnnnnnnnnnnnnnnnnnnnnnnnnnnnnnnnnnnnnnnnnnnnnnnnnnnnnnnnnnnnnnnnnnnncacacacgtgcacaaatgtctttgcgggtctctttctgtgtgtgtcagtgtgattacacccacaaacatactccctggagactgtgtgtgtgtgtgtgtgtgtgtgtgtgcgtttgtcccaagtctgactgtggttgtgttttcttgcctactcatcctcacaacacccccgccccacggtccctccgaggcggcgagctctattgatgactgtttgctaacacactgtttttctttgcatgctgcatgctggtcctttgccttacagaagctgctgaaggtaaaaccttgtttcttgttagctttccctaattgccgtgattagacacatgttggctgaggcacatatgtctgtgcgggctgttccctttcccctgtggcttttttgcctccccactgttgggccatcagtgggtgtttgtggtctccactggcagatgccagggggcaagagggagggttctaatgtactcagggaatgtggaggcatgagcgatctctcaagataagtcccccacaggcacacggggttcttgtgcccatcccaggtgggctggttcatcctctgactccgcccttcccctagttgggcatccccggagctgagccatctgaaaagggatttttgcagctggtttgttgccctccggtggcagcatgtggagttacctcctcctttaggacctgctcattctctccatccccacgggacacaggaaatgctggccactgctggctgcccctgttctgcctgaagcccatcgggtgtcatcagggctggcttttgcctccagaagatgcatagtcatcagctggtcatcaggtcatcagctggcctaaggaaaaagacccaggatgccagatccctttttccactccacagctgggcgcaagcagtttgcccgccatgagtgggcccagaaggctgcgtacctactgggctgcagcctggaggagctgtcctcagccatcttcaagcaccagcacaagggtggcaccctgcagcgctccacctccttccgccagggccccgaggagagtggcctgggagatgggacaggtaccctttgtcccttggctggtagttgtgagtgtgaggcctcatctggggcttgctgccatccctggggcgggaggggactgctggagtgaacagatgctctgtcagtggcagaggccctgccccaggccccgtgctgactgggccctgggcaggtcaggggcttacccagatggggagccctggggagaaggagatagcgctgctccccctgccccacaggcccgaaactgagtgcactggagtgccttgagggcatggcggccggcctctacagcgagctcttcacccttctcgtctccctggtgaataggtgagtgccaggcaggacccagggcttttcctgctttggcagaggtggagtagatgccttcatgccttgttggccgaggcagagccggtctcttccagcaggggctccctgtcccatgggctatgagcaaggccagcatgccctccccaccagggtcctgggcagggatagaggtctggcttgggcagggtggggcttcctggtgcccggggccaaccagcgaggctctgacccaggctgtccctatccagggctctcaagtccagccagcactcactctgctccatgatgattgtcgacaccccgggcttccagaaccctgagcagggtgggtcagcccgcggagcctcctttgaggagctgtgccacaactacacccaagaccggctgcagaggctcttccacgagcgcaccttcgtgcaggagttggaaagatacaaggaggtagctctggggcctgggcctcatctagcctcagattctggccttggcacccacagcgagggcatctgtggatgcagaaggcatcaccttactctccatttctgtcctcctgcgctctctggagcaggagtcgttccttgcccccttgtccgtggcctctggctttggctacgttcttacttggtggagagtttactctccaggaagcctacaggtgcattgagggcccccaggaggctacccttggcctcttttgaggcacctcccaggcctggtgattgccactgtgtggttcctgctccaagtgtgtctgggcctggccttcccgtctcccttccctgatctgtgagggtgccaggtgatgatttagtgccttctgtaaaagggtgtcccggatgggacgagaactggaaatcctgcctcatctggaagtgagttgagtgaattgtcaggatatttatttggggcgagagaggattcagaaggaaaatggcagttgtcttcaagtgtttcaaggatgattgtgtgaaattgagagtgggcttgttctgtgttgcctaatcaactcatgtgagtaatgagaatgtgactctggcttcggataaaaagaggttctgagaattttagctgtgcaaaaaatacagtgtgtttccttgggagctgtttcatttgggatgatggagggagctcctgcacggcacagaaggaggttggccttgctgatctcagagccccttcccagcctactcacaaggctgttccccacaatgtgacccccatgctcactaccgctcggccttctttcccaggagaacatcgagctggcgtttgacgacttggaaccccccacggatgactctgtggctgctgtggaccaggcctcccatcagtccctggtaggagctccagagagggtttgggcaagcctttcctctcgttccccacccctctccccgtggtggagccctccccatctgagctgctgctgggggtgccactgtgggctgagggagggtccagcagctatgcccagacaccaactactctctggtgctggggctctgcccctcagcactcaggcagtcttggccaggaaggtggcactttcttctgccctggtgccctggggagccacagcccatgggggtcccagtcaggcaggaaagcatatctcctttctcagcagctgaggctcgggccccagctggtgactggctgagcctccagtatgtctgctaggagccctggtgaccagtcccagctggtgagggcctagaccccaaggacatagtcattccctcccattgtccccaagtagaggactggtgcaacctaacagaacagggccaggagccagcctcccgctcccaggggaaacagtgctaagctgtcagacgccctctgggggactgtcatggatatgaaccctcacccctcaactttgggggcaggctttgtcaccctttgtgctagtgtcctgggcaccttggcactcggtgggggactggctggcctagcaaactcttggcatttggcgattgtccgccattagggaaattgcataaggtgctttattggagaactggcatttttgcgaggctgccgacctccctgctctgctttgatccctacctctccctccctcttctctgccatgaggccctgcttggcttgcacaagtggtggggctgcgaaagagtgagtatccccccggggacagatgtttaaagtgcccaagcaccgcatctccccagggaagtgaattttcttttcctgacacctgggctcctatggtggcctcactcagaaccgttgtggttcccgggagaggggggatgtcagcatgagcagcaggagtcagacagcatgtgggaagagcttggctctcctttctcttctgtggtctctcctgactaatggaccttggcatggggcggctgcacccctggggaaggggccctcggtgccaagcctgtcttcccatctcattgcttcattgctcgttcctgctactcggttcctgccactagagttgccttggcctttggccacattctgcttccttctggtaatcacgccaactcccttgggcatctgcggggaggagatgcaggcagctggggtcaaagagaggaaaaatggcccttttctcacttcttttttcctccagcccctgaaggccaggccagaatagggtgtggggaaggttccatccttcctgcccaagaaagatgcaggaactccacagaaaaggcaccttcaggccagatgtggccacaggcctagtttgtttggccttcatgggatattggaaattagaattagatatttctaccttctcttgaagaaccagagggtttatcaatgctaggccagtgttcttccaggagagcagctagctgcagctcagtggtggtttttccctttggatagggatacctgctctctagcttgccccagcctctacccgttttggctgccacgtccgttaagtcacctgtcttatgcttttggcccttgagtgaccctgcagtgatcccactggcagccatctgagccccctctgggttctctcctttcagagaccaggattaacctcacagctgtcacttactgacagcttccttagggccaactcttgtgctcagggccttccagactttatgccactgccagggagtgagagcaatgtggggttcatccaagtccctggtgacctccgaggggacgagggtggaggagggcctcggggcgcgggctcgggccagcaggaaggctgcagtctttggtgactttggactggagtgctaagcaccctcttttgctgtgggcttccctctgctcactttcttggctcccctttccccgggctgcccgcttcctccacaaggtgtcagcagtgagcggcaggagctgcggcatgtgcgtgtgtgcatgtgtgcacatgtgtagcattctgtagggtgtgtttgggcccggcaccaccctggcccctttcccacagctccatatgacaaggagggatttccttccttctctgtaggtccgctcgctggcccgcacagacgaggcgaggggcctgctctggctattggaagaggaggctctggtgccaggggccagtgaggacaccctcctggagcgccttttctcctattatggcccccaggaaggtgacaaaaaaggtaggtggcatccctagagggtagctcctctgcttcctcttacatacaggtgggtccaggtggcactccctgggagggggcgggggtcactttgtgcctgtaccctgacgacctaaatcttgcttctcccaccatcaggccaaagcccccttctgcacagcagcaaaccacaccactttctcctgggccacagccatggcaccaactgggtagagtacaatgtgactggctggctgaactacaccaagcagaacccagccacccagaatgccccccggctcctgcaggactcccagaagtaagaccaccactccctccgcccctgttctgtacccaggactgttttgattttggggctccctccccctggggttgtctcagaggccccctcactagcaaagtagatggcctttattcctgagaggcaacagcccagggcacttggccttgaggagcttgaggggcctcttgaagtagaggtgggaggcagacatggtgggagagcctatggtttaaatgtgaagaacaccctcaagtcaaagaaggcaggagcggccttagaacccccagccccacgggccctgtcatccgttctactcttcagaagatggttagtgggcacctaccctgcgacaggggcttctaggtgcttggcagataatagtaaacaaaactgaactccctgcccttgtggaatttacattctaatgggagagacagataatgaacaataaacataataaataaattatatcgtatgttagaagatgttgaaccctaacccctcctgtcacattggaaactcttccacacctttgccctccctggtgaggggaagtagatgagtagattgatcccctctgtccgattcctgtccaccccttggcttctgcccacctctggctttctctccttactgtttgaaaatttctccacagtttgtttctctgtagggtgtggggcatgcagttcaggtagccaggcccctggacgtggctgaatgggactgtttagtgttctggggccttgggggaggagcggcctttcccgctccatcgatgtgactgcttttcctcccttatcctcccacctctggcagaaaaatcatcagcaacctgtttctgggccgcgcaggcagtgccacggtgctctctggctccatcgcgggcctggagggcggctcgcagctggcactgcgccgggccaccagcatgcggaaaacctttaccacaggcatggcggctgtcaaaaagaagtcactgtgcatccagatgaagctacaggtggtgagtgccagccgggtcccagcaggcaggcctggggacccttccttacccctggtaggcaggcctggggactccgagcacactgaggccatctggtgcccactcagcgtcccactgtgactcaatggctgcaggtgggggtcttcttttcagtgctgccacctgtgagtggccaccgaggcccggcgagggcagagttgtccaggtttagcatgtcctggctggtgctggggccgctgctaccccgtgagcagtggagacgctggcaccagtccctgctcttctgagcacaggccatcagagcccactgagggcagtcccttcccctcggcaggacgccctcatcgacaccatcaagaagtcaaagctgcattttgtgcactgcttcctgcctgtagctgagggctgggctggggagccccgttccgcctcctcccgccgagtcagcagcagcagtgagctggacctgccctcgggagaccactgcgaggctgggctcctgcagctcgacgtgcccctgctccgcacccagctccgcggctcccgcctgctcgatgccatgcgcatgtaccgccaaggtggggcctcctttcctctccactctgggctctcttttccagagctggccctgcccggccccacctcccacctgcgacccgtgggctgcagtggggctgctcctgtctttcctcacgatcctttctgctctggtctctcctcatctctcccagcccacagcccctttgtccatttccttccatcctgcagagtccccgcctcctcctctcccttccatattcagttctctttgtccccctcccttcctagctccaccctgcaccttgtcatttgtccacagctccctttcttcccacgtccctagtttggacagttcagctttgcccacagcagcaaacccagtgccctttcggagccatctgcccagtgagaaatgaggtgctaaatctttctgaagtacttaaaattcccaagaaaggtcagacagacccttttttatggacccatctaaaggaggcgacagacaggatgatagtattagtggttacttagagtccttagaagctgttatcggtggctgggggccgggatagcacactggtatcattccagatgaggagactgaggctcagagaggttaagtagcttgcccaaggtcacacagctcctgagtggcagagtgggatttgaccaggcaggctggctgtagagtcatgtctcatgtctctcaagtagggtgggttttttttgttttttttttgttttttgcctgagaagttatgagttgctgggtttctgctgtttttctccttcactagaagagcaggtagggtcccacccacccacagccaggtccccttcaggcattcccatgggcactaaaacttccttagcagcccaagccaggaaacaggctccctgccctgctctaaataaatcatcgatctgtccccacgtcttgatatggagttggtgtttattatttcaaaaccagattgttaccgctctgaaccaaaatcaatgtgcgttactcaaacaagcagatcgatgaggccagcagcggcaggccccccttccctcacccggcccccagccaccgactatagcactgatgattaattaagatgccaggcgtccagacctgctatcctggcccatcaatttaattgcaattcagatacaatcaatagctcactttgtcttggcccctcagcagcccccacctcctgtttcaattatcaggcacatgcatcagcctcacctcccagctggagggtttcccagagccagctagcccgtcattgctgtggagcatgcccttggctagctgtcaggagtccaggtttggaagccagttctgcccccagcagcagcctttgtgaccttgagcaagacagtcgctcctcccaggcctccgtttctgtgtctgaaagatgagttggatctggcttaagatccctttctggtttgaaattctgtgattttgtgggagtggagttcgtggccctccaccctgggctctggtaagatcagggtgacttggggtcacttcctgctagccactgctctgacccactttgctccaagccaaaagtcaggtcacacctcccctgacctgaagcccagacactcttcagggaaagagaatctacaagtctttttggtcacctggcctaggactcaaggtcagggtgaggcaaggagggcagcctttctcatgtcctgctctagtggacagagggggaaaaggagtgtttattaaatgccaaccaagtgagtcacactgtgctttttacctggtttctcatttaatctccatgactaccattcgagataagtgcgagggccgctgtttaaaggtgaagaaactgaggctcagaaaggttgagtgactggcccaaggtcacatgatcctaagaggcagggccaggaatccagcacctagccaatgcgcgattcctctcagctactctctggtgcctttttttttttttttttttgagacacagtcttgctctgtctcccaggctggagtgcagtggtgtgatcttggctcactgcagcctctgcctcctgagttcaagcgattcttctgcctcggcctcctgagtagctgggactacaggcatgcaccaccatacccggcttacttttttgtacttttggtagagacagttttaccatgctggccaggcttgtctaaactcctggcctcaagtgatcctcccaccttggcctcccaaagtgataggattacaggcgtgagccaccacgcctggcctggtgtctttttttttttttttttttttttaagaccataagacattattttgtctgggttatcactgaggcatagacttggagggctggaaagcatcttggggattgggatgtagccttcctcccagctggtcagctaccccacaaccccccatttgcatacctcactgactactaggagcttacttctctctgaaggaggctgttccttttttgggccttcctatccccctgtggagcaggcctgattgtcctcctggccttctcttcctcttccctgcctaccccctctcctttctaggcctgccttcaaccacaggctccccaccccctgcagtttcttcccttttggtgactctccactgactgcccaggcacagtggctactggggtgtgctgggagcaggtggcgttgacaggcctggctctgggctgctctctctaggttaccctgaccacatggtgttttccgagttccgccgccgctttgatgtcctggccccgcacctgaccaagaaacacgggcgtaactacatcgtggtggatgaaaggcgggtaggtccaggtccccagaccgctctccctctgcccaggcccctcaagcagctgccctttccagactcatctgccttcccttccctggagacagctcatctggccctgctcaggctcccagttttggaagcacccagctgtgtcctggggcccagaccataggagctggagaagagccaccccctccttggaggcctgagctgggggtgtctgcttgctggtgagccagacaatcatccaggagcgagcagggcctgggcgcactgagggtgcatgagaattattagtgctttgggagccccaccgatggcacctgggcccccatgtcagggattggttcctgaagcaggaagctgtccagggctgggcgaacattcctcctagaaggaaggtggatatggtgagacctccgtggtgccaggtgaacataggctgccgggccatttgccggccctggttggtgaacttgtggctgcggaaggggtgtccctgcccgtctgggctatcaccttgagccccagaggcagccccttagacagtcacagggctcccagagcagaggacccctcctttactgtgctcgggcctcaggcatccagcctgattctgaaagcacctcagaccttaggatggcttccctaaatggagaggatgctgcagaatggggcagaaagcccacagagtgcccagcctgcctctgtgtgtgcccccctgcccctccacccctgccttaaagacctgaattcatggagggggctcggaagaacttccctccatcctttggcctgctggtggcctgggcaacctcatgtggacatagatgcccgtcccacgcccccttctcacaggccctcagcctccattccagcctcccacctgtggctacaccagtacctcatcagctctggaaatgccccagctccaaaatcataaatcccagcatggccttctctgaccacagcctcgtgcctgctggtcccactcctctcttcccctcaggacacccgctctctggctccatcagaacctctctttctggatcacactccatttctctgtgaattgtctccttttccatggttcactctgcagtcactcggcctccctcaccctcagccctcctgagcctcccgcagcacctggcctgcccaactcccaccgaagcgccagcctctgggtgtctgcactccttgctttgggctcccaagggtggtgggagaaaattatacaactttgtggacttgacttcctacaggttcatggtcttcagcctttggtgggccctcagggggaccagcaagtcttctagatgtcccctccttatctggccgtgactccaggcttcctgtctgctattgcattctccatctttcttctcaaatcctccccgccccaccttcctggctcaccttcccagcagatgcccagccttcagatctcaggacatcaggctccagcttcttctgcctcctgcaaacctctcttccctagcctccttcttcccgtaccccttctgtcttggtggggagggtccctctcatccagtcccttgatcctgtgccttggagtccatttccttgggtctccccagagacccattccatcagtgtgaattcacttctctctctttttcctctggcatctctttttctcctggcccttttctctccacggagaaactccccacagacctgcaggttttgctctctggaaggagcctctgtcatcgtctccctggactgtgctctgcctcctgcctgccctgggctttcctcctgctgccctcactgcccatggctgcctggtccctctccctgatgccctggcactggtcttctcatccctcacgccctccatattgccagagccaaccggcacttttctttttttttttttttttttttttttgagacagagtctcgttctgtcgcccaagctggagtgcagtggcgccatctgagctcactgcaagctccgcctcccaggttcacacgattctcctgcctcagcctcccaagtagctgggactacaggcccatgcccagctaattttttgtatttttagtagagatggggtttcaccatgttagccaggatggtcttgatctcctgacctcatgatccacccacctcagcctcccaaagtgctgggattacaggcgtgagccaccgcgcctggcccaactggcactttactatccctctgttacttgaattcttagcagcatggggctccgttctttctgggacattctctcctgggcctctttgctgccactcctggtttcccccttgactctgttctcactccctctgaggtcctcttttccacttgcccctgaagtaaagaggtgtcttcctcaggactctgtccttggccatatgtattttctattctgcaccctcttcctggccatcctcattcacactcatcacttcaattatcacatatatattgatgactcccaaatcaatacctctagcccaggcctctctcctgagctccagacatacatttctatctggctgcctcctggacttctctaccctaccccttatggcatctcagactcagcttgttcaaaccaaactcattctccccacaagccgcctctttctcttatattccctactttggggaatggcatcattatctgcttagttacgtaaatcggaaatctcagtatagccctagattcctccttacataccctatccccgtatccagcaaggctctgtctccttaacacctgctgcgtgttctcctcttctctttcccttgggccaggctctagcctcccttcctgtggattactgcctaagtggggtgggtctccatccatctacccatttgccagtgagacctctaccaatgcagacctgatcatgcccatccctaagagaacccttcaggggctcccgaagcacatggggctccacatgctttggcttcagccccctctctagttgcaccttcactacccaccccccagttccagtgagtgacttggagtttcctcagtgcattttgctgtcttgtgctcccaggcctttgcgtacactggttcctctgcctgaaatgccctctcccctactttgtccaacaaattctcacttgtatcataagttctcagcacaaccaacagctgtctgaggtgccttgcgtaggtgcgacctcctgtgggcactgcacaagttcacttgtcttgctccccagcaagacggtttgttcctctcgtagtcatctctatgtccccagagtccaacccagtgcctgacactgaggaagcccacgcaagtgcatgaataacagactgtctaggaggagggaggggaagggccaagggcctggagaaagccctgcatggtgaggggaggcccaggcgggctgcctgacagaggcctctctccacaggcagtggaggagctgctggagtgcttggatctggagaagagcagctgctgcatgggcctgagccgggtgagttgtcccacaggagggcagtcgggcctcactccaggggcccctgtcaggtggctggcccactcctcctgttctctttgctcagccagacatcaccagtctcctggtgccctctgagtcttgcccccagctccaccccgcccagccactcaggggctgcccccttcagggccaggggccagggagctagaggtttcagatgcagcaacctggctttccttcattctggataactggcttgttcagtggaacacctctgtgatgtcaggagagagtgggtggaaggtggccctgaacttgacccgagtcctggtgtggggagtgggggagacaggagggctggacccagaggatgtgggctggaagaggcaggaggccttgggtagagcccctgtggagagttatctggggctgctgggttccagagagcaagtaggacatggtgaggctgtgccaccaccacctgcccacaggccaaattcctcatctgaatggaacgccatgcgtaaaatgcaggcacgctggcccctgggtgccagtctgccacgtcactcctcaccaaagggtcagctgagcattcctcccacaggcaggaagccctgcatgcccctctcttccgagcctgggaagcttggacaggtggcacccgcatgtgtgccccagggccagggtggaagggaggccagtggagagccagagagggttctggaccagttgtctgccagcagagagggaaggaactctcggttgcagggccccgtggggcgtgtgcggtggaaggaggtgcttgcagaggcttgagtctcacttgtcctgtgtgcttggtcctctcggccctgcatgttgagtcactttcctggctcctcctgcccttcgtctctgtcaatcgctcccatctctgtgtctttgcgtcttcccatctttgcttctgctgtctctggctttccctttggccccagcagtccctgctggtctctattccttggtttctagttctgtttttctgtttctctccttgttctctgtgtctttgtgtcccatccactttctgtgtcattttctggtttgtgtcactgctttgtctacctctgtgtctggttcagctcttttctctctctctgttcccctcctcctgcttttttaagctggggctgccagctgggcccctgcctagggctatctgctgtcaggatttgcttcagctgcagggtctctccctgggtccactcaccctggtctttcccgccaggattcctgcctctcaagcaggctgagctgctgctggctgccactggggatggcacctcctccagcccatgcctgggttcccaggcctatcttgggaagggcaggaaagggcctctacaagctgatcctcttcccagctgccatctcagaccttctgtcatcctgagccatgccaggtgcccggctgaggcaggcaagccccagggcccactgtcactcaagggcagagctgggtcaacattgggtgcctgctcacatctagtttgggaaagaaagttcaggtcgtctaggctctggttaacactgactcatgggcgaggattccctgtgtgtcacattgcttcagaggaggggggtcttcatctgagccatgggaccctgagagtttcaataaggactctgggggggctcagagcctcctgacattgtaaaatttgtatgaatgtgttttctggggaggagatggccctgagctttcacccaatacccaaaaggacccttaaccccccaaatgttcaagagagatttgaggctcactgctttggcctctagaccattctttctcttctcattgtgtctctgagccattatccaccccccactccagcacctcacttctgccctggtcaggtggctatgtgtcctaaccaagcgtgtttgctgtcctccggcgggacttggatattccttacccccagcaggatttcaggcttgcacattatatgaaattaagcagctgggggccaggcgtggtggctcacgcctgcaatcctaccactttgggaggctgaggtgggcagattgcctgagcccaggagtttgagaccaccctgggcaacatggtgaaaccccatctctactgaaatacaaaaaaagtatctgggcatggtgacgggcacctgtagtcccagctactcgggaggctgaggcatgagaatcgcttgagctcaggaggtggaggttgcagtaagcagagattgcaccattgcattccagcctgggtgacagagcaagactctgtctccaaaaaaagaaagaaagaaattgagcagccaggcacagcagctcatgtctgtaatctcagtactttgggaggctgaggcaggaggattgcttgatgccaggagttcaagaccagcctgggcaacatagggagaccccatctctacaaaaaatacaaaaattagctgggaatggtggtgcacacctgtagtcccagctactggggaggctgaggtgggacgatagcttaagcctgggaggtagaggttgcagtgatcgatgatcacaccactttactccagcctgggtgacagagcaagactgttcaaaataaatttaaagaaaagaaattgaggctcaggtagaacttaagacccatgggaaaccccatgttcgatggtgggatttagggaagtgtcacaaaggactgagctggctttttccaaggccagcctcaggggaccaggtttctgtggagttgccagaggcagagctttctcagcagaaagtttaggccctctctttgcatctttgctgaagggggccttgggatactgtgtctgttggctgagtgcatttatgtaacctgtgtttcccatgatgttcacatcttctctttgccctacaaaaaggaattttctgtgttctgtgccagttggaggtaggcctatacctaggtgtctctgcccactctcatggatagagctatttttttcacccgacccttcccgtttcacacacacttccctttgtggcgtgtggcaaattttaccgagccctatctcagggcggcacagagtgttaaggaaaggccgggcgtgggggcacccagctggttctgcacatgcctgccctccagcccccaaacctgtatgacaggtccctcagctgggccaacccccgcccacctcactggcttcttcatgagaaggtgaaacttgggtgtgtgttggggggtggcacatgaaagaggagaccatctgaaatgaaactagcagggagggggaggagaaggcaggagcttcccaccaccccccttcccattctccccgcttttcctctgcacgctgcgctccccagcgctgcttctcacacagacatcctccagcatccactcacccgatcccagcaattgggagtcagaggggcctggagcccaggttgggccctgcagtgggctgtgggcacagggggcattgacagggttgctggcagtcctgggtgaggaagccctcacagatgtggcaggacgccccctccctgtttgaccaatgactgctccatttccttccttgccccaggtatcttccctttaccttccctctcctttcatctctctttgaagttaaatttcacaccttacccctcccctgccaaaacctccccagccccttctccctcaaccttcccagggcctcttcctgctcctcccctcctctcttggacaattggattttgaggctcttcccaagccaagggctgtactccctggcctgcttgtttctccagttcctcaccttctctgcctttcctctgctgggctggcccagtatcctgccttcacctggcctgctttttcacaggtgttcttccgggcgggcaccttggcacggctggaggagcagcgggatgaacaaaccagcaggaacctaaccctgttccaagcagcctgcaggggctacctggcccgccagcacttcaagaagagaaaggtgctgctctagagacatccctccccctccccaacctagatgggcacagccaagttcctggggtgggggctataagggggagaagaggcaggaacctcccagggcaccatgtcctgggccagggtggggaacaggcagctccctggtgccagcaagtgtgctggtgtgcccagcgacggggcctggttggagggctttgatgaggggtaggggaatcagggcccaggcaaaggtgggctccggatcataggctgctccatgaagattaaggagctgtgtcagtgactccttttcttattagcaagtccataaaacagccagcactgccgcctcttgtgtttcagcaagattaggttttatagcacagctaggccagggtgctggaaataatcaggcagcaaataaagcagatgaaattattcctaatggcagtggagtggctagtgcccagcgcagtgctcccagggctgggttctgtgctgcccaccctttgagggacggagtgagcctggggcaagggggagcatgagaagtatctgactcggggtcagggggccagaggagcagccctgggggcctgtgctggtggtggggaggatcctgggccgagcttggccagggtgactgagagccccgctgtgcaccacccccaccccacctgcagatccaggacctggccattcgctgtgtacagaagaacatcaagaagaacaaaggggtgaaggactggccctggtggaagctttttaccacagtgaggcccctcatcgaagtacagctgtcagaggagcagatccggaacaaagacgtatgtgacagcctgagagggccaagtctctgggtagggggaagccttgctggtttatcttgggcttccaggcgcttcttcgtttagtccagagagctgtcatccttgaaatgtgctcatcaaatagaagatgtccctctggggtgctggctgagcccctggacagcctcttacgataaaatcttgggcatccctagcttattgggaagcgtctagggacaggatccccaggaggcagtggctctgctattggggacatgccttccccatggcgtcctggcccaagcttcatcagcttcgttcactacaggggtgcagacccagggccccaatccctcgcagtgcctttggctcactttgccctctttggtccaccctaggaggagatccagcagctgcggagcaagctcgagaaggcggagaaggagaggaacgagctgcggctcaacagtgaccggctggagagccgggtgagtgactcctggcaccacaccgactgggcatggctgcagggagacccagcccctgcaggtcccccaggtgttctggctgagtgaggcaggcacttcaactggtggtgactccctacccccaaccccagatctcagagctgacatcggagctgacagatgagcgtaacacaggagagtccgcctcccagctgctggacgcggagacagcagagaggctccgggctgagaaggagatgaaggaactgcaggtgagggcagggcctgggtgagaacagcaggctggtgactgccataccctagtgcccattggctccccccaaagacagttggcatcttcacccctagcccagcatccctgtctgcccttggtaagcatgtgatcatggtctgtgtggttcggggagtgggtatgaggggatggaatggcacaccctgaaaccctgtcttctgcagacccagtacgatgcactgaagaagcagatggaggttatggaaatggaggtgatggaggcccgtctcatccgggcagcggagatcaacggggaagtggatgatgatgatgcaggtgggcctgaggcccaaggagctcggcagtggcccgcaatgcgagccctgatgcccacccctgggtagtcatgccccttgtccaggcctgtctcccctccatggggctaaactgaaagaaacagatgagaaggcagaggtgccaataaatgcaggggattgttaggtagagctgaaacaaccatgatcatgacaaagactgagggccgtggtcccagcagtcctttggggggcacagcacatgtagccacatctcatgctctggtcttctcctggctagtggctccttctgccttgggaggaagccatcattgcagagagctttctgagccctggctgactccacctgctgctccccctgccccatc[450 bp omitted]ttctccacctatgcttctgggtctctctgtatatgcaccccatcttggcccctagctcggggacctgcaggcagatagtgaggagagtcagcgggctctgcagcagctcaagaagaagtgccagcgactgacggctgagctgcaagacaccaagctgcacctggagggccagcaggtccgcaaccacgaactggagaagaagcagaggaggtgggtgggccccctgccctgggcccagagaaccttctggagcagccacagacaggactgcctcctcgccctccagggaggaaagaaggaaggacctgaatttgtccaggggccttgcttgcctggtcactcatcttggaacgtgaaggggccccctcctgacctccagggtggactcaggctgtgtccccactgaaggcctgcccaggcctctgctttcagaggtgctccctgcatcatgtgcctgtcatcccgtgccaggccccatcaggaagtgcatcaaccagggcctgtgcaggaacctctatgtccctgccctcagcccccagctctgcctctccctcacttgcctcagctacacaaacacactctcctgactaatgtcgttaaactaccgtgccacttccatctcattatggtaatgatacaaaggaggggggtggccctcacaggagaaaatccagtctaaattaatttccggggctgggaatgaggatgggacgtcttcattagcagtactgaggaacccacacaccctaggaacagcagggcgccctggggagcgggaacagtgcccatttctcctctgcaggggaagggcttctcagcagaggcactggttgcctttgtgaaggggtatccccacacccacaacactgggagtgaggatggcagaacagaacctttccagtgaccctgggttacccccggcctcctggaccaaccaccatctccccagctggggaaaataggaaggttttctattcctcccacctgacaccatgaccaccacttccctcattctcatctctgcccccaccctacccctttacccaaaggctggcacccttagctcgaccccccttctgagcacccgatgacattgccagctcggcctagttactgtgctgccctgctccccgctgggcaacttattaggtttcagctgcccggagttttcttactttttttgatgtggagttggggtaaggggagcattcaacttccacaggaacctgattagctattcagggaaggtgttaagaggaatttgagcaatttgctccatatttagtgggaaatggaaggctggcaagtggaggagtgaagaacgaggccccctgtgtgcccattgaggcatgtggccagctgggcacagtgggaatgccagctctgaacccagtatggggtgtccgggtggtgtcctgccggcactgctggggtgcgtggtcctggccaaaggctggtgcccagaggcaggggcaaggagctagctattgcccttacagttgtcgaaccaaactgtggaaagtgagttagtggaagcagggtgctcatctctatccttttcccaccccaccctcacctgggtccctcattctttgatgtgttgaaatggaaaatgtagagacttaactcctgagggggcctgttaagcagtctgtgggtccctcttaggcctacttggtgaaagggctcacctgagtgctccctatcccaacccagttgctcaatagggcctcagtggcctgacctgccacctctaaatgtcaccgctaccttacaactggccccacgttagggctgcatgggtccccccacccctgcttgagtcctgtccatggcaccacctcctgacagtgtctgtgtgggggaccctggctcttccccatctgatggagccgccacactccctcgcaggtttgacagtgagctctcgcaggcgcatgaggaggcccagcgggagaagctgcagcgggagaagctgcagcgggagaaggacatgctcctcgctgaggctttcagcctgaagcagcaactagaggtgggtagggccacccaccatctgtgccctgtccccctcacaacctggggtcagccctgcaccagcctcatctcttttgctccaggaaaaagacatggacattgcagggttcacccagaaggttgtgtctctagaggcagagctccaggacatttcttcccaagagtccaaggatgaggcttctctggccaaggtcaagaaacagctccgggacctggaggccaaagtcaaggatcaggaagaagagctggatgagcaggcagggaccatccagatgctggaacaggtacaggagggcttggccaagggagaggtgaggtgcagcgaggccgccaccatccccacagccagcctcaggcatgggccagaggatcctgcctccattcattcgcgtattcactcactcacctactcacaaaatgtggagtgagcacctgatctgtgccagccacagtgtgaagacgcgctcgtggaactttccacaaaaacaaatctgatggagctctagtagggaggggctcaggatgcatggcagctgagggccacaggcccacccagcctgctacccagccaccaagtcagttcagggagctagagcctgcaggcagacggagaagctgcaggactgtccccaccccagctgcctctctgtgggcctatgccagacctctagtaagggagttcagctgctctggagaagctgctgccacgggagcaaggtgccagcaaagggaactggctggtggacgttctcggcccctgagcctagggagagccatgcacaggtgggaagggggtggccacagctggggagggaacccagaccctactccaaccacctccaggccaagctgcgtctggagatggagatggagcggatgagacagacccattctaaggagatggagagtcgggatgaggaggtggaggaggcccggcagtcgtgtcagaagaaggtaaggtatctgagtacttacctgtccagcgtaaacacctgttcccatcaccgctttaaagtaaggggctttccacctccctacctcagccacatcgtcttccattgtcattctgggccaggaagcgcctctcgggatcctagcattggcaggatgtattggctcagagtctgtagagaagcttgggcccctgaggaactatcgctccctgctttctgtgccaggggcagccccctgtgcccctgctgtgctgcgctgcactggtgctgcctgcagtcagccagcctggccgggcaggtctccaccatgcggcaaggtctctcctactctgtcttggctagccaccgcatgtggcctgccatccctcctcaccctcccaggctgctttgaaaccctagaaacctggaatttaggttctgacccctccaccaacatcattgtgctcaggcctgccccactgttttcctggagtggggaacccagaatggaaggggcctgcttcgcaccaggcactaaagggacggacgggtctctgtccccatggtactccagttaaaacagatggaggtgcagctagaggaagagtatgaggacaagcagaaggttctgcgagagaagcgggagctggagggcaagctcgccaccctcagcgaccaggtcaggggatgctccacccaccaagcctggccggctccctgcccatgcggcctgaggagtggggatcctagggatggggagccacgaacagagctgtcgggggtgggggtgctgcaaagagcccatcgtcatcccttgtgggatgggggcatcaccatacattggcacacccagccctttatcgctggttggcatgaccctggctcttccagcatccttatggggacactgataatgaggacgtggtgaggagggagcttggggaagataggaggaagccctgtgcagagcccagaaccccaactgctggtgcccacccaggtgaaccggcgggactttgagtcagagaagcggctgcggaaggacctgaagcgcaccaaggccctgctggcagatgcccagctcatgctggaccacctgaagaacagtgctcccagcaagcgagagattgcccagctcaagaaccaggtatccacagagagcacacggctgatccaggcacaacagagcttacctttccattctctttctctctctcgctcctctcagtggttcttgagtccttgggaaggaaagtgacaggaaagaggggagagccacgtgtagcagctagactccccaggctctgcgtgtgccttactgtctcaccgcccagcctgggatggtgtggatggggcctggtgcccaccagccatgtcacgggaggagatccccacgcgtgcaccaccacacagccatggccctggggtctgaagtgaatggaggaggagaaggagggcatccgagctccctctttcctgtacagccctcctgcccccaaggaatggctgacatctctccctggggcgggggtggtctgtgtccagctggaggagtcagagttcacctgtgcggcagccgtgaaagcacggaaagcaatggaggtggagatcgaagacctgcacctgcagattgatgacatcgccaaagccaagacagcggtgaggggccaaggtgcccggggcagagctcggggggctgaggcagaatagagctgcctctgtggctcccttcaccctagacaggtccctccacgtcaggacttgtgacaggtcctttcacgccaggacttgctgcaggaagagcgggcctcccctcctctgcgtctctccacactgagcagaggcctcggggaggagcgggcagaagagggagccagcaagggcccatctccctgtttaaccacctgcctacgggagcttggccgcaggccccaacaccataaataaaggcagctaatgtggctgagggatgtaaacaggtgcctagagattagcagaagcacagataagaggacaggatggcttggcttccttccccttccccctgcccagcccactgacaagcccaagcggcagctaattagagctcttatttaatgcctcccttttaatttcccacctctcccacggcccatccatcggcagagaattcattactgggatgcggccagtacaggcagctccttgagcatcactggtcctgggacccaccccagtgggcaggccccttgggcagggaatggggcaggggaggaggctgggctgggctggtggcttcatggcccctgagctagtcacctagctgctgagagatgccaatctcacgggcttgatttatccccatgacatttgtgctcctcagcagttctcaggtgagtaattcaaattccttaattgtgttaaaaaaggttgttataaaattaccattttatttaaatctgagttaataaatttcttggcggaggcttccccagctccccacagcccagtaacaagatggatggggcagagaaggagccaacacagtcattttggtttggaattacaggctaatagattcattcatttcctgaagctgctgttggatctctcttcccctcccccaaggaggggactggctgtcggggctggatgcccagggagtgggcagtcccagggaaaatgagagtctaagccaggagaccttcgcagacttgaggggtccttccctggggcctgaagggggcagagtgcacgcaggccagggcctggactgatagtgccaggatgatgggtcatttgttctgggcagaccttttctgccttctcattagcctcaaaggagctgccaggaagcagctgtcattcagctcagaggcccagggtctgcctgtactgcacacagccctttccctcatctccctggtccagagcaggacaggcagctccttgagcatcactagtcctgggacccaccccagcaggcaggctcagcccattatcatcttctctacaatgcccctgccattggaggcagctggagcccacaggcacactgggcctgaggccctctgatctgtctttgcctctctccagctggaggagcagctgagccgccttcagcgtgagaagaatgagatccagaaccggctggaggaagatcaggaagacatgaacgaattgatgaagaagcacaaggctgccgtggctcaggtacccctgccaggagtgcccgtcacactctgcaccgtcaccatccttgtggtcctcctcatgggtcccccgcacaaccgcttgttttgggaggtgatggagtgggaacctcggtcccctggtgttccagctgggctgggctggttgaatgcttatgggggatcctgcttctgatgctctcattcctttcccaggcttcccgggacctggctcagataaatgatctccaagctcagctagaagaagccaacaaagagaagcaggagctgcaggagaaggtgaggaccaggggctccctcaggagagagagagtgccagggtcactaggtgtgggaggaacccccaagttcacagtttagaaggcgcttttctctgccatcagtaatccacagagcagcgtaaatgaggagcaagagctaggcttggagccatgtcaccataacagacatttgggcttcccctgcctcatttcccatctgtattccctctccgatccttagctttctcctttctctctgaagggcaatctctgtgccaagcactggggcagatgggggaggcctctggcccagggctccattctctttcctcccaggtgcatccctccctccccttgccttctggtcactgtggtgatattgcctgccccagacgcagtctcctccctttctgggctcagttctttcttctcttcctgtcccccacctctagctacaagccctccagagccaggtggagttcctggagcagtccatggtggacaagtccctggtgagcaggcaggaagctaagatacgggagctggagacacgcctggagtttgaaaggacgcaagtgaaacggctggaggtgggttcacacttctcccgggccacaccaaacagggcagagctgccccagcgctggagccgcgcatgctcagcagggctggacaggcccccggacagtcctcagaggcctgtgcctcactgccaggccagctgacgggcaggtgcttctctcccgccctgcctggcctgctctctggctaccgtggagcccgcctgctttacattctgtttccgtgcttgctttctgccaagggaccagagcagcttagctcttcgtcttcatattttcctccaccacgagctccccccgcctgttcccctcaaccggttctctggcagggtcataaatatgcagcggatggtgccacttctgcgcaggctggaatctgttctctcatctgccctcgctctgctcctctccccttccctgcttcattccctttcttcctcacttcttctgccctcctgtctctgcttttttttttctctctccctttttcttgattatgatcctattctttcttctcccttcatttttttttttttttttttttttttttgagacagagtctcactctgtcgccaggcttgagtgcagtggtacgatctcggctcactgcaacctccacctcccgggttcaagcgattcccctgcctcagcctcccgagtagatgggactacaggcacgtgctttttttaaattgtattttagtagagagggggtttcaccatgttggccaggatggtcttgatctcctgacctcatgatctgcccgcctcggcctcccaaagtgctgggattacaggcatgaaatattttatattttttcctctctccaatcttatttctctttcttaccctcttcccatcccattctcctctccctttattataaggttcattctctcttcttcccctttttttttttttttgagatagggtctcgctctgttgcccaggctgtagtgcagtgacgcaatcatggctcactgtagccttgacctcctgggctcaagcaatcctcccatcctcctgcctcagcctcctgtgtagctgggaccacaggcatgtgccaccatgcctggctaatttttgtattttttgcagagacagggttttgccttgttgctcagactggtcttgaacttctgggctcaagcaatccgcctgcctcagcttcccaaagtgttgggattacaggcatgagccaccatgctggaccaatcctttttctttcggtctcccaaagccagtattggccagccccttccatctctggcagagcagatagcaagagagaggcagaaaggattatctcctgggtttacatccctctcaccttatttttaagttctccttgagtttataagcctttgtctccacaccgtcggttctccctgggccctgtgttgatgagtgtggttggtgaggggcagccctgtcacctcctccatcagctcacagtccatggagcaggcatttaggtagggatagaaacaggtgggcatctagatggcattaataacctggacacaggaagagagcacaactgacccttccaaggcggggtcacagttctcaggagagctggagagagttaggggaaacttaagaacttattttcggccgggcgcggtggctcatgcctgtaatcccagcacttttggaggccaaggtgggcggatcacgaggtcaggagatcgagaccatcctggctaacacggtgaaaccctgtctctactaaaaatacaaaacattagccgggcgtggtggcgggcgcctgtagtcccagctactccggaggctgaggcaggagaatggcgtgaaccccggggggcggagcctgcagtgagcggagatcgcgccactgcactccagcctgggcgacagcgacactccgtctcaaaaaaaaaaaaaaaaaaaaagaatttattttctgcccaccccaaccccaggctggctgataatattttgatccccattttacatacaggaagggttaagtgggttgcctaaggtcacaaagctatcaagggacagaagaggccattggtctggtggacacaggacaggcccacaggacttgtctccttttctcttgggcctagtcccttcccgcacctctacccctcaggttcccttccgctcagagagttttgtggtttagactcataggatgttaaacacaaacggcccaatcctgcagcctggctcttttattttagggatatagaggctgggggaccagtccgaggtagaaccaggattacaagcagatgcggggttcttccctcacattcagcccctctctccaggtcattttttgctcagcatcccactgcctggcaggagattcattaggcttagagagatgctctctgcttggaatctgatgattgtttagtctctcctaattcagaactccagcaaagccatttacctctgagcacaggatctagcttttggggcttctgggttcagagtccctgcgggaagccctgctgacctgagaggactctacatgcagtgtcaataccgacaggcccaccaggctgtacccagaacactccctcagtcttggtgtagtaataatgataatagcacctttcatctttcagagtgcattcacattcattaccttattcatcctcagaagacccctgggggttaggtgttattctccccacattttacagaaaagcaagggaagcttcggggttgcttgcccaggtagccaatgaacggtggagccagagctcgaccccaggcctcctcacccagagctctgccacaccctccctctgcctggctgatgggcctgcctgctgtgtctttcttccccacctacctatccagagcctggctagccgtctcaaggaaaacatggagaagctgactgaggagcgggatcagcgcattgcagccgagaaccgggagaaggaacagaacaagcggctacagaggcagctccgggacaccaaggaggagatgggcgagcttgccaggaaggaggccgaggcgagccgcaagaagcacgaactggtaatgccccctgtcccccacggggcccacatggcagccccttgactagctgctgagtgtatgcctcactctggcctggttgaggatagggtgcaaagaaactgcacatgagtcagagaatgggagggaggaggagcatatcaagagggcaggccaggaagctagcggcactggagactccctcagatgaggcttggaccccacagcccagcagcaacagagcggaaaaggctctggcagcctgtgtcagccctcaggtagcacccccatgaccggaaagtacttgaagcaggcttcttctggccatctaggggagaagctagccctcctgcaaactgggctgcccccttcctcctaggagatggatctagaaagcctggaggctgctaaccagagcctgcaggctgacctaaagttggcattcaagcgcatcggggacctgcaggctgccattgaggatgagatggagagtgatgagaatgaggacctcatcaacaggtgagaagtggcctctggggcatctgcagctagcacggaggccctcttgaccacctctggaaccagacgaccaggtagaacagttgcaacctctgcctccccatgagcaagccgccaacccaccctccctttactgccagatcccagcacagcctgtcctgcaggggcagacggtgagacaggtgcaccctgatggaggccacccagccagtctcccctctccacgaccaggccctccagctctgcccgctcaagatgagttattctcccgtttagctgcatttccgatggcacctgccccactctggggagagcagagatttaaaggctgtggtgccttgttactatgccagagattttctcataaaacccacccggggaatggtttggagagaaagagatttgtagtcttaggctgaggagacagtcacgaggaaggaaggccagcagtgcggggtagcaccaggccatggagaagctcccagggctgccctaggtggaccctagatctgcccccttcccaccttagggctggggcccatcctgcaggcaggtctggggcagcgcagggaccctgctgctttggggcaggggagaggtgccaggggcagcccgcatcagattttgaggacagtgccatcacgcatcccactacctggtctcaaccagccagagctggctcttgctgagggaagagaggtcttcagctaaggggtccaccttgggttgccgattgatttcatctgtttcctctggaccccttgcccaccattttccttctatttccagtttgcaggacatggtgacaaagtatcagaaaagaaagaataaactgtgaggactggagcgcatgtgctctctgcctgtcctcgcgggtgtctaaccacccctaacactggctcccaccctggggccgctgcacgcagcatgtggatacagcctccccacactcccgcctcactggtctctaacgctaacatgctgactctatcctcgggggaggcagggagcgggcaatgaggtgtgctccccagaaggctggggctggcccgtgcacccttggtgggcaggatgggggggctcctgccgaaaggaaagcgcagcctatttgagaagtttaccttcctgagctccagcacattcctccctcaaaaaccaagtgtggccacctccctggcctatttctctggggggaaaagtctgtttgggctggatctgtccacatccttgggctccttgggagcctgagctgcctgaaagaagcgggcgtgtttcatctttaaaggtccactaccttctcttggcagacaagggtagaaggtgaggggcatctcccagtttcttgtttggagaaagcattcaggcagctaatcatgggctgcttgccgtggcgggggaagggaacacagccagatgtgtttactttactccctgcggtaccgtgggcagagggaggccccagcgggcgcttgtgctggtactgtcaggtggcaggaagcccaggaaatccagccctctcttttcccgctttctgggtgggagctggacagcggatgcagatgcgcaggccttcaggcagagcgggctgatcctccatcaagttcgacagggttgttttttagaggtcttttttttttagcatggcattgggtttcttcccccactctctctcgcctgatggaccccctcccctggccaggatgggctggtggcagcgcacaggactcagtgagagctaatgataaatgtaatagtgtgtaacagtgatagagggccgctggagcctggttgtcacacacaattaatatcccccgccgttctgtctccgtttgtttgttcccccgtgattcggctccccgttaactaatagcacatgagcccggacataaattgtatttgacgtgaggtttaattccaaccatttaaaatttcaactgccctctgagcctgcctgcccctggagtttgtttacgggcctgattatttaaggaaaagaacatcttctagatgcttgcaactaaagggaaggcgagggcaggcaggccagctttgcaacccatccactgttctgtatgtaaggaggaaaattcatattctgggcccacaactgtctgtcccctgtgtgtttcaaccctgccatccttgtgtggcaagagcttcaagggctgataaaatgcgcatttaagatcatattctaaaccactgccaggcatgcacacacacaggtacaccacgcatgcacacacactcacacacactggtgtgtgctcacatagacgcatggggacgtgcagctctaaccaggttccgggtgatggcagagaggtggtgtggctccttcctcagcagctctgggccccagctccaagttattgagcccagcgcagtaaggcaggcagagaaataatgtttcgatttacttagagatacagttgttattgccataaccttaatgaaagcagtaaacagcacggtattaagggagatttatatggaaacgcttttaacatgtagacatagattttgcgatgcatacagcacctcctttctaaaggcaatcaatatggttatgaacggtggtgataaattacaggctctgaagctagagagggaggttttttgcacaggtgtataaatcaggtggtattggtgttccatggggcccatgcaccacagtaaatctgccaggctcggacgggcacagggcttgcattagcagtttcgaggttgtctgctaaactcctgtttacccggggcatcagccagcctcgtctttgttataattctgtatttgatggaagcccataaaacatgcctctttattcccctctctatgagttgggctctcgcatggtccccagaacaatctgctggtttcgtgtgtgtgtgtgtgtgtgtgtgtgtgcgcgcgcgcgcacacatgcctgtgtggctgtttatttaagaacataattcaggaatggagccattcctcttgacacagaggaaaggaaatttatatcgaggagaaaccctagcctatccatagcagggcaacttggtgagcagacattctgcagaattttagaagcaatcttactcagaagctatctccaagcccagctgcttcatgagggggtggccatgactccagcctcagaattggactcctttgggctttctttcaagtgctaaggtcagctctgcccgatgaagcactgtgagcaagggctgggggctacctgaggacggaagaggagaccttgagcgacagggctctggtgtgggactttctgagcccagctgggtctccagggacaatttagatactgaaactgttgctagtccctctggaaatgctgatgccccccgccccccgccccttttcctttctctgtttcttaagagccagagaagccacagggtggatctgggatgtggcctgggcctccttaacctagagcccaggttggtgttgccatccactaaggagaccttcaggttcaagctaactccaaatcctacgaagcccttctcttctgctctgtggctggcagcccagctcttgtaacaaaggcatggaaattgacagcagctatagccacaatctgaggaatggcagacaagaaacagcagagtaggcctcaaggagtcactgaagaacccagggctcctctttttagctcagagccatttagctgaaattgatgagtggatggtctttaagtcattctcccttgattggtcagtggcctgtcacagataactggcttgggagctgcctccatgctcctgagggtcttcttggtggttgtcacacagtgtggctgctgagtggggacaggctccttgtgaatggtgtgctctgtctaacctctctcattcccgccctcccgactcaccgacgtgcatgctgcccacatcccccctgcccaagacaccccctgcacccccatctgctcccctcgtgggcagcaggtgcctatgccttgtctacctttctgctcctcatccctacagtgagggagactctgatgtggactcggagctggaggaccgtgttgacggggtcaagtcctggttgtcaaaaaacaagggaccttccaaggcagcttctgatgatggcagcttaaagagttccaggtgagcatatggccttgagctgggaggaaaagccaccttgtgccacaaggaatggacaagtagcgcctggatcccatgagggcaggcctgtgtctcttgtctggcatttgtgactgcggcccgggcatgcttctggcatgtgcatgggcacaggaagtttcttcttagccagggctgcgtcgcccttattttttccagggaatgttttcccattaggctccaggctttggtttgatgtaagttaaatgtcacctccacttattcattcaacaaatgttgatcaagcttcctgatagttcagacccttggaatcaaaactgggatggggcacaggggactcttaatcccacagccctggccagctctggatctctgacgtcttaccgtgaatagcagcagaagaggcaccagttccactgattcttgacccagttacaggcacatttctgtctttttctgcccattctctccttcctctaatctcttcactgcccccacttctttcctcctaatacccatccactgggggaatgtactcccctgttttctagccagtcatagtcctctgatcatacagacagctacccctggaatccagagcttccccttgcccatctctttcctactggccagtgtggcagcagggagaaagaagagccctcgctcccccctcaccccccacaaagccatatccctgctgcccccacaacatagaatcccaaccccctgatcaagcccatcctgatcctccaggacacacccttcctcatcctctcccagagacagcaggtagactgggtagaaaaagtaacatctctccctcccttctccagctcccccaaggccccttccccaagcctggcccctcaccagaagcacccagcagccccctctaattggtttaatttattcggccaaacaacattttgttattgcagataatgccggcttccccgccccactgccgtggttcaccacggcatggcacgaggctccaggtagttgacaatgaaataaattgaactaaacgtttagagggggaaaagtgatgaaatagaacaatagtctaatttacatgacattctccatgaagctattttcactgacgcaaattattttgcttcatttcctccgatgctctcaccaccactttgccagggctgctgccgttttctcctcctttcgcctccctccccctgtgtctttattctctgagtttaatacttgttcctctctctctctcaacctccctctctccctgctgccctcatccacgtctggttctcgcatcctccctcggaacggccctcaacagcctctctaaggaggccccgggggtggaggagaggccgtcctcggtggtgagctccctgagctatcggaagcggctcaccctaaaggactccatcgggggcaccggggacgcggattcgctcttcacctccctgagcgagcgggcggcctcccctgagaggccccctaggaaggcccatgtgggccccagggaggagccatgcccaggcaggaagtccgaggagccggaggagtgcggctccgtccgctcggggaccggggggcgcgctggccgggggccgcagaagcggtggggctccgacttcagcccggcctccaccgtctctgcaccggtcagccgggcctcctcggccacgcggcggggctctggcgaagacagggctggctcttccctgagtttctcgctgtcgggctcgcccggttcccgccgcagcacctcccggctcgacagcctctccaggacactcagcccttccctgagccgggcctctggcctaggccgggagagccctgattctcgcctgtccctgggccggagctgcctagaggagtgggatgatggagccagtatggccctgagcgaggcctgctcgcagtacagccacccgtcgctggcccgcagtctgtcggtgccaccccggccacgcagctctgcctcggcagtggatgagcctcccagctccagcgtccgctccgtcagccgtcactcctacctggacccagacctggaggctgccgtcaacgaggtcttgagctacaagcctgttccattccagcggagcagcctggagcccgactccgaggaggatgacaggaagagcatccaaagtgcccggagcgcccaactggaccccccggagcgagctgccagcatccgccgctccgcctctgctgctgatgtgtcccggtcccgcagcggccggaagagccggagccggcgaaggagcggaaggagcagctccagctccagctccagctccggctccgaagcttcctcagagcacaagaggcggaagaaggggcgctctcggaagagcaagaagtccaagtcgagaagaaagagaacggagacggagtctgagtcctcctcgtcgtcatccagcggctcgaccgtctccagccacagctgctccagtgtgaagaagggcccagctgcagaaagtgaagaaactgggcagacgcaccggccgtcgaggaaggaggaaaagaagcgcaagaaagaggtggacagcctgatgatgcggtacctgtaccggcccgagagcgactagtgcagtaggtggcacctggcctgggttcagcatggtgtgtcccacccggtgtgaactaacgtcctccctgcccctcaggccgccaccttagggcccacccgcactcctctcgggcatgcctggcctcggagagcctcctggctgccttgatgagcaggggccacccaagctggtcagtcatcctgagccctgagccctgtcagctgaactcgctggtgatgtcatagctcccacttacaagtcctgaccctgaaccagggactgtccttcataccttccacactttagtcacttatccctcacagtaactccgtaacaaagtctgattagctctgtttcatagaagatgaagctgaggcttggagaggttaagtcacttgccatgtggtcacgcacagctgggaagggttgttgccagggtctgaatggggtctgcccaactccagcactcttgcccttacccactcctccaggcagccagtgcagagcacatgggcaacatgtttactgtgtgtgcccagcagcacccattcaggagctttcattcatggccccaacaggctggggccaggaaaggtcccaagctataccccagctgtggttggtgcacatcagtggccctaagctattattgggccttttgcttagctctccctcccctaccctgcccccacaaagctaccttcctctctggcatagatctcaagcctaggagtacaaggctcccagggctacagcccacacagcgccacaccctacagcagacccaggagatgcctgactccctccccagccctcccaccaaaggcccacacatgggcgtcaccttggttctactcatcttgtaaagttctaatgaatagaaattagcaactgctgagtgacagcctccccctggctctcctgcctcccccagctcttctccctgtggggagggagatctagcagttaggccctttatgcccacacccccaccatggaagaagggcagagcctgactcattggaatcccattgttgccagtttctctggtgcgtggtgacattttagatcaccctgcttatgtgaagctgtttttggcatgctgccctcccagggcaagcttgctgcttcccaggaggtatgtcccccgagtgcagcccctggggcacagacatttgtctcccagatgcatgaactaacacacctgtcgcatgcttgtgctgtggagcggctggacacctaggctgactttgaatggattataccaaacggactgatgtaagaccttttaaggaatggagcaagtggaatggctcagccctgctctgtcacttcccccatgcagcagatggttactgggtgctctgggaggaacaggaagcatctctgttgtaccaaggaaccagtgttggctccatagtaagacaagagtcagccgagcatggttattcacacctgtaatcccagcactttgggaggctgaggcagacagatcacctgaggttaggagttgagaccagcctggccaagatggtgaaaccccgtctctactaaaaatacaaaaattagctgggcgtggtggcgcatgcctatagtcccagctacttgggaggcagaggcaggagaatcgcttgaacccgggaggctcggaggttgcaatgaaccgagatcgcaccactgcactccagcctgggctacagagcgagactccatctcaaaaaatatatatatatatgagtcaatatttgatcaggcatctcagccttcctcttagcagccctgctaagtgccccacacccctagggcaggaagtcagctgatggacctgggagaggggtttggaaagcaaagagggccaggccttgttgcacactgcgcctctacccccagatggacatgggcctaaagctgggccatcccacactgactggcaactggcagatttcagaccccaatgccctcagcccaccatcacccttgaccccacaaccagcaataacaaaaagaccaaaagcctgtttcttccaccagccaccagcgcagttcctcttttccaccaggaaagctggagtagtcctgacgccatatataccacccgctccaaggaggattggattcactgttggtagagtggccatcaagccagaacctagccaaccaacacggagccagagggagaaggccaggggagggaggacctcagtggtgctcagcatcaactggctttggggtgggggcatgggatggagcagtcacttagcttcccatctggtgatgaggaccagcaagaatttgcaacaggaacgcagcttccatagcaaagtcaaggggaggggagctgccgccctgggcttgcctggcaggaattagcttatgtaccaaattgtttgtgacagtgctgagcaggagacgctggcttgtgaggaggaaggcttttttaaacaatttggttaaaatgttcaaattgccagctctgactcttgccctggagaggagggcagcggcctgctgttgactccctgatggctggagcagtggaagccactaagaatggctaaagatcacccaagctacgggcaagggcaatctcgtgggtccgcagcccaaggcagagagagacatggagtttaccacctccccggcagctcctgccactgcccagcgtcttgatgaaacagtatggaaacacggctgtcatttatccaggtgtctgcctagcaggtacaggaatgtgggcttggggactggagcccccaccttaaaaagaggtgaggcaatggaaaggaccagaggggccctgattcagcaatttacagtgccttggagctcgccagcagcacctcatttgcatctggattccagccctggcatctgcctcgccccgctctgctcacaaagtaaccccactgtctttccacaaagccaggcactccttagcctaacggcagatcctagccctgagtgcccagaaattctatgtaaagaatgagaaccaaaccaggctcccactaatttagaattcaaacaaccccaaagctaaaataaccccaatttttttctatattgcatagtcatcagtgagctttataattttgtcctagaaacccccccagagtccctaagtgcctttggcctatcaaagtaagactcatttatgttcagtctagtttgtgttaaatgtgttttgtgctatcctgattcctttaaaaatggtaattcattcatgagaaatacgataactattaaccagactgccccattcctgaaccattttgcataattgaacatgtattctatcagcctcttcctttcccccagggatagagaccgacctttctttacataacccctgggcacttgcccaagccagcaggagaattcaggtttggtcctttttttttttttttttttttaatctcaggtcaaccaatcgagtggcggggtgaagtcgtccaaagtctttgaggtctaagagtcccagattcaagtttacatactggctgtgtggccttggggaagatcctttcatctctttggactggcttcctcgtaatatttcatagggttattgtgaagagtaagatagcctatctcacatgcctaggccgtgtcttacacataggagtactcagtgaccaaatcttgccctctgcatctctcactgccaccttgggaaaagctaagaaggtggttcttgccgcagaacgctgactcctcctattttggtttggggatagaactttaaaagggctagtaaacaaaggtcccttttcagcttaagtcagaattataggcagcagggaacatggaactcctgcttgcccaagttggaactctaggatctggaggcagggctgcagctccagggaccacgccgagtgtggggcatcagtaggagaggagccacactgggctgtgttttctccaatggtgttgaaacgagagtgcacttgaactgacggaggcagtggaggcaggaggagtacgggaaaggtggccccaaggctttgggagaaagaaaagagaaggtgaatggagctgtgagatgaggtcccctcttccctgttcagtgctgtgatcctgctccatcagggggaagaggcctcttcacatctgggatagctggaggcctccagagccagaggcctgatgaagactctgagttatgttattgtaccaagaaaggggcttttccccttgggccatcctaaaacaggtcttcccagcctctccttcctgagcctccatttcttgttagtagatgatggcatggtcaaagctgaaaattctcacaggcctcagggagccatcattaggggaaagggttcagatctgggagtatttgacagggaaagcgcctcctcctcagaaggaatctttttaggaatcactcgcctaagagagcccctaccctagacaagttgtactcaccagacctccagtctccaagccaatgtggttcacggactgcctgcttcagagccttctggggaaggactgaaaatgcagaattactgggttgtacccaaaagccagcgattcaaggtttctaagaggaagggcccaggaacctgcatcagattcttatgcacgcttgagtccgagactcactgctctcagcatccctttcctcggagctttaaaagcttccagagtctccttcctcttagcattttgagtatcttctaagtaagccaaggaaggtttttacttaacaatgtttggcttttggggagtgctctgacgcagctttgtgggcctccagaaccaaaggcgtgcgtgcttaatggtaggagtgtcatttgtccctaaccttattcctcggtccctgcagccccaccagctactggaagtcccttgcccctgatcggtcagatgatgagcacgaccctctcgacaacacctccagaccgcgatactcccacagttatctgagtgacagcgacacagaggccaagctgacggagactaacgcatagcccaggggagtggttggcagccctctcaccccagggcctgtggctgcctgggcacctctcccaggaagtggtggggcaccggtctcccccacccgactgctgatctgcatgggaaacaccctgaccttcttctgtcaggggcactttccaggctatgggtgtctgatgtctccacgtggaagaggtgggggaaagaggagtttctgaagagaactttttgctcctctgtctcaaaatgccagactcttggcttctaccctgtgtcaccgtgggcagcggcaggtggcctggcactgcatggagccagcacgttgacctccctctcagctccctgctcagggacggtggacaggttgcctactgggacactctaggttgctgggtccatggggaggattgggggaggagaagcagtgccttccctctcgtgtggggtgggggctctctcttcttggtgcctgctgtctttctactttttaatttaaatacccaacctctccatcacagctgcatccctgagagtgggagggggctgtagtggtagctggggctcccaagaacgactcgggaatgtcatctccatcttcacccttcagagagcagtcctttctctgtgcagctggagacgctggtgaggagagccgggtccaggttcttaagaatgaggtgcggaggggctctccggtgctgctgggctgggttgagcaagcctacgcagacaagtgtgtgtgtggaccatccgcacctccagcccccaccccaccctctttgtctcagcgtgttatgtgcaatgacctatttaaggtaaacccattccaactacagcagttcagggctgatccaagcactgcctccctcctgctctgtccaggtggtctggaccataaactcaacttgagagggaaggcttggggttgaggacttgtgatcagaaaaactgaagatggaagttttggccggtgctcattagacatgagtcctcactctgtgtcctgagcccgtgtcattcttccaacctccctgcccccacacacttatcccagacacaacaccatgtggtctggaggtcccagcccccaccctaaaaaggttatccctgagaactccaccagacttgggagcccaagtgcagtgcctggtgctgctcccatctgccgccccccttctctcctgcaattggtttgtactcactgggctgtgctctcccctgtttacccgatgtatggaaataaaggcccttttcctcctggctgcgccagttttcctgcctgttccttcaggctcaggcaaagtctggattggtcctgggggtggtgggcagaggcaggattctgatggggaccgtgagggcatcaccctggtctctggcctgctccccaaagtgtcagaccagtgccacttaaagagcctaggcagctcattttggggcaggcagaggtagtggaatgaggggattggccaaggaagacacaagccccaccttttatgtgaagagcctagggactgtgattcaggttagcaagggtggcagagactccaagcctcatcctccctagcctccacaagggaatgttgaggtccctctgattgttaaatctcaccaattacagagattctcttctcttctcttctcttcctccttccgtccctccctctctccctctctctctctctttctttctttcattctctttctttttggattcaagcccttctcattagaacattttttaaaagcttaattttagccatttcaaaggtgactttttgatcaaaacttggcagaactagctcgggcccacagggcaatgtgaataggttgggagtgctgtctctgccctgctcggtccctgtcttcatgccctactccatgctttgttccttcattgacagctaagaggcagctcatgcagaaaggcaagaaacaaatgacacccctcctcctcttctaccttctaccttctcattctgtagtgtggccagttataatccctgaatgaataaagtagtttggacagatgggtgggaaaaaatagcaaacagcccaagtgccgaggctctgataatgtcagccatccagaaagagtccaaaagggaagaagggagaaaagtctcccccaaaatgaatgggacagagtgtgaagtggatctgtctcgaacagagactgccccctccattgccccacgatagaacagagaagaggatagaaacaatagtaaaagggaagttacttgtcttttggagacagagtcttgctatgtcgcccaagctggaatgcagtggcatgatctcaactcactgcaacctctacctcccgaggttcaagcgattctcctgcctaaaccctccgagtagctgggacttaacagacgtgtaccaccacgcctggctaatttttgtatttttaatagagacggggtttcgccatgttgagcaggctggtctcgaacttctgacctcaagtgatctgcctgcctcgcctcccaaagtgctaggattataggcatgagccactgtgcctggcctaagttacttttttttacaaaaaaaaaaaaaaaaaaaaaaggctgctagcttatgttcagttctgtcactctcatcttttattcctgttttcacatagcgtggtacattttctgtttctactagggactagtgtgacaaactccctgccacctttagatgaattcccaaatctgttcactcatactgagtcaagcctctggttaactggaaactccaacatcaacctccaataacccggcctggggtaaaaagctttgttcaagtcagaaaacatattcatttgcttaacagttgagaaatatttcatgactgcctgctgtgcctaggccccattctgggtgctggtgatggataaggtcccttccttcataaagtggaggaaggtagacacaaaatacatgctgcacctgctagtatgcataagcttagagtgggtagagaggaacacatcatagtatccatcctccagggttttgcggacgagggctggagcagacccatgtggaaataattacataagacctaacaaggatgaagaggttgctttggacatactatggagggagatgctctctttggcggggaggattgggaaagcctctaaaaggagctgctattttgaccagggcttgaaaatagcacttccacaggtacagttgctgggaaaggcatattgagaagaagaagagtttaagtaaaggtcctggggcagggaaagagaggtgctggtagaacatgccacaggctggctgtgcattgtcacatgaccagtgcttctccaagtttcagttgagaaggagacaattcccttggccccagaggagtccaggagcctttagggccaccaaagcccatctttattttgggtgtaccttgaaggctctgctgttgaccttacctgtacactcatggtacctctggtccctaagatgttgcagaaggcaaatctggccctttgccaggctcaaagccagcctgctagatcctcctctataactgcagatccccgggattgctctgactcctgaataagcatgggcgggaaccagtgcccctgtgggactccccatggtgcccagtctgtgcccagaaaataaagtggcaggcagtgacccctaaatggtcttcttttgtctttgtgtctccttggcagattatcccagttgtccttgccccatcctccacccacttgcctggtggcaaagacacttagcgatttgctccttaattgtcccccagctaggctgcgcagatgccgctctttaatctctcctgataaatgaattgcgccgctcctttaatcatatgttcatatccaagccaatttgaatcaatttggcagggagcgtgttgcaagagatgccatgactgctgtttcttccccagggccctggagccagagcggctgctgtccttaccctcagcaaagagcccaggaggcccatccagggaaaggatcgcctacctgaatagtggggacttttcaaagtcttctaattcattcctgacctccaagctggccgtgtgggactggagggaaatggattcccaaaggcctcggaagtgggagggggatgagtccctagcctgccttggtcactgaatgaagggccccattatcatccctgggagaaagtactgccttaaatctaaccctaatcccttctgttccccgttcatttccactgcaccggttctctgggaagctggaacacttcgtcaccttttatatagcaacacattccagacaagtctatgataatttgtccttgcctgcttctactggcggccaccctgactccttccatcttctcctaggacatattttctaaaacctccagcctggtgggcagtccgacacgttcggtaatgtaccaagctctgccgcctttcaggctgctgccttttcacctccagagtggtgcccccgtgcagtaatgaaaacaaagcaaaaatagacaaaacctgccaaactgagttcttctgcgtctagcactgcgaccttggagaaggggcttaacctgtcaggcctcagtttccccatctgtgaaacaaggtagtattgctggcaagaaccttctggcttctaaattcagagctccttaccacagccaaaagaatctcccacgccctcccccttcatcccccctagtgagggactgacagttgatgcccagtggggcttcgagatccgggtgctgtggaagaaacgttgtgcatggtctgtcgggagttagtttccattcagacactcggttgaacctcgaggtcctctcatttcctcttcttccctagcccgctctgccagtccaggcttgtgccctaccattcactgggaaaccgagagctcgttagcatattcatatatatatttgcatatccacttttcattggcgcacgtggccctctggtcccgcccctgcctggaggttctttacgcacttcccagaagccactccccttaaaagaaatgggttttcaagccgccgatgggcagcccatctgtgttgcccttttaatgattacagcggcattaggacaggtctactctccgagcaacccggaaataatgtttcccgcccttttaagggcccttggaactctggcctgagctgaggcccagagtcagtgactgggactgacaggccccttcctaccctgtcagtagtgagaggagggtaataagagcaataattggccgggtgcggtggcttacgcctgtaatcccagtacttttgggaggccgaggagggtggatcacctgaggtcaggagttcaagaccagcctggccaacatggtgaaaccccatctcaactaaaaacaatacaaaaattagccgtgcgtggtggcaggcacctgtaatcccagctacttggggggctgaggcaggagaatcgcttgaacccgggaggcagaggttgcagtgagccaagatcgtgtcattgcactctggcctaggggacaagagagagacttcatctcaaaaaaaaaaaaaaaggaccaacaacagttcccatttgttgagcacttactatgatgaccccagcgcttaagcactttgccctacaaaatctcatttcacctccatcacaactctgtgaagacgtcatcctggaaagaaaactgaggctgaggggtgatgtcatctttctaagcagagtcctcaacttgcttccagcagctggccaggcgtctcctaactattctggccttggcagaggatgcagtgagaggcaagaaagcaaagaatcactaccatggtcctcatctcaaatcgcgtgtgcctggcattcgccaagtcctggcctcagaaaggaaacgcttcttggcaatttggggggaaaatatctacttcacatttgcgtcgcgcttcacaattttcagagcatcccccatatattatcacattttcacttcactcccactgtgccagcaatatgaataacagttccacatcgctcagaatgcatattttaagctatattcacttcagtctaatttcattacagtacaacaacaatccagaccattccctgctatttgatctgggaggaaagatttccagagcagtagccattttggagttaacaaggatactggatgtgtttagaaggaattgtacagagaaattgagtcttctgtagcgtgagccccagagatgggtcataaacataagggagattccaaaaagagtgtgtgctttgcgactgaagtcagtcacataaatcccccagtggaatacttatatgtgcagatagaatttgctgtagatatcaaaagtcagctatgacagttttagaagaaaagaaaattcaaaaaggatattacgttttgacactatccagccaaattatatttgaagtggcttaagagtcaaagagtttccacattttaagaaatttttatatgttttgtgccacatctatgatctgactagattaggaaaagcagcaaatggatttgggaaagagaggacactagggaatttgaaaatggaaatttaaaaaaaaaaggagttaaggctgaggtgggtggatcacctggagtcaggagttcgagaccagcctggccaagatggtgaaaccccctctctactaaaaatacaaaaattaggccgggcacggtggctcacgcctgtaatcccagcactttgggaggctgaggcgggtggatcacgaggtcaggagatcaagaccatcctggctaacacgatgaaaccccatctctactaaaaaaatacaaaaaattagccgggcatggtggcgggtgcctgtagtcccagctactcgggaggctgaggcaggagaatggcatgaacccaggaggcggagcttgcagtgagcagagatccgagccactgcactccagcctgggcgacagagcaagactccgtctcaaaaaaaaaaaaaaaaattagctgggcgtgttggcgggaacatgtaatcccagctactcgggaggctgaggcaggagaatcacttgaaggtggagtttgcagtgagacgagatcatgccattgcactccagcctgggcgacgggtgagactctgtctcaaaaagaaaaaaaggagtttaaaaaaatctctgcatggggaagatatagccaatagcttcggaaacattagcactttgaaagaccggtgagtgacaggcagccaggcaaatataaaattgtatgtgatgaaagaggtctcatggctcatcttaaccctggggcctggcatcaactgcaggttggcacccttgcttgaggactgctgggggactactgtccaaggaagagtgaccctagtgagtgcactccctggaaggttctgccctggaagcacaggtctcatggcctgcctttgtgggttccggagaacatctgtgggagctactgtttctggtggaaacatactcagccactgggcaggttttaatagtagaaaggagcttctgctcccaggaaccgacaaaataagcctagagaaccaactagaaagtgaggcagtcttacagctctgttaatgggttcctaaggttacatatagacatgacaaaagtagaagggaaaacacagatcaataaataaatattagaagggacctctgaaaactataagtagttttacctggggatgtggggttatagatgaagtggctgtgctttcaataccaagttttcatacaatttttaaaagtcagtacagatgtgtgtagcaacaccaaagaaggccccaaattgtcatattagcatgattataagaatcacttctttcccaacatttcatatacagaaatcatagcaggcgggtgggcgggagggggtaaaccgtgtggcaaagctgcttagaaactgcttagatcccttgctcagggaaagccattcttaaagcagcaggcttctctcggcatggctgagagggaagctggaagaggaacagattggagggtggaacatgaacagggtatttaggggaggcgagcagcgcagatgagacaagagcatctagatcaagccctcccatgcagctgagagccctgcaggtgatcggtttaggtgaggctgtttttgttaaagggactggcagtggggttgggatgaggaggagccaagagttgagaaggtcatttaggacatttgtgtcatagtgatatactttttttttttttttttttttaagatctgcaaggtggggacatggctcagtggccagactttgtgcctggctggtagatttgtgcttctaatacatggttccatctaagaaggtgtagccccttagggaagtattgttgctgacttgagtgaccagtgagtttctctgagaaattggaaaatgtgggatccctagtaaaagggaagcccaggggttgaggcatcctggcaggtctgggaggagcaagtcccctggggtgtgggtgtgatctccctctccctccccacccctactccttgctccccagcagaaatcagctacaaatctcagcttgttgggaacagatggccttggctgacgaataaaccaccgcaggctgctccacctgttctcgggctggaataatcagctcgagacaaacatcagcgctgaaataactcatggcagcgggtgatgcgcaggcactgattccaaaaatctcttaagcagcccccctccaactctcccctccccagcccctagaggccatgggggaaggtaatggagcacagaagacagatagagccccaaactgagcaggaggccggagctagtagtgccaccagcggaaatgggtggaggacagggctgagatgtgcggcagggtgggggcatccacttcagtggtgcaggaaattatttctcaggagcacgtggagaacatgggcattcctgtgttggtccatgggccaaggctgaggagactcaactagtccaggatggtagatacctgagcatttaggattcatttgatttgttcattgaaggagtgatgtgcaagtagggtcaatctaccggggaatctctcagcagctcacacagttctggcagcaaccactggggtcttctcctgctccctctgtcgatgggtgtctgggtgcccacagttgtacagatttgcgttcagccttccccgatccccgaagaagtcagctgggctaacgttccctggcactagcagatgagcccatgggaggagtgacagtgcagggaagcagtggtgatgggcagtgggggatgccaactgagatgggggtctgaatccctgtgaagctggtcaggagagggcagggagacagagaagaagctgattgtttgcattggttgcctcagtcagccggcaccctcagtctggcctccaggcctagtacatgaaacatggggactccagaggctgtgtgggcttacagtgaagcagcttgcagagccttccaaaccccaagttgcgtctctaagtgccagttattctttccccaagtggctctgtgctgcccagggcccaggacattggagactgagccctcccctcttatttagggtcctgcaaacctgttctcctccaagctggttctgcccgcagagttgccgaggtggcacttgtccttctaagtggctggctctgaggttctcacccctggctgttttggtttatatacaaaaagttttaaaataatagtataatgaatgaacctgttgatatggtttggctgtgtccccacccaaatctcatcttgaattgtagttcccataatccccttgtgttgtgggagggacctggtgggaggtaattgaatcatgggtgcagttacccccatgctgttcttgtgatagtgagtgagttctcaagagatctgatggttttgtaaggggcttttccactcttcactctgcactcattcgctctcctgcagccctgtgaagagatgccttccatcatgatcgtaagtttcctgaggccttacccagtcatgcagaactgagtcaattaaacctttctttataaattacccagtctcggatatttcttcatagcagtgtgagactggactaatacacctgtttacccatcaagcagcttcaacagttatcacacctcaggatgctgagatgggaggattccttgagcccaggagctcaaattcagcctgggaaacatagtgaaactcctgtatcttaaaaaatatatataatttaaattttttttttttgagacggagtctcattctgttgcccaggctggagcacagtggcacaatctcagctctctgcagcctccgcctcccaggttcaagtgattctcctgcctcagcctcctgagtagctgggattacaagcacacgccaccacgcccagctaatttttgtattttttttagttgagacggggtttcaccatgttggccaggctggtctcgaactcctgactgcaggcgatccacccgcctcggcctcccgaagtgctggggttacaggcttgagcccaccgcacctggccttaatttaatttaaaataagaataattaaaacagttatcaacagggaatcttgctttgttggcaaccctgcccacttccccattctcttcactgtattattttgaagctgacagacatgatgtcatttcaccaggaaatagtttagtattcctcaaagaaaagaaaatgaggccaggcacggtgacttacatctataatcccaacagtttggaagaccaaggcaagcagatcacttgagcccaggagtttgagaccagcctgggcaacatagggagaccccatctctacaaaaaataaaaataattagctaggttgaggtagaaggatcacttgagcctgggaggtcaaggctgcagtgacctgtgatagcaccattgcacttcagcacttcagcctgggcaacagagtgagaggatgtctcgaaaagaaaaaagaaaagaaaagaagaaaagaaaaggaaaggaaaggaaaggaaaatgactttttttttttagatggagtctcgctctgtcgccaggctggagtgcagtggcatgatctcagctcactgcaacctctgcctcccgggttcaagtgagcctcctgcctcagcctcctaagtatctgggactataggcgtgtgccaccatgcccagctaattctttgtattttttaatagtgacggggtctcaccatgttggccatgatagtctccatctcttgacctcgtgatctgctcccctcagcctcccaaagtgctgggattacaggcatgagccactgcacctagccaactt

SEQ ID NO: 2829 - DNA, 7461 bp, Homo sapiens
gctccatccctgaccgggccgaggctgctggatgccgcgtctccgcttctgctgcctgccgggcgggctccggtggccgcagcaaagtggggcaccaaggccctgtgctaagcactcataatcctctgggggtgctacccctacaaacagcacccccaccatgtttaacctaatgaagaaagacaaggacaaagatggcgggcggaaggagaagaaggagaaaaaggagaaaaaggagcggatgtcagcggcagagcttcggagcctggaggagatgagcctgcgacgtggcttcttcaacctgaaccgctcctccaagcgtgaatccaagacgcgcctggaaatctccaaccccatccccatcaaggtggccagcggctctgacctgcacctgactgacattgactccgatagtaaccggggcagcgtcatcctggactcgggccacctaagtacagccagctccagcgatgacctcaagggtgaggagggtagcttccgtggctcggtgctgcagcgggcagccaagttcggctcactggccaagcagaactcacagatgattgtcaagcgcttttccttctcccagcgtagccgggatgagagcgcctcagaaacctcgacgccctcagagcactctgccgccccctcgccacaggtggaggtgaggactctagagggacagctggtgcagcatcctggcccaggcatccctcgaccagggcaccgatcccgagcccctgagctagtgactaaaaagttcccagtcgacctgcgcctgccccccgtggtgcccctgcccccacctaccctccgggagctggagctgcaacgacggcccactggagactttggcttctccctgcggcgcacaaccatgctggatcggggccccgagggccaggcctgtcggcgtgtggtccactttgctgagcctggtgcaggcaccaaggacctggccctggggctggtgccaggagatcgactggtggagattaatgggcacaatgtggagagcaagtccagggatgagattgtggagatgatccggcagtcaggggacagcgtgcggctcaaggtgcagcccattccagagctcagcgagctcagcaggagctggctgcggagcggcgagggacctcgcagggagccatccgatgcgaaaacagaagaacagattgcagcagaagaggcctggaatgagacggagaaggtgtggctggtccatagggacggcttctcactggccagtcaactcaaatctgaggagctcaacttgcctgaggggaaggtgcgtgtgaagctggaccacgatggggccatcctggatgtggatgaggatgacgttgagaaggctaatgctccctcctgcgaccgtctggaggatctggcctcactggtgtacctcaatgagtccagcgtcctgcacaccttgcgccagcgctatggcgctagcctgctgcacacgtatgctggccccagcctgctggttcttggcccccgtggggcccctgctgtgtactctgagaaggtgatgcacatgttcaagggttgtcggcgggaggacatggcaccccacatctatgcagtggcccagaccgcatacagggcgatgctgatgagccgtcaggatcagtcaatcatcctcctgggcagtagtggcagtggcaagaccaccagctgccagcatctggtgcagtacctggccaccatcgcgggcatcagcgggaacaaggtgttttctgtggagaagtggcaggctctgtacaccctcctggaagcctttgggaacagccccaccatcattaatggcaatgccacccgcttctcccagatcctctccctggactttgaccaagctggccaggtggcctcagcctccattcagacaatgcttctggagaagctgcgtgtggctcggcgcccagccagtgaagccacattcaacgtcttctactacctgctggcctgtggggatggcaccctcaggacagagctccacctcaaccacttggcagagaacaatgtgtttgggattgtgccactggccaagcctgaggaaaagcagaaggcagctcagcagtttagtaagctgcaggcggccatgaaggtgctgggcatctcccccgatgaacagaaggcctgctggttcattctggctgccatctaccacctgggggctgcgggagccaccaaagatccctttttccactccacagctgggcgcaagcagtttgcccgccatgagtgggcccagaaggctgcgtacctactgggctgcagcctggaggagctgtcctcagccatcttcaagcaccagcacaagggtggcaccctgcagcgctccacctccttccgccagggccccgaggagagtggcctgggagatgggacaggcccgaaactgagtgcactggagtgccttgagggcatggcggccggcctctacagcgagctcttcacccttctcgtctccctggtgaatagggctctcaagtccagccagcactcactctgctccatgatgattgtcgacaccccgggcttccagaaccctgagcagggtgggtcagcccgcggagcctcctttgaggagctgtgccacaactacacccaagaccggctgcagaggctcttccacgagcgcaccttcgtgcaggagttggaaagatacaaggaggagaacatcgagctggcgtttgacgacttggaaccccccacggatgactctgtggctgctgtggaccaggcctcccatcagtccctggtccgctcgctggcccgcacagacgaggcgaggggcctgctctggctattggaagaggaggctctggtgccaggggccagtgaggacaccctcctggagcgccttttctcctattatggcccccaggaaggtgacaaaaaaggccaaagcccccttctgcacagcagcaaaccacaccactttctcctgggccacagccatggcaccaactgggtagagtacaatgtgactggctggctgaactacaccaagcagaacccagccacccagaatgccccccggctcctgcaggactcccagaaaaaaatcatcagcaacctgtttctgggccgcgcaggcagtgccacggtgctctctggctccatcgcgggcctggagggcggctcgcagctggcactgcgccgggccaccagcatgcggaaaacctttaccacaggcatggcggctgtcaaaaagaagtcactgtgcatccagatgaagctacaggtggacgccctcatcgacaccatcaagaagtcaaagctgcattttgtgcactgcttcctgcctgtagctgagggctgggctggggagccccgttccgcctcctcccgccgagtcagcagcagcagtgagctggacctgccctcgggagaccactgcgaggctgggctcctgcagctcgacgtgcccctgctccgcacccagctccgcggctcccgcctgctcgatgccatgcgcatgtaccgccaaggttaccctgaccacatggtgttttccgagttccgccgccgctttgatgtcctggccccgcacctgaccaagaaacacgggcgtaactacatcgtggtggatgaaaggcgggtagtggaggagctgctggagtgcttggatctggagaagagcagctgctgcatgggcctgagccgggtgttcttccgggcgggcaccttggcacggctggaggagcagcgggatgaacaaaccagcaggaacctaaccctgttccaagcagcctgcaggggctacctggcccgccagcacttcaagaagagaaagatccaggacctggccattcgctgtgtacagaagaacatcaagaagaacaaaggggtgaaggactggccctggtggaagctttttaccacagtgaggcccctcatcgaagtacagctgtcagaggagcagatccggaacaaagacgaggagatccagcagctgcggagcaagctcgagaaggcggagaaggagaggaacgagctgcggctcaacagtgaccggctggagagccggatctcagagctgacatcggagctgacagatgagcgtaacacaggagagtccgcctcccagctgctggacgcggagacagcagagaggctccgggctgagaaggagatgaaggaactgcagacccagtacgatgcactgaagaagcagatggaggttatggaaatggaggtgatggaggcccgtctcatccgggcagcggagatcaacggggaagtggatgatgatgatgcaggtggcgagtggcggctgaagtatgagcgggctgtgcgggaggtggacttcaccaagaaacggctccagcaggagtttgaggacaagctggaggtggagcagcagaacaagaggcagctggaacggcggctcggggacctgcaggcagatagtgaggagagtcagcgggctctgcagcagctcaagaagaagtgccagcgactgacggctgagctgcaagacaccaagctgcacctggagggccagcaggtccgcaaccacgaactggagaagaagcagaggaggtttgacagtgagctctcgcaggcgcatgaggaggcccagcgggagaagctgcagcgggagaagctgcagcgggagaaggacatgctcctcgctgaggctttcagcctgaagcagcaactagaggaaaaagacatggacattgcagggttcacccagaaggttgtgtctctagaggcagagctccaggacatttcttcccaagagtccaaggatgaggcttctctggccaaggtcaagaaacagctccgggacctggaggccaaagtcaaggatcaggaagaagagctggatgagcaggcagggaccatccagatgctggaacaggccaagctgcgtctggagatggagatggagcggatgagacagacccattctaaggagatggagagtcgggatgaggaggtggaggaggcccggcagtcgtgtcagaagaagttaaaacagatggaggtgcagctagaggaagagtatgaggacaagcagaaggttctgcgagagaagcgggagctggagggcaagctcgccaccctcagcgaccaggtgaaccggcgggactttgagtcagagaagcggctgcggaaggacctgaagcgcaccaaggccctgctggcagatgcccagctcatgctggaccacctgaagaacagtgctcccagcaagcgagagattgcccagctcaagaaccagctggaggagtcagagttcacctgtgcggcagccgtgaaagcacggaaagcaatggaggtggagatcgaagacctgcacctgcagattgatgacatcgccaaagccaagacagcgctggaggagcagctgagccgccttcagcgtgagaagaatgagatccagaaccggctggaggaagatcaggaagacatgaacgaattgatgaagaagcacaaggctgccgtggctcaggcttcccgggacctggctcagataaatgatctccaagctcagctagaagaagccaacaaagagaagcaggagctgcaggagaagctacaagccctccagagccaggtggagttcctggagcagtccatggtggacaagtccctggtgagcaggcaggaagctaagatacgggagctggagacacgcctggagtttgaaaggacgcaagtgaaacggctggagagcctggctagccgtctcaaggaaaacatggagaagctgactgaggagcgggatcagcgcattgcagccgagaaccgggagaaggaacagaacaagcggctacagaggcagctccgggacaccaaggaggagatgggcgagcttgccaggaaggaggccgaggcgagccgcaagaagcacgaactggagatggatctagaaagcctggaggctgctaaccagagcctgcaggctgacctaaagttggcattcaagcgcatcggggacctgcaggctgccattgaggatgagatggagagtgatgagaatgaggacctcatcaacagtgagggagactctgatgtggactcggagctggaggaccgtgttgacggggtcaagtcctggttgtcaaaaaacaagggaccttccaaggcagcttctgatgatggcagcttaaagagttccagccccaccagctactggaagtcccttgcccctgatcggtcagatgatgagcacgaccctctcgacaacacctccagaccgcgatactcccacagttatctgagtgacagcgacacagaggccaagctgacggagactaacgcatagcccaggggagtggttggcagccctctcaccccagggcctgtggctgcctgggcacctctcccaggaagtggtggggcaccggtctcccccacccgactgctgatctgcatgggaaacaccctgaccttcttctgtcaggggcactttccaggctatgggtgtctgatgtctccacgtggaagaggtgggggaaagaggagtttctgaagagaactttttgctcctctgtctcaaaatgccagactcttggcttctaccctgtgtcaccgtgggcagcggcaggtggcctggcactgcatggagccagcacgttgacctccctctcagctccctgctcagggacggtggacaggttgcctactgggacactctaggttgctgggtccatggggaggattgggggaggagaagcagtgccttccctctcgtgtggggtgggggctctctcttcttggtgcctgctgtctttctactttttaatttaaatacccaacctctccatcacagctgcatccctgagagtgggagggggctgtagtggtagctggggctcccaagaacgactcgggaatgtcatctccatcttcacccttcagagagcagtcctttctctgtgcagctggagacgctggtgaggagagccgggtccaggttcttaagaatgaggtgcggaggggctctccggtgctgctgggctgggttgagcaagcctacgcagacaagtgtgtgtgtggaccatccgcacctccagcccccaccccaccctctttgtctcagcgtgttatgtgcaatgacctatttaaggtaaacccattccaactacagcagttcagggctgatccaagcactgcctccctcctgctctgtccaggtggtctggaccataaactcaacttgagagggaaggcttggggttgaggacttgtgatcagaaaaactgaagatggaagttttggccggtgctcattagacatgagtcctcactctgtgtcctgagcccgtgtcattcttccaacctccctaactccaccagacttgggagcccaagtgcagtgcctggtgctgctcccatctgccgccccccttctctcctgcaattggtttgtactcactgggctgtgctctcccctgtttacccgatgtatggaaataaaggcccttttcctcctggc

SEQ ID NO: 2830 - protein, 2036 aa, Homo sapiens
MFNLMKKDKDKDGGRKEKKEKKEKKERMSAAELRSLEEMSLRRGFFNLNRSSKRESKTRLEISNPIPIKVASGSDLHLTDIDSDSNRGSVILDSGHLSTASSSDDLKGEEGSFRGSVLQRAAKFGSLAKQNSQMIVKRFSFSQRSRDESASETSTPSEHSAAPSPQVEVRTLEGQLVQHPGPGIPRPGHRSRAPELVTKKFPVDLRLPPVVPLPPPTLRELELQRRPTGDFGFSLRRTTMLDRGPEGQACRRVVHFAEPGAGTKDLALGLVPGDRLVEINGHNVESKSRDEIVEMIRQSGDSVRLKVQPIPELSELSRSWLRSGEGPRREPSDAKTEEQIAAEEAWNETEKVWLVHRDGFSLASQLKSEELNLPEGKVRVKLDHDGAILDVDEDDVEKANAPSCDRLEDLASLVYLNESSVLHTLRQRYGASLLHTYAGPSLLVLGPRGAPAVYSEKVMHMFKGCRREDMAPHIYAVAQTAYRAMLMSRQDQSIILLGSSGSGKTTSCQHLVQYLATIAGISGNKVFSVEKWQALYTLLEAFGNSPTIINGNATRFSQILSLDFDQAGQVASASIQTMLLEKLRVARRPASEATFNVFYYLLACGDGTLRTELHLNHLAENNVFGIVPLAKPEEKQKAAQQFSKLQAAMKVLGISPDEQKACWFILAAIYHLGAAGATKDPFFHSTAGRKQFARHEWAQKAAYLLGCSLEELSSAIFKHQHKGGTLQRSTSFRQGPEESGLGDGTGPKLSALECLEGMAAGSELFTLLVSLVNRALKSSQHSLCSMMIVDTPGFQNPEQGGSRASFEELCHNYTQDRLQRLFHERTFVQELERYKEENIELAFDDLEPPTDDSVAAVDQASHQSLVRSLARTDERLLWLLEEEALVPGASEDTLLERLFSYYGPQEGDKKGQSPLLHSSKPHHFLLGHSHGTNWVEYNVTGWLNYTKQNPATQNAPRLLQDSQKKIISNLFLGRAGSATVLSGSIAGLEGGSQLALRRATSMRKTFTTGMAAVKKKSLCIQMKLQVDALIDTIKKSKLHFVHCFLPVAEGWAGEPRSASSRRVSSSSELDLPSGDHCEAGLLQLDVPLLRTQLRGSRLLDAMRMYRQGYPDHMVFSEFRRRFDVLAPHLTKKHGRNYIVVDERRVVEELLECLDLEKSSCCMGLSRVFFRAGTLARLEEQRDEQTSRNLTLFQAACRGYLARQHFKKRKIQDLAIRCVQKNIKKNKGVKDWPWWKLFTTVRPLIEVQLSEEQIRNKDEEIQQLRSKLEKAEKERNELRLNSDRLESRISELTSELTDERNTGESASQLLDAETAERLRAEKEMKELQTQYDALKKQMEVMEMEVMEARLIRAAEINGEVDDDDAGGEWRLKYERAVREVDFTKKRLQQEFEDKLEVEQQNKRQLERRLGDLQADSEESQRALQQLKKKCQRLTAELQDTKLHLEGQQVRNHELEKKQRRFDSELSQAHEEAQREKLQREKLQREKDMLLAEAFSLKQQLEEKDMDIAGFTQKVVSLEAELQDISSQESKDEASLAKVKKQLRDLEAKVKDQEEELDEQAGTIQMLEQAKLRLEMEMERMRQTHSKEMESRDEEVEEARQSCQKKLKQMEVQLEEEYEDKQKVLREKRELEGKLATLSDQVNRRDFESEKRLRKDLKRTKALLADAQLMLDHLKNSAPSKREIAQLKNQLEESEFTCAAAVKARKAMEVEIEDLHLQIDDIAKAKTALEEQLSRLQREKNEIQNRLEEDQEDMNELMKKHKAAVAQASRDLAQINDLQAQLEEANKEKQELQEKLQALQSQVEFLEQSMVDKSLVSRQEAKIRELETRLEFERTQVKRLESLASRLKENMEKLTEERDQRIAAENREKEQNKRLQRQLRDTKEEMGELARKEAEASRKKHELEMDLESLEAANQSLQADLKLAFKRIGDLQAAIEDEMESDENEDLINSEGDSDVDSELEDRVDGVKSWLSKNKGPSKAASDDGSLKSSSPTSYWKSLAPDRSDDEHDPLDNTSRPRYSHSYLSDSDTEAKLTETNA

SEQ ID NO: 2831 - DNA, 6492 bp, Homo sapiens
agtctccttgctctgggctgctccaggccaggccatgcggaaagtgtgttgttatgaggattcaatgaggagacctgtatgaagtgccttcccctgtgcctggctcatagcgaaaacagaagaacagattgcagcagaagaggcctggaatgagacggagaaggtgtggctggtccatagggacggcttctcactggccagtcaactcaaatctgaggagctcaacttgcctgaggggaaggtgcgtgtgaagctggaccacgatggggccatcctggatgtggatgaggatgacgttgagaaggctaatgctccctcctgcgaccgtctggaggatctggcctcactggtgtacctcaatgagtccagcgtcctgcacaccttgcgccagcgctatggcgctagcctgctgcacacgtatgctggccccagcctgctggttcttggcccccgtggggcccctgctgtgtactctgagaaggtgatgcacatgttcaagggttgtcggcgggaggacatggcaccccacatctatgcagtggcccagaccgcatacagggcgatgctgatgagccgtcaggatcagtcaatcatcctcctgggcagtagtggcagtggcaagaccaccagctgccagcatctggtgcagtacctggccaccatcgcgggcatcagcgggaacaaggtgttttctgtggagaagtggcaggctctgtacaccctcctggaagcctttgggaacagccccaccatcattaatggcaatgccacccgcttctcccagatcctctccctggactttgaccaagctggccaggtggcctcagcctccattcagacaatgcttctggagaagctgcgtgtggctcggcgcccagccagtgaagccacattcaacgtcttctactacctgctggcctgtggggatggcaccctcaggacagagctccacctcaaccacttggcagagaacaatgtgtttgggattgtgccactggccaagcctgaggaaaagcagaaggcagctcagcagtttagtaagctgcaggcggccatgaaggtgctgggcatctcccccgatgaacagaaggcctgctggttcattctggctgccatctaccacctgggggctgcgggagccaccaaaggtaacctgcagtggctgggcgcaagcagtttgcccgccatgagtgggcccagaaggctgcgtacctactgggctgcagcctggaggagctgtcctcagccatcttcaagcaccagcacaagggtggcaccctgcagcgctccacctccttccgccagggccccgaggagagtggcctgggagatgggacaggcccgaaactgagtgcactggagtgccttgagggcatggcggccggcctctacagcgagctcttcacccttctcgtctccctggtgaatagggctctcaagtccagccagcactcactctgctccatgatgattgtcgacaccccgggcttccagaaccctgagcagggtgggtcagcccgcggagcctcctttgaggagctgtgccacaactacacccaagaccggctgcagaggctcttccacgagcgcaccttcgtgcaggagttggaaagatacaaggaggagaacatcgagctggcgtttgacgacttggaaccccccacggatgactctgtggctgctgtggaccaggcctcccatcagtccctggtccgctcgctggcccgcacagacgaggcgaggggcctgctctggctattggaagaggaggctctggtgccaggggccagtgaggacaccctcctggagcgccttttctcctattatggcccccaggaaggtgacaaaaaaggccaaagcccccttctgcacagcagcaaaccacaccactttctcctgggccacagccatggcaccaactgggtagagtacaatgtgactggctggctgaactacaccaagcagaacccagccacccagaatgccccccggctcctgcaggactcccagaaaaaaatcatcagcaacctgtttctgggccgcgcaggcagtgccacggtgctctctggctccatcgcgggcctggagggcggctcgcagctggcactgcgccgggccaccagcatgcggaaaacctttaccacaggcatggcggctgtcaaaaagaagtcactgtgcatccagatgaagctacaggtggacgccctcatcgacaccatcaagaagtcaaagctgcattttgtgcactgcttcctgcctgtagctgagggctgggctggggagccccgttccgcctcctcccgccgagtcagcagcagcagtgagctggacctgccctcgggagaccactgcgaggctgggctcctgcagctcgacgtgcccctgctccgcacccagctccgcggctcccgcctgctcgatgccatgcgcatgtaccgccaaggttaccctgaccacatggtgttttccgagttccgccgccgctttgatgtcctggccccgcacctgaccaagaaacacgggcgtaactacatcgtggtggatgaaaggcgggcagtggaggagctgctggagtgcttggatctggagaagagcagctgctgcatgggcctgagccgggtgttcttccgggcgggcaccttggcacggctggaggagcagcgggatgaacaaaccagcaggaacctaaccctgttccaagcagcctgcaggggctacctggcccgccagcacttcaagaagagaaagatccaggacctggccattcgctgtgtacagaagaacatcaagaagaacaaaggggtgaaggactggccctggtggaagctttttaccacagtgaggcccctcatcgaagtacagctgtcagaggagcagatccggaacaaagacgaggagatccagcagctgcggagcaagctcgagaaggcggagaaggagaggaacgagctgcggctcaacagtgaccggctggagagccggatctcagagctgacatcggagctgacagatgagcgtaacacaggagagtccgcctcccagctgctggacgcggagacagcagagaggctccgggctgagaaggagatgaaggaactgcagacccagtacgatgcactgaagaagcagatggaggttatggaaatggaggtgatggaggcccgtctcatccgggcagcggagatcaacggggaagtggatgatgatgatgcaggtggcgagtggcggctgaagtatgagcgggctgtgcgggaggtggacttcaccaagaaacggctccagcaggagtttgaggacaagctggaggtggagcagcagaacaagaggcagctggaacggcggctcggggacctgcaggcagatagtgaggagagtcagcgggctctgcagcagctcaagaagaagtgccagcgactgacggctgagctgcaagacaccaagctgcacctggagggccagcaggtccgcaaccacgaactggagaagaagcagaggaggtttgacagtgagctctcgcaggcgcatgaggaggcccagcgggagaagctgcagcgggagaagctgcagcgggagaaggacatgctcctcgctgaggctttcagcctgaagcagcaactagaggaaaaagacatggacattgcagggttcacccagaaggttgtgtctctagaggcagagctccaggacatttcttcccaagagtccaaggatgaggcttctctggccaaggtcaagaaacagctccgggacctggaggccaaagtcaaggatcaggaagaagagctggatgagcaggcagggaccatccagatgctggaacaggccaagctgcgtctggagatggagatggagcggatgagacagacccattctaaggagatggagagtcgggatgaggaggtggaggaggcccggcagtcgtgtcagaagaagttaaaacagatggaggtgcagctagaggaagagtatgaggacaagcagaaggttctgcgagagaagcgggagctggagggcaagctcgccaccctcagcgaccaggtgaaccggcgggactttgagtcagagaagcggctgcggaaggacctgaagcgcaccaaggccctgctggcagatgcccagctcatgctggaccacctgaagaacagtgctcccagcaagcgagagattgcccagctcaagaaccagctggaggagtcagagttcacctgtgcggcagccgtgaaagcacggaaagcaatggaggtggagatcgaagacctgcacctgcagattgatgacatcgccaaagccaagacagcgctggaggagcagctgagccgccttcagcgtgagaagaatgagatccagaaccggctggaggaagatcaggaagacatgaacgaattgatgaagaagcacaaggctgccgtggctcaggcttcccgggacctggctcagataaatgatctccaagctcagctagaagaagccaacaaagagaagcaggagctgcaggagaagctacaagccctccagagccaggtggagttcctggagcagtccatggtggacaagtccctggtgagcaggcaggaagctaagatacgggagctggagacacgcctggagtttgaaaggacgcaagtgaaacggctggagagcctggctagccgtctcaaggaaaacatggagaagctgactgaggagcgggatcagcgcattgcagccgagaaccgggagaaggaacagaacaagcggctacagaggcagctccgggacaccaaggaggagatgggcgagcttgccaggaaggaggccgaggcgagccgcaagaagcacgaactggagatggatctagaaagcctggaggctgctaaccagagcctgcaggctgacctaaagttggcattcaagcgcatcggggacctgcaggctgccattgaggatgagatggagagtgatgagaatgaggacctcatcaacagtgagggagactctgatgtggactcggagctggaggaccgtgttgacggggtcaagtcctggttgtcaaaaaacaagggaccttccaaggcagcttctgatgatggcagcttaaagagttccagccccaccagctactggaagtcccttgcccctgatcggtcagatgatgagcacgaccctctcgacaacacctccagaccgcgatactcccacagttatctgagtgacagcgacacagaggccaagctgacggagactaacgcatagcccaggggagtggttggcagccctctcaccccagggcctgtggctgcctgggcacctctcccaggaagtggtggggcaccggtctcccccacccgactgctgatctgcatgggaaacaccctgaccttcttctgtcaggggcactttccaggctatgggtgtctgatgtctccacgtggaagaggtgggggaaagaggagtttctgaagagaactttttgctcctctgtctcaaaatgccagactcttggcttctaccctgtgtcaccgtgggcagcggcaggtggcctggcactgcatggagccagcacgttgacctccctctcagctccctgctcagggacggtggacaggttgcctactgggacactctaggttgctgggtccatggggaggattgggggaggagaagcagtgccttccctctcgtgtggggtgggggctctctcttcttggtgcctgctgtctttctactttttaatttaaatacccaacctctccatcacagctgcatccctgagagtgggagggggctgtagtggtagctggggctcccaagaacgactcgggaatgtcatctccatcttcacccttcagagagcagtcctttctctgtgcagctggagacgctggtgaggagagccgggtccaggttcttaagaatgaggtgcggaggggctctccggtgctgctgggctgggttgagcaagcctacgcagacaagtgtgtgtgtggaccatccgcacctccagcccccaccccaccctctttgtctcagcgtgttatgtgcaatgacctatttaaggtaaacccattccaactacagcagttcagggctgatccaagcactgcctccctcctgctctgtccaggtggtctggaccataaactcaacttgagagggaaggcttggggttgaggacttgtgatcagaaaaactgaagatggaagttttggccggtgctcattagacatgagtcctcactctgtgtcctgagcccgtgtcattcttccaacctccctgcccccacacacttatcccagacacaacaccatgtggtctggaggtcccagcccccaccctaaaaaggttatccctgagaactccaccagacttgggagcccaagtgcagtgcctggtgctgctcccatctgccgccccccttctctcctgcaattggtttgtactcactgggctgtgctctcccctgtttacccgatgtatggaaataaaggcccttttcctcctggctgcgccagt

SEQ ID NO: 2832 - protein, 1279 aa, Homo sapiens
MAAGSELFTLLVSLVNRALKSSQHSLCSMMIVDTPGFQNPEQGGSRASFEELCHNYTQDRLQRLFHERTFVQELERYKEENIELAFDDLEPPTDDSVAAVDQASHQSLVRSLARTDERLLWLLEEEALVPGASEDTLLERLFSYYGPQEGDKKGQSPLLHSSKPHHFLLGHSHGTNWVEYNVTGWLNYTKQNPATQNAPRLLQDSQKKIISNLFLGRAGSATVLSGSIAGLEGGSQLALRRATSMRKTFTTGMAAVKKKSLCIQMKLQVDALIDTIKKSKLHFVHCFLPVAEGWAGEPRSASSRRVSSSSELDLPSGDHCEAGLLQLDVPLLRTQLRGSRLLDAMRMYRQGYPDHMVFSEFRRRFDVLAPHLTKKHGRNYIVVDERRAVEELLECLDLEKSSCCMGLSRVFFRAGTLARLEEQRDEQTSRNLTLFQAACRGYLARQHFKKRKIQDLAIRCVQKNIKKNKGVKDWPWWKLFTTVRPLIEVQLSEEQIRNKDEEIQQLRSKLEKAEKERNELRLNSDRLESRISELTSELTDERNTGESASQLLDAETAERLRAEKEMKELQTQYDALKKQMEVMEMEVMEARLIRAAEINGEVDDDDAGGEWRLKYERAVREVDFTKKRLQQEFEDKLEVEQQNKRQLERRLGDLQADSEESQRALQQLKKKCQRLTAELQDTKLHLEGQQVRNHELEKKQRRFDSELSQAHEEAQREKLQREKLQREKDMLLAEAFSLKQQLEEKDMDIAGFTQKVVSLEAELQDISSQESKDEASLAKVKKQLRDLEAKVKDQEEELDEQAGTIQMLEQAKLRLEMEMERMRQTHSKEMESRDEEVEEARQSCQKKLKQMEVQLEEEYEDKQKVLREKRELEGKLATLSDQVNRRDFESEKRLRKDLKRTKALLADAQLMLDHLKNSAPSKREIAQLKNQLEESEFTCAAAVKARKAMEVEIEDLHLQIDDIAKAKTALEEQLSRLQREKNEIQNRLEEDQEDMNELMKKHKAAVAQASRDLAQINDLQAQLEEANKEKQELQEKLQALQSQVEFLEQSMVDKSLVSRQEAKIRELETRLEFERTQVKRLESLASRLKENMEKLTEERDQRIAAENREKEQNKRLQRQLRDTKEEMGELARKEAEASRKKHELEMDLESLEAANQSLQADLKLAFKRIGDLQAAIEDEMESDENEDLINSEGDSDVDSELEDRVDGVKSWLSKNKGPSKAASDDGSLKSSSPTSYWKSLAPDRSDDEHDPLDNTSRPRYSHSYLSDSDTEAKLTETNA

SEQ ID NO: 2833 - DNA, 6844 bp, Homo sapiens
gctccatccctgaccgggccgaggctgctggatgccgcgtctccgcttctgctgcctgccgggcgggctccggtggccgcagcaaagtggggcaccaaggccctgtgctaagcactcataatcctctgggggtgctacccctacaaacagcacccccaccatgtttaacctaatgaagaaagacaaggacaaagatggcgggcggaaggagaagaaggagaaaaaggagaaaaaggagcggatgtcagcggcagagcttcggagcctggaggagatgagcctgcgacgtggcttcttcaacctgaaccgctcctccaagcgtgaatccaagacgcgcctggaaatctccaaccccatccccatcaaggtggccagcggctctgacctgcacctgactgacattgactccgatagtaaccggggcagcgtcatcctggactcgggccacctaagtacagccagctccagcgatgacctcaagggtgaggagggtagcttccgtggctcggtgctgcagcgggcagccaagttcggctcactggccaagcagaactcacagatgattgtcaagcgcttttccttctcccagcgtagccgggatgagagcgcctcagaaacctcgacgccctcagagcactctgccgccccctcgccacaggtggaggtgaggactctagagggacagctggtgcagcatcctggcccaggcatccctcgaccagggcaccgatcccgagcccctgagctagtgactaaaaagttcccagtcgacctgcgcctgccccccgtggtgcccctgcccccacctaccctccgggagctggagctgcaacgacggcccactggagactttggcttctccctgcggcgcacaaccatgctggatcggggccccgagggccaggcctgtcggcgtgtggtccactttgctgagcctggtgcaggcaccaaggacctggccctggggctggtgccaggagatcgactggtggagattaatgggcacaatgtggagagcaagtccagggatgagattgtggagatgatccggcagtcaggggacagcgtgcggctcaaggtgcagcccattccagagctcagcgagctcagcaggagctggctgcggagcggcgagggacctcgcagggagccatccgatgcgaaaacagaagaacagattgcagcagaagaggcctggaatgagacggagaaggtgtggctggtccatagggacggcttctcactggccagtcaactcaaatctgaggagctcaacttgcctgaggggaaggtgcgtgtgaagctggaccacgatggggccatcctggatgtggatgaggatgacgttgagaaggctaatgctccctcctgcgaccgtctggaggatctggcctcactggtgtacctcaatgagtccagcgtcctgcacaccttgcgccagcgctatggcgctagcctgctgcacacgtatgctggccccagcctgctggttcttggcccccgtggggcccctgctgtgtactctgagaaggtgatgcacatgttcaagggttgtcggcgggaggacatggcaccccacatctatgcagtggcccagaccgcatacagggcgatgctgatgagccgtcaggatcagtcaatcatcctcctgggcagtagtggcagtggcaagaccaccagctgccagcatctggtgcagtacctggccaccatcgcgggcatcagcgggaacaaggtgttttctgtggagaagtggcaggctctgtacaccctcctggaagcctttgggaacagccccaccatcattaatggcaatgccacccgcttctcccagatcctctccctggactttgaccaagctggccaggtggcctcagcctccattcagacaatgcttctggagaagctgcgtgtggctcggcgcccagccagtgaagccacattcaacgtcttctactacctgctggcctgtggggatggcaccctcaggacagagctccacctcaaccacttggcagagaacaatgtgtttgggattgtgccactggccaagcctgaggaaaagcagaaggcagctcagcagtttagtaagctgcaggcggccatgaaggtgctgggcatctcccccgatgaacagaaggcctgctggttcattctggctgccatctaccacctgggggctgcgggagccaccaaagatccctttttccactccacagctgggcgcaagcagtttgcccgccatgagtgggcccagaaggctgcgtacctactgggctgcagcctggaggagctgtcctcagccatcttcaagcaccagcacaagggtggcaccctgcagcgctccacctccttccgccagggccccgaggagagtggcctgggagatgggacaggcccgaaactgagtgcactggagtgccttgagggcatggcggccggcctctacagcgagctcttcacccttctcgtctccctggtgaatagggctctcaagtccagccagcactcactctgctccatgatgattgtcgacaccccgggcttccagaaccctgagcagggtgggtcagcccgcggagcctcctttgaggagctgtgccacaactacacccaagaccggctgcagaggctcttccacgagcgcaccttcgtgcaggagttggaaagatacaaggaggagaacatcgagctggcgtttgacgacttggaaccccccacggatgactctgtggctgctgtggaccaggcctcccatcagtccctggtccgctcgctggcccgcacagacgaggcgaggggcctgctctggctattggaagaggaggctctggtgccaggggccagtgaggacaccctcctggagcgccttttctcctattatggcccccaggaaggtgacaaaaaaggccaaagcccccttctgcacagcagcaaaccacaccactttctcctgggccacagccatggcaccaactgggtagagtacaatgtgactggctggctgaactacaccaagcagaacccagccacccagaatgccccccggctcctgcaggactcccagaaaaaaatcatcagcaacctgtttctgggccgcgcaggcagtgccacggtgctctctggctccatcgcgggcctggagggcggctcgcagctggcactgcgccgggccaccagcatgcggaaaacctttaccacaggcatggcggctgtcaaaaagaagtcactgtgcatccagatgaagctacaggtggacgccctcatcgacaccatcaagaagtcaaagctgcattttgtgcactgcttcctgcctgtagctgagggctgggctggggagccccgttccgcctcctcccgccgagtcagcagcagcagtgagctggacctgccctcgggagaccactgcgaggctgggctcctgcagctcgacgtgcccctgctccgcacccagctccgcggctcccgcctgctcgatgccatgcgcatgtaccgccaaggttaccctgaccacatggtgttttccgagttccgccgccgctttgatgtcctggccccgcacctgaccaagaaacacgggcgtaactacatcgtggtggatgaaaggcgggtagtggaggagctgctggagtgcttggatctggagaagagcagctgctgcatgggcctgagccgggtgttcttccgggcgggcaccttggcacggctggaggagcagcgggatgaacaaaccagcaggaacctaaccctgttccaagcagcctgcaggggctacctggcccgccagcacttcaagaagagaaagatccaggacctggccattcgctgtgtacagaagaacatcaagaagaacaaaggggtgaaggactggccctggtggaagctttttaccacagtgaggcccctcatcgaagtacagctgtcagaggagcagatccggaacaaagacgaggagatccagcagctgcggagcaagctcgagaaggcggagaaggagaggaacgagctgcggctcaacagtgaccggctggagagccggatctcagagctgacatcggagctgacagatgagcgtaacacaggagagtccgcctcccagctgctggacgcggagacagcagagaggctccgggctgagaaggagatgaaggaactgcagacccagtacgatgcactgaagaagcagatggaggttatggaaatggaggtgatggaggcccgtctcatccgggcagcggagatcaacggggaagtggatgatgatgatgcaggtggcgagtggcggctgaagtatgagcgggctgtgcgggaggtggacttcaccaagaaacggctccagcaggagtttgaggacaagctggaggtggagcagcagaacaagaggcagctggaacggcggctcggggacctgcaggcagatagtgaggagagtcagcgggctctgcagcagctcaagaagaagtgccagcgactgacggctgagctgcaagacaccaagctgcacctggagggccagcaggtccgcaaccacgaactggagaagaagcagaggaggtttgacagtgagctctcgcaggcgcatgaggaggcccagcgggagaagctgcagcgggagaagctgcagcgggagaaggacatgctcctcgctgaggctttcagcctgaagcagcaactagaggaaaaagacatggacattgcagggttcacccagaaggttgtgtctctagaggcagagctccaggacatttcttcccaagagtccaaggatgaggcttctctggccaaggtcaagaaacagctccgggacctggaggccaaagtcaaggatcaggaagaagagctggatgagcaggcagggaccatccagatgctggaacaggccaagctgcgtctggagatggagatggagcggatgagacagacccattctaaggagatggagagtcgggatgaggaggtggaggaggcccggcagtcgtgtcagaagaagttaaaacagatggaggtgcagctagaggaagagtatgaggacaagcagaaggttctgcgagagaagcgggagctggagggcaagctcgccaccctcagcgaccaggtgaaccggcgggactttgagtcagagaagcggctgcggaaggacctgaagcgcaccaaggccctgctggcagatgcccagctcatgctggaccacctgaagaacagtgctcccagcaagcgagagattgcccagctcaagaaccagctggaggagtcagagttcacctgtgcggcagccgtgaaagcacggaaagcaatggaggtggagatcgaagacctgcacctgcagattgatgacatcgccaaagccaagacagcgctggaggagcagctgagccgccttcagcgtgagaagaatgagatccagaaccggctggaggaagatcaggaagacatgaacgaattgatgaagaagcacaaggctgccgtggctcaggcttcccgggacctggctcagataaatgatctccaagctcagctagaagaagccaacaaagagaagcaggagctgcaggagaagctacaagccctccagagccaggtggagttcctggagcagtccatggtggacaagtccctggtgagcaggcaggaagctaagatacgggagctggagacacgcctggagtttgaaaggacgcaagtgaaacggctggagagcctggctagccgtctcaaggaaaacatggagaagctgactgaggagcgggatcagcgcattgcagccgagaaccgggagaaggaacagaacaagcggctacagaggcagctccgggacaccaaggaggagatgggcgagcttgccaggaaggaggccgaggcgagccgcaagaagcacgaactggagatggatctagaaagcctggaggctgctaaccagagcctgcaggctgacctaaagttggcattcaagcgcatcggggacctgcaggctgccattgaggatgagatggagagtgatgagaatgaggacctcatcaacagtttgcaggacatggtgacaaagtatcagaaaagaaagaataaactggagactctgatgtggactcggagctggaggaccgtgttgacggggtcaagtcctggttgtcaaaaaacaagggaccttccaaggcagcttctgatgatggcagcttaaagagttccagcctctctaaggaggccccgggggtggaggagaggccgtcctcggtggtgagctccctgagctatcggaagcggctcaccctaaaggactccatcgggggcaccggggacgcggattcgctcttcacctccctgagcgagcgggcggcctcccctgagaggccccctaggaaggcccatgtgggccccagggaggagccatgcccaggcaggaagtccgaggagccggaggagtgcggctccgtccgctcggggaccggggggcgcgctggccgggggccgcagaagcggtggggctccgacttcagcccggcctccaccgtctctgcaccggtcagccgggcctcctcggccacgcggcggggctctggcgaagacagggctggctcttccctgagtttctcgctgtcgggctcgcccggttcccgccgcagcacctcccggctcgacagcctctccaggacactcagcccttccctgagccgggcctctggcctaggccgggagagccctgattctcgcctgtccctgggccggagctgcctagaggagtgggatgatggagccagtatggccctgagcgaggcctgctcgcagtacagccacccgtcgctggcccgcagtctgtcggtgccaccccggccacgcagctctgcctcgg

SEQ ID NO: 2834 - protein, 1998 aa, Homo sapiens
MFNLMKKDKDKDGGRKEKKEKKEKKERMSAAELRSLEEMSLRRGFFNLNRSSKRESKTRLEISNPIPIKVASGSDLHLTDIDSDSNRGSVILDSGHLSTASSSDDLKGEEGSFRGSVLQRAAKFGSLAKQNSQMIVKRFSFSQRSRDESASETSTPSEHSAAPSPQVEVRTLEGQLVQHPGPGIPRPGHRSRAPELVTKKFPVDLRLPPVVPLPPPTLRELELQRRPTGDFGFSLRRTTMLDRGPEGQACRRVVHFAEPGAGTKDLALGLVPGDRLVEINGHNVESKSRDEIVEMIRQSGDSVRLKVQPIPELSELSRSWLRSGEGPRREPSDAKTEEQIAAEEAWNETEKVWLVHRDGFSLASQLKSEELNLPEGKVRVKLDHDGAILDVDEDDVEKANAPSCDRLEDLASLVYLNESSVLHTLRQRYGASLLHTYAGPSLLVLGPRGAPAVYSEKVMHMFKGCRREDMAPHIYAVAQTAYRAMLMSRQDQSIILLGSSGSGKTTSCQHLVQYLATIAGISGNKVFSVEKWQALYTLLEAFGNSPTIINGNATRFSQILSLDFDQAGQVASASIQTMLLEKLRVARRPASEATFNVFYYLLACGDGTLRTELHLNHLAENNVFGIVPLAKPEEKQKAAQQFSKLQAAMKVLGISPDEQKACWFILAAIYHLGAAGATKDPFFHSTAGRKQFARHEWAQKAAYLLGCSLEELSSAIFKHQHKGGTLQRSTSFRQGPEESGLGDGTGPKLSALECLEGMAAGSELFTLLVSLVNRALKSSQHSLCSMMIVDTPGFQNPEQGGSRASFEELCHNYTQDRLQRLFHERTFVQELERYKEENIELAFDDLEPPTDDSVAAVDQASHQSLVRSLARTDERLLWLLEEEALVPGASEDTLLERLFSYYGPQEGDKKGQSPLLHSSKPHHFLLGHSHGTNWVEYNVTGWLNYTKQNPATQNAPRLLQDSQKKIISNLFLGRAGSATVLSGSIAGLEGGSQLALRRATSMRKTFTTGMAAVKKKSLCIQMKLQVDALIDTIKKSKLHFVHCFLPVAEGWAGEPRSASSRRVSSSSELDLPSGDHCEAGLLQLDVPLLRTQLRGSRLLDAMRMYRQGYPDHMVFSEFRRRFDVLAPHLTKKHGRNYIVVDERRVVEELLECLDLEKSSCCMGLSRVFFRAGTLARLEEQRDEQTSRNLTLFQAACRGYLARQHFKKRKIQDLAIRCVQKNIKKNKGVKDWPWWKLFTTVRPLIEVQLSEEQIRNKDEEIQQLRSKLEKAEKERNELRLNSDRLESRISELTSELTDERNTGESASQLLDAETAERLRAEKEMKELQTQYDALKKQMEVMEMEVMEARLIRAAEINGEVDDDDAGGEWRLKYERAVREVDFTKKRLQQEFEDKLEVEQQNKRQLERRLGDLQADSEESQRALQQLKKKCQRLTAELQDTKLHLEGQQVRNHELEKKQRRFDSELSQAHEEAQREKLQREKLQREKDMLLAEAFSLKQQLEEKDMDIAGFTQKVVSLEAELQDISSQESKDEASLAKVKKQLRDLEAKVKDQEEELDEQAGTIQMLEQAKLRLEMEMERMRQTHSKEMESRDEEVEEARQSCQKKLKQMEVQLEEEYEDKQKVLREKRELEGKLATLSDQVNRRDFESEKRLRKDLKRTKALLADAQLMLDHLKNSAPSKREIAQLKNQLEESEFTCAAAVKARKAMEVEIEDLHLQIDDIAKAKTALEEQLSRLQREKNEIQNRLEEDQEDMNELMKKHKAAVAQASRDLAQINDLQAQLEEANKEKQELQEKLQALQSQVEFLEQSMVDKSLVSRQEAKIRELETRLEFERTQVKRLESLASRLKENMEKLTEERDQRIAAENREKEQNKRLQRQLRDTKEEMGELARKEAEASRKKHELEMDLESLEAANQSLQADLKLAFKRIGDLQAAIEDEMESDENEDLINSLQDMVTKYQKRKNKLETLMWTRSWRTVLTGSSPGCQKTRDLPRQLLMMAA

SEQ ID NO: 2835 - DNA, 7549 bp, Homo sapiens
gctccatccctgaccgggccgaggctgctggatgccgcgtctccgcttctgctgcctgccgggcgggctccggtggccgcagcaaagtggggcaccaaggccctgtgctaagcactcataatcctctgggggtgctacccctacaaacagcacccccaccatgtttaacctaatgaagaaagacaaggacaaagatggcgggcggaaggagaagaaggagaaaaaggagaaaaaggagcggatgtcagcggcagagcttcggagcctggaggagatgagcctgcgacgtggcttcttcaacctgaaccgctcctccaagcgtgaatccaagacgcgcctggaaatctccaaccccatccccatcaaggtggccagcggctctgacctgcacctgactgacattgactccgatagtaaccggggcagcgtcatcctggactcgggccacctaagtacagccagctccagcgatgacctcaagggtgaggagggtagcttccgtggctcggtgctgcagcgggcagccaagttcggctcactggccaagcagaactcacagatgattgtcaagcgcttttccttctcccagcgtagccgggatgagagcgcctcagaaacctcgacgccctcagagcactctgccgccccctcgccacaggtggaggtgaggactctagagggacagctggtgcagcatcctggcccaggcatccctcgaccagggcaccgatcccgagcccctgagctagtgactaaaaagttcccagtcgacctgcgcctgccccccgtggtgcccctgcccccacctaccctccgggagctggagctgcaacgacggcccactggagactttggcttctccctgcggcgcacaaccatgctggatcggggccccgagggccaggcctgtcggcgtgtggtccactttgctgagcctggtgcaggcaccaaggacctggccctggggctggtgccaggagatcgactggtggagattaatgggcacaatgtggagagcaagtccagggatgagattgtggagatgatccggcagtcaggggacagcgtgcggctcaaggtgcagcccattccagagctcagcgagctcagcaggagctggctgcggagcggcgagggacctcgcagggagccatccgatgcgaaaacagaagaacagattgcagcagaagaggcctggaatgagacggagaaggtgtggctggtccatagggacggcttctcactggccagtcaactcaaatctgaggagctcaacttgcctgaggggaaggtgcgtgtgaagctggaccacgatggggccatcctggatgtggatgaggatgacgttgagaaggctaatgctccctcctgcgaccgtctggaggatctggcctcactggtgtacctcaatgagtccagcgtcctgcacaccttgcgccagcgctatggcgctagcctgctgcacacgtatgctggccccagcctgctggttcttggcccccgtggggcccctgctgtgtactctgagaaggtgatgcacatgttcaagggttgtcggcgggaggacatggcaccccacatctatgcagtggcccagaccgcatacagggcgatgctgatgagccgtcaggatcagtcaatcatcctcctgggcagtagtggcagtggcaagaccaccagctgccagcatctggtgcagtacctggccaccatcgcgggcatcagcgggaacaaggtgttttctgtggagaagtggcaggctctgtacaccctcctggaagcctttgggaacagccccaccatcattaatggcaatgccacccgcttctcccagatcctctccctggactttgaccaagctggccaggtggcctcagcctccattcagacaatgcttctggagaagctgcgtgtggctcggcgcccagccagtgaagccacattcaacgtcttctactacctgctggcctgtggggatggcaccctcaggacagagctccacctcaaccacttggcagagaacaatgtgtttgggattgtgccactggccaagcctgaggaaaagcagaaggcagctcagcagtttagtaagctgcaggcggccatgaaggtgctgggcatctcccccgatgaacagaaggcctgctggttcattctggctgccatctaccacctgggggctgcgggagccaccaaagatccctttttccactccacagctgggcgcaagcagtttgcccgccatgagtgggcccagaaggctgcgtacctactgggctgcagcctggaggagctgtcctcagccatcttcaagcaccagcacaagggtggcaccctgcagcgctccacctccttccgccagggccccgaggagagtggcctgggagatgggacaggcccgaaactgagtgcactggagtgccttgagggcatggcggccggcctctacagcgagctcttcacccttctcgtctccctggtgaatagggctctcaagtccagccagcactcactctgctccatgatgattgtcgacaccccgggcttccagaaccctgagcagggtgggtcagcccgcggagcctcctttgaggagctgtgccacaactacacccaagaccggctgcagaggctcttccacgagcgcaccttcgtgcaggagttggaaagatacaaggaggagaacatcgagctggcgtttgacgacttggaaccccccacggatgactctgtggctgctgtggaccaggcctcccatcagtccctggtccgctcgctggcccgcacagacgaggcgaggggcctgctctggctattggaagaggaggctctggtgccaggggccagtgaggacaccctcctggagcgccttttctcctattatggcccccaggaaggtgacaaaaaaggccaaagcccccttctgcacagcagcaaaccacaccactttctcctgggccacagccatggcaccaactgggtagagtacaatgtgactggctggctgaactacaccaagcagaacccagccacccagaatgccccccggctcctgcaggactcccagaaaaaaatcatcagcaacctgtttctgggccgcgcaggcagtgccacggtgctctctggctccatcgcgggcctggagggcggctcgcagctggcactgcgccgggccaccagcatgcggaaaacctttaccacaggcatggcggctgtcaaaaagaagtcactgtgcatccagatgaagctacaggtggacgccctcatcgacaccatcaagaagtcaaagctgcattttgtgcactgcttcctgcctgtagctgagggctgggctggggagccccgttccgcctcctcccgccgagtcagcagcagcagtgagctggacctgccctcgggagaccactgcgaggctgggctcctgcagctcgacgtgcccctgctccgcacccagctccgcggctcccgcctgctcgatgccatgcgcatgtaccgccaaggttaccctgaccacatggtgttttccgagttccgccgccgctttgatgtcctggccccgcacctgaccaagaaacacgggcgtaactacatcgtggtggatgaaaggcgggcagtggaggagctgctggagtgcttggatctggagaagagcagctgctgcatgggcctgagccgggtgttcttccgggcgggcaccttggcacggctggaggagcagcgggatgaacaaaccagcaggaacctaaccctgttccaagcagcctgcaggggctacctggcccgccagcacttcaagaagagaaagatccaggacctggccattcgctgtgtacagaagaacatcaagaagaacaaaggggtgaaggactggccctggtggaagctttttaccacagtgaggcccctcatcgaagtacagctgtcagaggagcagatccggaacaaagacgaggagatccagcagctgcggagcaagctcgagaaggcggagaaggagaggaacgagctgcggctcaacagtgaccggctggagagccggatctcagagctgacatcggagctgacagatgagcgtaacacaggagagtccgcctcccagctgctggacgcggagacagcagagaggctccgggctgagaaggagatgaaggaactgcagacccagtacgatgcactgaagaagcagatggaggttatggaaatggaggtgatggaggcccgtctcatccgggcagcggagatcaacggggaagtggatgatgatgatgcaggtggcgagtggcggctgaagtatgagcgggctgtgcgggaggtggacttcaccaagaaacggctccagcaggagtttgaggacaagctggaggtggagcagcagaacaagaggcagctggaacggcggctcggggacctgcaggcagatagtgaggagagtcagcgggctctgcagcagctcaagaagaagtgccagcgactgacggctgagctgcaagacaccaagctgcacctggagggccagcaggtccgcaaccacgaactggagaagaagcagaggaggtttgacagtgagctctcgcaggcgcatgaggaggcccagcgggagaagctgcagcgggagaagctgcagcgggagaaggacatgctcctcgctgaggctttcagcctgaagcagcaactagaggaaaaagacatggacattgcagggttcacccagaaggttgtgtctctagaggcagagctccaggacatttcttcccaagagtccaaggatgaggcttctctggccaaggtcaagaaacagctccgggacctggaggccaaagtcaaggatcaggaagaagagctggatgagcaggcagggaccatccagatgctggaacaggccaagctgcgtctggagatggagatggagcggatgagacagacccattctaaggagatggagagtcgggatgaggaggtggaggaggcccggcagtcgtgtcagaagaagttaaaacagatggaggtgcagctagaggaagagtatgaggacaagcagaaggttctgcgagagaagcgggagctggagggcaagctcgccaccctcagcgaccaggtgaaccggcgggactttgagtcagagaagcggctgcggaaggacctgaagcgcaccaaggccctgctggcagatgcccagctcatgctggaccacctgaagaacagtgctcccagcaagcgagagattgcccagctcaagaaccagctggaggagtcagagttcacctgtgcggcagccgtgaaagcacggaaagcaatggaggtggagatcgaagacctgcacctgcagattgatgacatcgccaaagccaagacagcgctggaggagcagctgagccgccttcagcgtgagaagaatgagatccagaaccggctggaggaagatcaggaagacatgaacgaattgatgaagaagcacaaggctgccgtggctcaggcttcccgggacctggctcagataaatgatctccaagctcagctagaagaagccaacaaagagaagcaggagctgcaggagaagctacaagccctccagagccaggtggagttcctggagcagtccatggtggacaagtccctggtgagcaggcaggaagctaagatacgggagctggagacacgcctggagtttgaaaggacgcaagtgaaacggctggagagcctggctagccgtctcaaggaaaacatggagaagctgactgaggagcgggatcagcgcattgcagccgagaaccgggagaaggaacagaacaagcggctacagaggcagctccgggacaccaaggaggagatgggcgagcttgccaggaaggaggccgaggcgagccgcaagaagcacgaactggagatggatctagaaagcctggaggctgctaaccagagcctgcaggctgacctaaagttggcattcaagcgcatcggggacctgcaggctgccattgaggatgagatggagagtgatgagaatgaggacctcatcaacagtgagggagactctgatgtggactcggagctggaggaccgtgttgacggggtcaagtcctggttgtcaaaaaacaagggaccttccaaggcagcttctgatgatggcagcttaaagagttccagccccaccagctactggaagtcccttgcccctgatcggtcagatgatgagcacgaccctctcgacaacacctccagaccgcgatactcccacagttatctgagtgacagcgacacagaggccaagctgacggagactaacgcatagcccaggggagtggttggcagccctctcaccccagggcctgtggctgcctgggcacctctcccaggaagtggtggggcaccggtctcccccacccgactgctgatctgcatgggaaacaccctgaccttcttctgtcaggggcactttccaggctatgggtgtctgatgtctccacgtggaagaggtgggggaaagaggagtttctgaagagaactttttgctcctctgtctcaaaatgccagactcttggcttctaccctgtgtcaccgtgggcagcggcaggtggcctggcactgcatggagccagcacgttgacctccctctcagctccctgctcagggacggtggacaggttgcctactgggacactctaggttgctgggtccatggggaggattgggggaggagaagcagtgccttccctctcgtgtggggtgggggctctctcttcttggtgcctgctgtctttctactttttaatttaaatacccaacctctccatcacagctgcatccctgagagtgggagggggctgtagtggtagctggggctcccaagaacgactcgggaatgtcatctccatcttcacccttcagagagcagtcctttctctgtgcagctggagacgctggtgaggagagccgggtccaggttcttaagaatgaggtgcggaggggctctccggtgctgctgggctgggttgagcaagcctacgcagacaagtgtgtgtgtggaccatccgcacctccagcccccaccccaccctctttgtctcagcgtgttatgtgcaatgacctatttaaggtaaacccattccaactacagcagttcagggctgatccaagcactgcctccctcctgctctgtccaggtggtctggaccataaactcaacttgagagggaaggcttggggttgaggacttgtgatcagaaaaactgaagatggaagttttggccggtgctcattagacatgagtcctcactctgtgtcctgagcccgtgtcattcttccaacctccctgcccccacacacttatcccagacacaacaccatgtggtctggaggtcccagcccccaccctaaaaaggttatccctgagaactccaccagacttgggagcccaagtgcagtgcctggtgctgctcccatctgccgccccccttctctcctgcaattggtttgtactcactgggctgtgctctcccctgtttacccgatgtatggaaataaaggcccttttcctcctggctgcgccagt

SEQ ID NO: 2836 - protein, 2036 aa, Homo sapiens
MFNLMKKDKDKDGGRKEKKEKKEKKERMSAAELRSLEEMSLRRGFFNLNRSSKRESKTRLEISNPIPIKVASGSDLHLTDIDSDSNRGSVILDSGHLSTASSSDDLKGEEGSFRGSVLQRAAKFGSLAKQNSQMIVKRFSFSQRSRDESASETSTPSEHSAAPSPQVEVRTLEGQLVQHPGPGIPRPGHRSRAPELVTKKFPVDLRLPPVVPLPPPTLRELELQRRPTGDFGFSLRRTTMLDRGPEGQACRRVVHFAEPGAGTKDLALGLVPGDRLVEINGHNVESKSRDEIVEMIRQSGDSVRLKVQPIPELSELSRSWLRSGEGPRREPSDAKTEEQIAAEEAWNETEKVWLVHRDGFSLASQLKSEELNLPEGKVRVKLDHDGAILDVDEDDVEKANAPSCDRLEDLASLVYLNESSVLHTLRQRYGASLLHTYAGPSLLVLGPRGAPAVYSEKVMHMFKGCRREDMAPHIYAVAQTAYRAMLMSRQDQSIILLGSSGSGKTTSCQHLVQYLATIAGISGNKVFSVEKWQALYTLLEAFGNSPTIINGNATRFSQILSLDFDQAGQVASASIQTMLLEKLRVARRPASEATFNVFYYLLACGDGTLRTELHLNHLAENNVFGIVPLAKPEEKQKAAQQFSKLQAAMKVLGISPDEQKACWFILAAIYHLGAAGATKDPFFHSTAGRKQFARHEWAQKAAYLLGCSLEELSSAIFKHQHKGGTLQRSTSFRQGPEESGLGDGTGPKLSALECLEGMAAGSELFTLLVSLVNRALKSSQHSLCSMMIVDTPGFQNPEQGGSRASFEELCHNYTQDRLQRLFHERTFVQELERYKEENIELAFDDLEPPTDDSVAAVDQASHQSLVRSLARTDERLLWLLEEEALVPGASEDTLLERLFSYYGPQEGDKKGQSPLLHSSKPHHFLLGHSHGTNWVEYNVTGWLNYTKQNPATQNAPRLLQDSQKKIISNLFLGRAGSATVLSGSIAGLEGGSQLALRRATSMRKTFTTGMAAVKKKSLCIQMKLQVDALIDTIKKSKLHFVHCFLPVAEGWAGEPRSASSRRVSSSSELDLPSGDHCEAGLLQLDVPLLRTQLRGSRLLDAMRMYRQGYPDHMVFSEFRRRFDVLAPHLTKKHGRNYIVVDERRAVEELLECLDLEKSSCCMGLSRVFFRAGTLARLEEQRDEQTSRNLTLFQAACRGYLARQHFKKRKIQDLAIRCVQKNIKKNKGVKDWPWWKLFTTVRPLIEVQLSEEQIRNKDEEIQQLRSKLEKAEKERNELRLNSDRLESRISELTSELTDERNTGESASQLLDAETAERLRAEKEMKELQTQYDALKKQMEVMEMEVMEARLIRAAEINGEVDDDDAGGEWRLKYERAVREVDFTKKRLQQEFEDKLEVEQQNKRQLERRLGDLQADSEESQRALQQLKKKCQRLTAELQDTKLHLEGQQVRNHELEKKQRRFDSELSQAHEEAQREKLQREKLQREKDMLLAEAFSLKQQLEEKDMDIAGFTQKVVSLEAELQDISSQESKDEASLAKVKKQLRDLEAKVKDQEEELDEQAGTIQMLEQAKLRLEMEMERMRQTHSKEMESRDEEVEEARQSCQKKLKQMEVQLEEEYEDKQKVLREKRELEGKLATLSDQVNRRDFESEKRLRKDLKRTKALLADAQLMLDHLKNSAPSKREIAQLKNQLEESEFTCAAAVKARKAMEVEIEDLHLQIDDIAKAKTALEEQLSRLQREKNEIQNRLEEDQEDMNELMKKHKAAVAQASRDLAQINDLQAQLEEANKEKQELQEKLQALQSQVEFLEQSMVDKSLVSRQEAKIRELETRLEFERTQVKRLESLASRLKENMEKLTEERDQRIAAENREKEQNKRLQRQLRDTKEEMGELARKEAEASRKKHELEMDLESLEAANQSLQADLKLAFKRIGDLQAAIEDEMESDENEDLINSEGDSDVDSELEDRVDGVKSWLSKNKGPSKAASDDGSLKSSSPTSYWKSLAPDRSDDEHDPLDNTSRPRYSHSYLSDSDTEAKLTETNA

SEQ ID NO: 2837 - DNA, 67582 bp, Mus musculus
  misc_feature (1)...(67582): n = A, C, G or T/U
tgtagagggtacggggctgcgatggggaagagattttggaggctgcttagaacaaggatggagaccaaggctaagtccactgcctcccacagctgcttgtggtggagtgattcggaatgccaccactggccgcattgtctctcctggcttcccggggaactacagcaacaacctcacctgccactggttgctagaggctccagagagccagcggctgcacctgcactttgaaaaggtctccctggcagaagacgacgacaggtgaggagctgtcctgcctggacggggcaacctgttgggaggatagcaaccacagagctgcctctcttctggtccaggctcatcatccgcaatggaaataacgtggaggccccgccggtgtacgactcctatgaggtggaatacctgcccattgagggcctgctcagctctggcagacacttcttcgtggagttcagtactgacagcagtggggcagctgcaggcatggccctgcgctatgagggtgagcctgctggagcctaaccagggtgctaggctctttctcccatactcttcccctttccgactgcattccattgctccttccctgacccacccccacccccatcggagatccccatccccatcctttcgggaggcatttgttgggaccacaggtttctgggccaagagaatgacttctccaggttttaagagagttacatataggactcaacacttggagggaaaactgctgtacaaggtactctagacccacacatatacccgtggtttgttaacgcatcaaaaagtattgagcaccttttgtatactaagctccaaactagccaacaagagtacaatggtgattcaacacggcttcctgaccaaaatagagttggatgtccggttcccctgcgtcctgttccaagcccaagatacacattctgccctgagaaagaaaagcccccaggagagatgcagaacacctgtcctctggcctactcaggagaggctgagctggcctgggtcctgtggttcacagccttccagcaaggacattgctatgagccctttgtcaaatacggcaacttcagcagcagtgcaccgtcctaccctgtgggtacaactgtggagttcagctgtgaccctggctacaccctggagcagggctccatcatcatcgaatgcgtcgacctccacgacccccagtggaatgagacagagccagcctgccgaggtcagcaggcaccagtgggtgggtctgctagggcaacaagcagggtaggtccctagtggccagccagggccacagctcagtgtgattgatatttctcctagagggaggaggtggggtcccccagcagtgggtggggtacttctgtgggcaggtgaaagccctaggacaccatattggagaggatgcgccttcccgggctccccttccttgcagccgtgtgcagcggggagatcacagactctgcaggcgtggtgctctctccaaactggccggagccttatggccgagggcaggactgcatctggggtgtgcatgtggaggaggacaagcgcatcatgctggacatccgagtgtgagtgactcgggtcaggcaagccggctcctgagactggggacacctctagtcccgcccacctcgacccctcccccagcccctcccgctctgatcttcctcctctacaggctgcgcataggctctggggatgtactgaccttctacgatggggatgacctcacagcccgggtcctgggccaatactcagggccccgtggccacttcaagctctttacctccatggccgatgtcaccatccagttccagtcagaccctgggacctcggcgctgggttaccagcaaggatttgtcatccacttctttggtgagcttgtgctttctgattcggattgtagacccccaaatcatgactagtcaaacggtgcaagacaatagggagtctggatgccctgtcagacacggggaacctgggaaggtgccatgtatcaccaggagactttggttagagcaagaagctctagggaggcagagaggacttccttaaaaaaaaaagtgtcgctgctttcctttctgctggtctttccctcatcctgctttgcccatctctcaggcctgaggaactggccaagtgcttctgagagtagagccaaagccgagatgacaaccctggaaccttggtgatgggtgtgtgggggtgtgtgtggagacttggggtctggggtgtggggcttgagaagagaggatgagtcgctaagcctctctaggccagtctaggtccaagataacctaccaaaagaacctcagggttggcactagcagtcactttgatgctggctgaggaggggctccatgtccctgcttctgtgtctccagaggttccccgcaacgacacatgtccagagctacccgagatccccaacggctggaagaacccatcacagcctgagctggtgcacggcacggtggtcacctatcagtgctaccctggttaccaggtggtgggatccagtattctcatgtgccagtgggacctaagctggagtgaggacctgccttcatgccagagaggtgagtgtgcctgtccccgtggcccctcccagcccgcctcctgggtcctgagagaaaagtctagcactggtcctgcttttgctagcatccttgatcttctaacttgtccctcagtttccttatctgtcaaatgggatgctccattgtcacaagacttccagataagcattacaagtatctcctagctggctggtgaccaagaattaatggctttcttgaccttaatgatcaaaaaaggacacatcagccagagggtagacacagtcaggcatggtgtgtcacacgcctgtcacctcagcattcagaagctgaggcaagaggatcaggcctttgaagattgcctgaggtatagtgtgaggcatttatctccaaagaagagggtggagaggagatggctgaatggctaagagcgcttactgctcttgcagaagacctaggtggttcccagtacctacatcaagctgctcacagcctcctgtagccaatttcaacacccttttctagccttaatgagtatctaaatgtatgcagtacatataaactacacagaaacacagacacacacacacacacacacacacacacacacacacacatttttttttaaagtaaagaaaggccgggcatgcctttaatcccacaacaaacaaacaaacaaaagtgaagaaagcaaaaagcctgaggatgtagcactgtggtagagcaccacctggcgtgcatgacatcccagcactgcaaaacaaaacatcagagtagagccctacagtctggtattagctggtctgtaacactcatacagcctgggtgaaaggacctttctccccaccccctcgctctcttcccctcccccaccccaccccttgctctcactccatctctgatagtgtttctagcctgaagcgcctacaaaactgaggattccctagaatttctgatcctcctgcctccactttcttagtgggatcacacccaccttctggagtgccaggatatcagcgcgcaccaccaggctgggtttatgcagtgccgtccattaaacccggggttccgtggattctttgaaagcactcctacgaactgcgctgtcgccccagacactgagcctgccctgctttccctctccatccgcagtgacatcttgccatgacccaggggatgtggagcacagccgacgcctcatatccagccccaagtttcccgtgggagcaactgtgcaatatgtctgtgaccagggttttgtgctgacggggagtgccattctcacctgccatgatcggcaagcaggcagtcccaagtggagtgacagggcccccaagtgtctctgtgagtgtacagtgggcaggaggggaacctctagtaagatcaaaacctgacacctcgattgctgcctgcctgccttgcagtggaacaattcaagccgtgccatggcctcagcgccccggagaatggtgcccgcagccctgagaagcggcttcacccagcaggggccaccatccacttctcctgtgcccctggttatgtgctgaagggccaggccagcatcaaatgcgtgcctggacacccctcgcattggagtgacccaccacccatctgtagggctggtaagtgctacctaccactcccttaaacatgtgccccctccgctgctgctgccaccaccacagtccggaccctagaactattctagtaaatcaattctgtgttgagaattagaagcattggcccatgccccttcccattccctgtctttgctagtctctgatttaacatcaccaagacactgcaggagtaggttctccctggtcaaatccttcccatgatcagtccacttctgtgctccttgcattggatagtttggtccatcaggctcacccactgcccttggccctcccctcttgttccagcctctctggatgggttctacaacggccgtagcctggatggtgagtccccatgcttgagagcgagatgtatggtccccccccccccacacctggttctagcagctcccaggtcatgggttcccacaaatgaaaggcagagaaggagcagtttgggcctgtcggggcattaagcttcttgtctaccataggcagctaatgggagctggtctccaaatgtctttaagaagggaggggacataggttccaagaaatggggatattaactctaaccccacccaccctttgctttcagttgccaaggcacctgccgcctccagtgccctggacgctgctcacctggctgctgccatcttcctaccattggtggccatggtgttgctggtgggaggagtgtacctctatttttccaggtgagtctggcttttcttcctattctgcgtacccaactcactcctggcctgtactcctgactcacaggctcttttgtcccctgacagattccaggggaaaagtcccctgcaacttccccgaactcatcctcgcccctataaccgcatcacggtagagtcagcatttgacaatccaacttatgagactggagtaagtatccacgtgagcctagatacctcttcaggactggttccttgatcccttgggtgggtatgcctgcctgagggtcctgctgagccctcttattttcctctgtgccttgggaaggtggataatttgggcttgacagctcttctccaagtttccaactccccgcagtctctttcctttgcaggagacgagagaatatgaagtttccatctaggtgggagcagcctggggatgcacacgcagtcctgcatcgcaggccagcggcagggctcccggctctctgctgtccctcacctcctgtacatactgcctgggaagagacaccaccaaccccttccccgcctgcaatgcccacagtgacctattttcttggcaccgctgtgcccacttcgggcccttctttggattcaggggcatctgcctcgggtagaacgtagctgggacacattaccagcagccatcattctcctgcttctcttttgccctggacctccagcctggaagttgcaggctgactgaggaggggcacttgttacacatggccaccatcctgcctggcatgtgaggactccaggagagctgacttgacagcagggtgcccctcacagggccagctaccagaggccaaaattgttctcaactgtgacctcttggtagtcctggcgtgccaacaccagcccctcagggaggtttctagtccctctctaaaggctcagaattggacagttaagccttctgccctgtcctgggaggtgatgatttaagaatcctaaaaggttcagggactctattccaagctcaggctgggccccactggatggatactcacgctccacaccaaagcaggacaccctacggctctccggcatccctctactctgaggagggagagcccttccttgaagtttatctggctgttacaaatgtctccttccccaccagtccctcctctgagccacttaccatgttcccccttcctgccactgtgttatggcatgccaggagagggcagctacattctggagaggagcagatgtccaaggacccaggaatgtggcagaagtcaagaacccccaggagcaatctcagtccggaccgaggccactttgtacatatgatgtattatatggggtctgggctccagccagagaacaatcttttatttctgttgtttccttattaaaatggtgttttggaaaaaaaatcaagcagtgtgaatggtggtttctcggagggaagggaggtggaagatgaatgtgacgtggaccggcatgctgagaccctctggacgcaccaatcaaccatgcccggattttatgacagaaaagatgtcatctgtagttaaatgggtaacactgcctccaaagacgttagtgttacagatggcaggtgaaatgagaggtcccagcggctaacgctgtagggatgtgtgagctcagtaaccccaatgcctcatttcctcctctttgccagggctagggccacatgctggcccagccccaaatccctcttagaaccactagatcgctgacaaaacccaaggttggaagcactgttccgtccactttttcctgttaagcgaagcttgagagattggaatcagaatcatagactgaacccttgtacataaggcctagcttgccttgacctcagaaaacatggagattgtaagcaggaaggatgggcagctcagaggcccctgagacaggcaagagccctgcccatgggctctttaaagtgactgctgaaacatacatacaagtaacattataaagactcagcagagccaggcgtggtggcgcacacctttgattccagcactcaagaggcagaggcaggcagatttctgagttcaaggccagcctggtctacaaagtgagttccaggacagccagggctacacagagaaaccctgtctcgaaaaaaaaaagactcagcaggttgtacttgtgtatttagaaatgtgtatatacatataaatattcacatatgtatgtaacaattttaaaagatgtcatgaacttgaaaaggagcaggaaaggatatatggggggagttgaaaggagaaaaaggaagggaaatgatttaattatgttataattaaaaaataataattaaaaaaattgaaaaaaaataaaataaactgcatggtggtggcacatacccttaattccagcactcgggaggcagaggtagacaggtttctgagtttgaggacagccagggctacatagagaaaccatatctcaaaaaagccataaaatacaaataaaggaaaaaaatttaaagtcatgactggccaggatgcacttaaatttgccccttccctatgtcccctaaagccttctgagatgaatgtatcttcccaggagtcagacaacagaaaattacggcactcggaagctgtaagacaaaaatccctgaaaggaagactagcatccactagcatcttctgcttctacagtcttcagcggaaagatgtggaccagaaattcctcctagcctctatcccaagtcaaggcgttccaattcgttcatagtgcaatgcctagatggaccacaagaggtcgattccagaagcatttccatcccagcagctctctttcttgaagtcccctttcacaccctgagctggagctctccaaggtggcaccaagtcctgtcccaactaggctgacctcctcctcaggctccaagagaaaagtgtgtggagtgatttgttcctctgtcaacagagccaatctcattttcctcactatcccactgcccgctcctgttttcagctgcaatggatgtgttgaccaaagcacaaagcctcactcatggggcgtgtgccagtggcttacttctctgtccagtaatacctccaggctgacatagcagcacagctgtgctatggtagtaggaaggaagccagtaaaagagggcatatgaggttccagcttctgaggttatgtagcaggaaggaggcataaagcctggcttcttcccttcaaggagcctagctcagctctctcctctgagagtcacaccgcagttctttcctatagctgctagtctattgttggccatagcaacggaagagcagccagtttgcatgcattcttcacttccccataacgttattctttctaggcactaatacagggccgagagagagagagagagagagagagagagagagagagagagaggcagagagacaaagagagagagagcactaaaacttcacaaagcactaaaacttcacacagatatttatatcccctttgacttacagtcctgactgtcctaaaagaaggagcaatagtttctcagagacagtaaacacggtgtaggggacaaagtctgacctgtgaatcaagaaatgtttcctttttaggtttgctataaactcaatatgcgtctaagcaaaccactctccactctgtacctggaaatgaagaatttaaatcaaatagtctctaagtccctcccaggtttacgggtctgagaataatgtgtgtagtaacataaaaatgagtttaggagattccaggcgtagtagcacacgtcgatcccagaaatgggaccggaggcagaagcagtcggatttctgtgagttcatgacctatctagtctacataacaagttctagggctgcggagtaagactgtcttaacagaacgaacaaacgaaagaaagaaacggcaggacatagctgcatgtcaccagtgttaattaatgcctagtggggttcattcattcgcaattaggcagagtatctgtccatattggaaagtgataacaagggcataacagcgcacacccaaagagaggtatgtctctctgctcagaatgcgaggtgaggggctcaaactacaaaccccagtgtgcaatacggcagctctcaaaagtatcctttcccggcaggcttttcttcgtgtacatcctatggtccagtgcagcgcctgaaggctgaactacaactcccacaatccatcagatccatcgcgagtctaactaccagagtgcaaagcggtcccgttcaccctttgaactctgcgcgttgcaagatggggattgaagtcagctgtaggcaggtagctgggcgttgtcaggattacggactgtttgggcttttgacttcctctttcggagtagttcacagggacagtggttaagagagggtaagaacagcttgaaatatcttgggttccatcgggacccaaggcagcaatgctcgtgctaaaattaggtgctgagagtggaaatgaagtggaaagagcagtcatccgatctgccaccaaaagcgtctttttttttttttttttttgtcgcaatgctttttttttccctctttaccaatatggcggcctagtccagacacacctgacactggagacaaacagtccactacaccatccatatgggtactgctgcagccgaaagctaccagctccatacagcatcccacgctcctccttggtcgtgactgaggactccaagggcatggtagccccaaatctcattaccaaaatggcgaaaggagaagctttttttttttttttttttttttgtgcaggcctccaggtacaacgcgcctgcgcgtgaggcggctgtgtgaggggacgggagggtggcgacccaacacgcctgcgcgggaccagagcccgtggtccgcacacaaacaccaatgggtgatgcgtcttccagttcctgcggctgcgccgtgacccctacgcgctttcccaggcgcctaagcgaggcctcaggttccgccctccaatcgcagtacgccggcgcacggcggagaggcggggcttctgggctccgggcgaatgccagcgcggctgcgcgccggggggtaccccatcaccgcggctgcgcgggagccaggccgccggctgtcactgcggttgcgcgcggcgagcggcgatcccggggcgcctgcgcgggtggctttgcgggcgctcgcggtaagtttgcgccaagtgcgcggcagccgggacgcagacggcagcggcggcgagaggcggagcccgggaccaccccccatcatcctccccagagtcacctcacgaaccacaacctcacctaacctctcacccccccctccggtcccccaagcccgggatggcagcgcccgctagccttcccggccggaccagcggtcgccagcgccagctttagcctgtgggcctaggcccccgccgaggcctgacccccggagccgggatccactgtgcagccagccgctgggccggggctgaggggttgctcccctctcgcggcccgtggggaggacgctgccgtcccagggactgggggccggggggtgggggggagccagggcgaggaagtcggaacctgtgttgggaagagagaaggggaccgggggtcagagtgcccccttcccctcctcccccctccccccggggctgggggggccggagcagagagcgcccagcccgagaggtggatgaatgtgggagaaaatggagaccaagacgatcgtgtacgacttggacacgtcgggggggctgatggaggtaagagtggccctcatccttttccccccagtgccaggagggtacctccgccccacaaagccggccctaagctcgaagcgccagagggccgggaaaagggggggttgttcttcctcacccagtctcttcctcccctctttgcaatttgggggactgagcttagcttccgaggacgtctgcagcagtttcacctaccagccgccctcgattcgctccctgaggcttcagcccactccatttcattgcaccggcaggcctccccacccccttcttgtcggcccctttgtgcttccccctgcacgtccgggtaccaagcttcgggcctctcccgagccgggctttggagtcccccactgtccatacaaggaagtggcaagaagagaaccgcgcaccctctccccatccccctaccctggtcctccccatttggaaggagcttttcttgttgtgctgcaggaacgcagttagggtgggctccccttgattccggggaccgagaggttctggaagcagcctggatgggaggaagaaggacaaaagggggaagaggggtgggtgacggagaagcggcgccggtgggactacgggctacccgggagctccgaatgtgcacacatgccgtctgtatgtgtgtgcagcaaatccaagctctgctggctccccccaagacggacgaggcagaaaagcggagtcggaagcccgagaaggagtcccggagaagcggcagggccaccaaccacgacagctgcgatagctgcaaggaaggtggggatctcttgtgctgcgatcactgccctgccgccttccacctccagtgctggtaagggctggggacccctttggagccccttggcagaccctactcagcacattccttcaccaggcctgtagaaataacgggagcttgcagccgctagccgactctctagtcgctggggcgagcgcctctgcgcccttggtatttgccgggatccggccaatttgcgggaaggagcagcggcgtgtcttgaccccgggatgggggttgggaggagtgaggtgagccccatctgagattggttgtaggttgggagccgggactgagcggccgagtgcggccggcggcggcggcggcggcggcggcgggggaggaaggggaggagctccaggtccagtgccgcttggcggccgcgcgcgcccgccgcccttagggctcctgcctggctgggctctccttgggcttaatgcgcggagcctcggccacccagttaaccctggtcctgactcaggagagcgggtgcttacgatggtgcaggaaatcatgaatggtgtctctcaagaccacttctctgcctctgtgtttacaatatggcgacctgcctttaaattatatttttattctcagcgccattttggctgcatatatgatttgcaaacgtcttcgggagaacggtggaggtagcccatgagccctttctgcagaagcttcttgaggaccagggctaggctctgcaggcttgatccctttctctgcatcttgccccctgttgccactccggtgctgcctccctcctcccccttccctcctccctactccgctgctgcctcttaggaaatcgggccgggttagacaattaaaattgcccttgggcgccgatttctcttctctgctctggttcagcgagcccttcgcctcaaaattctttgctgctggggcaggattgtgttcggtggctccggaaaggcagttttaagcagctgagagctggaaagctgtgagctctcccaccccaactgaagggggtgggggtggggctgggttgatcacccgctgcgctgcttgatccttctcagccgctcagcccagagcactcctgcaaaagagtttaaactatcttctgccagaagatcacctttctgccctgcacacaaaccccacatctctactttgaacccagatagcctcttgttctgttcagcaacagttgacccgaggctagtgcttgggagaagatggctcctggggtggggtaggggggttgttcgttcccattctgattggaaaggaggggttcctgttctttgttttgtgccgccctttttagcttcttgtttttaaaaaggtgtatgagggctctctcctcagttccacctacattccgaaatcccttggtttgtgtggaatagagcctgatgtatttgtacttagatggctgatactgggcaaagtaggactgtggtcagaagttatgtgggacattcctatttctaactccaagacacttttgcttataagggcaccccaccttggcttttaatgtttcaaggacaaaagttactatcctggaggaagctttgccgctggcctttgctttttttttttttttttttttnnnnnnnnnnnnnnnnnnnnnnnnnnnnnnnnnnnnnnnnnnnnnnnnnnnnnnnnnnnnnnnnnnnnnnnnnnnnnnnnnnnnnnnnnnnnnnnnnnnnnnnnnnnnnnnnnnnnnnnnnnnnnnnnnnnnnnnnnnnnnnnnnnnnnnnnnnnnnnnnnnnnnnnnnnnnnnnnnnnnnnnnnnnnnnnnnnnnnnnnnnnnnnnnnnnnnnnnnnnnnnnnnnnnnnnnnttgacttccaatctatgccaatcattcctgcctgggtctcctgaatgctgggattacaggtgtgcaccaccatggcccagcgcgctcactcgtgcgctctctctctctctctctctctctctctctctctctctttctcttttttaaagtgttggctaatattacctctatggtggagtagttgttaacgaagattggtaactactgttgaatgaacatttgataaactctgttatctttttttttaatctcaatatttaataatgttgaaactgtttaataaaagtctgaagcatcttaagagcatttgctacacaatcaggaggaacagagtttggatttcagtacccacacagcaacctggggtgtctggcatagcccattaagtccagcttgggtggggggcagaggcacgattattggcacttaactagcttctaaccttgttgggatctgtcggtccaggtcatagcttagctgagaaaacacccaggttatggagaaactgcctctgaggaataggcagagagtaacccagtgccttctcacttcccaagctcagcacacctgggacacacgtactcacacacgtagacacatactttagttttagttttttaaagctacttttatttattgaagggggggcgtgccatggagcacaggtggaagtcagaacaagagttgattttctcttctactctggttcctagggattgactcaggacgtcaggttgtcctgtttggcagcaagtaccttcacctcctgagccatctttctcctaatataaataaacctttatattaaaaacaacaacaacaaaaacaaattgaggaatggagagtgtgctatctttttgcctcagcttttaaactctaaagctgaacactgagtcttctgagatgagtgtagagcttgtcaaggccttttgtttttgttctagtttttttctttttatgagtacattgtcgctgtcttcctcacatcccattacagatggttgtgagccaccatgtggttgccaggaattgaactcaggacctctggaagagcagttagtgctcttaaccgctgagccatctctccagccccagagcttgtcaagttttaactatgttttttgttttagctggagggaggggtctctagttgttggggagactcaggtttgctcaggctctgcgtttgactatttccccctttttctgagattatgaatgggtaatgagattggagaacagtagtaactgaggtaggctttgttttactgcatcagttctccctgaaggtgtcagtactgagagtaccactgacttacctgagttagtctctaagtcataaaacatttctatgtctcagtgaaaaggcaggaagccttttgaatgagaatctcctaggtgctttcattttataagcgaggatttcccccacttttgtgttttttttcagccagagttgtgaggtcaagcagttaatatgtgagaagatttttggttcctgggtgtgttttcctgttactacttccttgtatggagaaggttgaatgcagctgtgttcctcctgtctctttagaacacgctgagacgacattacttagataagcatagtaatgatagtgtcccttatgtacagagtgtatgacaatgagtaaaagctatagcagggcggtggtggcgcacgcatttaatcccagcacttgggaggcagaggcaggcggatttctgagttcgaggctagcctggtctacagagtaagttccaggacagccagggctatacagagaaaccctgtctcggaaaacctaaataaataaataaataaatacataaataaataaataaatagttctatgagatgactgagtacaggtttgcctactggagacccagccttctaaaggatgcagctagaagagtgaaaattccaagtttgcctggtctgtgtggggaaacaaacaaacaaacaaacaaaaaacaagcaaacaaacaaaaggtcctttgtctggatttttgcctgcctgctttatggtaatcagtatatattaaaaagtcccagaaagctgggcgtggtggcgcacacttttagtcccagcannnnnnnnnnnnnnnnnnnnttccaggacagccaggactacacagagaaaccctgtcttgaaaaaccaaaaaaaaaaaaaaaaaaaagtccctgaaatggttcttttggtgggatggtactgggaattgaagctaatgagggcctggttaatcttctgcctcagtttcccaagtagccaagattataagcctgaaataccaagcctagacagaggtgattagtaggcaaaccttatctcttgggcttgacacaacactaaaccgttccttatgataggaaaggactgctcacaccttgcttttgtcctaccttttccctcagggatcagtgtactgtggaaaatcattctggttaggatctttctaggttttctttcagttatgattctctgaattaggaaataagttgtgctgtgcctaatatcataacctcagagtgctaacaggagttaccaagcctggccctggagaactggaaggttttcaagtgtttgctggcgaccctgaccctgtcatcacagtggtgtataaggtgaaccttctgaaagttttctctgaataaattgatctctagaaatttgttaaaaagtaggataactgagctggagagatccctcaggagagatgagtactggctgcttttccagaggtctggagttcagttcccagcaagaacaggatggctcacaaccatctgaaactagttcccggggatcggatgccctcttctggactctgggcagcagcaggaacacaagtggtacatataggcaaaacacatgaaataaattttgacgttactggtttcactttttggagacagggtttctctgtgcagccttggctgttctggaatccacgctgtagatcatggtgaccgcaaactcagagatctgcctgcctctgcctcccaggtgtggggattggaggcgtgcgccacttaatttttaatttaaaagataatgtaggctaactggtagagctttagatgttggtgatccatctttctgtttgagttgggaaggattattgtcaccacaaaacagcagtaatgaggtgcctggaaagtgacaggtttcttcttgaacttcatggaattttgcctcaaacagacggaccaaaatggtgtgattgagaagtgcattcaccttggcagatctcagcgtggtcccttcctgtcagacagatttctgtagcatttgcctccgcgtgttatatttggaattgttggccggctttcctctctctggtgttggcagcaagctctaaaatgaggttttcgaagaataagagtggaaaggtctctgtgcgcaggcagaactgagtttggcttggagttttgtgtgtttaatttccggtgagtcatgatgatgtccacacacaacagcatccagaagtgttccgtcttttgctctaaacctaaagaattttcagcttttgttgtgtttgcctcattggacttatagccaaccagtgaattaaaatacatggaggttttttgattggttggttggtttattctggtttgtttatctcatgaatttgtttttgacgtcctaagcacctgaagaactataggtaacagtggttccttttcctcactctcctgggaactaagactatcgcacaacaaataaacctaagttggttttatagtattttgtttattatttattgtaacaattaggatctagtgtttatagccattcacttaaaaatggagagtccaacttaagatgaacttcataatgcatgctttctgacttaatatggggcttggctataaaatcttagatgagtgattagtacaaaaataaaagatgttcattatttaataatactagaataagggaagggtgtatgtatgaggtggcttagcagttaaaacatttgctgtgttagcaagaggactaagttctggcccccactcccccataaatggcaagtggttatggcaggtcacctgtacttccagtctaggaaggtcagacacaagatccctagagcaagctggttagcaagctggctttggtgaatttgacggaagaccctgcctcaaaaaaaaggttgaggaatccaggaagattcctaagtccagtttccactgcacactcatctgcacacacacacaattcaaataaggcagagacaggagactcagcacaagcttaaggcaaggctagtcttacatagtgagaccctgtcccaaaatgggggttgggaggtaaagattaagaacactagggctggagaactggctcagcagttaagagcactgactgctcttccagaggtcctgagttcagttcccagcaaccacatggtggctcacaaccatctgcaatgggatctgatgccctcttctggtgtgtctgagtcactgtactcaaataataaagtaaataattctttaaaaagaaaaaaaaaacactagtgttcttcaagaggcaacagtatgtaactccagcctcaggggctgcaatacccttttctggcctttgacatcaagtgtgcacatggtactcaaatgcacatgctgactaaccccaaaacaaatcaaatcaggtgaactttttaaagtaataatttttggtatatttgtgggccaaatggtttgagtttaaaaggaaatagcagacatattaaaagtagtacaggaggtaagttctttgtcctgtgacaggctgtgttgtcttctggtgctgggatcaatcctagggccttttccctagccaagtactttattacctaactatatcctagcccaggtgcttggttttgtttttgagaccaggctactccatataggcaatgctggctaataactcaagattcttttgccttagttacgttactttagattatggacacctgaaaccattcctggctagatgggagtttttgtgcaaatcagtggcactgttttttggttgttttgttgttgttgttgttgttcttttaatttctgaaattaccatacttaatgaaaaggtgggccgcagttatgacctcacctgtcccgtttgttcctcgagggtctcacagtacattacagatgtgctccaccaacacagagggcagcttctgactttgtaaatgtcttctgtattttttccagacataagtatacaaaagatgtatttagatctaccttaatttaagtctggagataagattcttagtacatggtgtaaattcctaggtggacctccagtcgtgttggtttgtttttaagacgtttcaagggaatgcccaatgacttgtctagttagcacagaaaggaaattcaggtagtcagcgctgatagtgctgctggtctcagacacctggaactcccgcactagaaaggtgaaagtggtggcataactagtctaaggccagcctgggctacaaagccatggaaaggaccggtgagaggtaggtgcactgctgctatatattgaatgaacatcacttctgagtgaagtataagtggcatgtgaaatgactccaagggagtcagcgttttcaggttcatcgctgtagcatttatcagcgcttaacaatatttgttccactatatagattaccaggtttgcttacctatatgtcagttgctggatgtctgggttgtttttccttttttctgttataaaagaatggggctgacagtatccgggcataatgctttttgattgtgttggtttgttttttgttgctgttgttgtttgtttatgattttggtttttcaagacgatatttggccctaggtgtcctggaactctagctgtaggcaaggcaagtcggcctcaaactcagagatcctcttgcctcggcctttggagtgctgggattaaaggcccagctaggtatacgtttttaggtgtgtagatgttttcatttctcttgaatgtgtacctagaagtggaattgttggattgtgtgctaacacgtgtttaaccatccgaggaaatgctgggcagctttccccagaggcacaagagatttccagtttcccatatccttcataatacttgttattatctgtctttgttaaaactaccctaggagtgtatcaagttttaatgtgtgtttccttaatagctaatgacactaatcatctttttctgtacttgctggagaactgtctgtacagacttgctgtccttatttgttgttggacttttttctctagccgccaccgccgccgccgcctcctcctcctcctcctcctcctcctcctcttttaattgattttttttccccaaaaaacttttggcaatacaggggatggaacttaagactttacattctactttcatagctacgtctcaactgttattgttactgtattatttattggactataagagatacaagtccttcttcagatgtgtggtttgcaaatgttctcttgttctgttgggtgtcttttcactttttcactttccttattgcttttctttgtgtgtatgggtgtccaggtgcccaaggaaatcagaagaaggcctttagagagagagagagagagagacagagagacagagagagagacagagacagagagagagagacacagagagagtgagagaatatgaatttgaacagggaggcagggttattacactcagctaaataaggagatatagaaatcaaggaggcaggttcgacagtctttgggccgtaaacatcttggatagaaaaatacagagaacattttttgtacaaattttgaacatttacacttggagcagaggaaagttttgctgtccctctgagctttaccctgggaaaactttgtcactcctgtggctgaggcattggggtccctgacatggctgtgctcgtgtcagtaagtacacatgcactcagaacttcactggctctctacacttgacttctatctatgccacatacatgtaaggggagagaaccagttgtattgcccccaggacagagtctcttcatgtagccctagctgtcctggaattcactgagattctcctgcttcggtctcccaagtgctaggattaaaggcatgagccaccaccatctggcttagagacccagttcttttttttgtcttctgacctccatgcatgtacacccacaaatcaatcaatcaataaataagtgtatgtatacacacatatgtatacatacacacacacacacacacacacacgtatacatacacacaaacagtaaatgaatatgtgcatgtgttttggtttattatttatttatttatttattatatgtaagtacactgtagctgtcctcagacacaccagaagagggtgtcagatctcattacgggtggttgtgagccaccatgtggttgctgggatttgaacttcggaccttcggaagagcagtcgggtgctcttacccactgagccatctcaccagcctggtttgtttatttttaagtaacacatctcaatgaagagagccttactatgtgttttgatttaaaactgtttccgtatttctgggtgactgctagcaacaaaggctaaggctaggagttagaatagagggagtatttggtagactgattacctggctagcatccataaaggcttaggttcagttcccagcaatacctagacctgtatgtacacacctgtgatcccagtgctcaggcaggaaggttgggagttaaggcctgatgacctaagtttgatccctaggaactgcatggcaaaaggacaaaaccaactcctacaagctgtgctttgacattcatatcaaggaaataaaatagcatgcatttgcttctcccctcaataacaaaataagtataaaatttttaaaaagaaaaacccaacaaaaccctactatctgttgtaggcagaatacatgagtatttctcttggagttttaagtgtttaaggttttctcatttttgttcttgtctgtgtgttttgcctacacgtatgtctacaccacatgtgtacagtacccatggaggccaaaagaggacatcaagatctgcgactgggtttataggtgatagtgagccacttgatggggctgagaaccaaactataatcttctagagtagcagtgggtatgcttagtcagagtcatctaattccccaaaaggaaaaatttgcatttatctatttatttattaattgtaattttatgtatgtatggctcttttgcctacatatgtgtctgtatatcatacataggtcagaagaggacagcatatcttccagtcctggggttagagagagtggtgtaagttatcatgtaggtgctgggaatgaatttaggtcttttggaagagcagtcagtgttctgaccactcagccatttctctaccctgaagaaggaaggttttacattgctttagtttgattgataaaagcttggggtggaaatagctccatgtcaagtaatgctgtgctttttgaactggttagcaagagccaagtcgtttgtaccctgccacacactcacttgtttttacatagccttatgagaacttaggcagtaataaataaggccaagggtagtaatgatgcctgtaatgtcaacacttaggaaggaagcagaggcaagaggatcatgtcaggtcaaccctggctacatgagaccttaccttaaaaaagaaaaaagacaaacaaaaggatagtaaataaagagaatgcagagaatctttgcctgaagattttatgtagctcatagagtcagaatttttgctccttgacatgacatcctttaaagtatgtatgtgtatgtgtgtgtatatgtatatatatatttttttcatgtatataaatacactgtagctgtcttcagacacaccagaagagggcatcatatcccattacagatggttgtgagctatcgtgtggttgctgggacttgaactcaggacctctggaagagcagtaatgtgacatccttttaaaagaaatgacttacatcctcttcttttgcaaatgacaaaataataggaaatagatggtacttaatgtgtgcttttgattatgggtgagagtgttaaaatccatctgtgaacttggctgtgtctctagtgtatgcacacttccttggatgtgtgattaaatgggcttctgaccgctcttaagttattagtacaagcttcttaaaaccagtattgggtttttgttttgttttgtttaattaagggaggggaggggtgactcttgccaccttgggtagaagttagaatacaaccagcacataggtcacaggaatcaaactcaggttatcaggcttgatggccagagccttttgcctaccaagccacttttccagccctatttattattcttgcttaaaggtgccagatttccaacccaacagaaagataccactgcctcctcctttgacttaaaggcccagggagtacaccatgaccagctaactgcattagcatttaccacaggtggcacttataagaacacttctacataatgctagcctcccaagagacacgggacaggagtacagctgtcaccttgccagtttcctgaaagaggaggacattgtattcagtacaagtcttagaccaaatttcaggaaggcactttggtgttactgattgtcactgtgcccaggacacatgcacaggtcacttgttgactggtttcccatgacttgtaggcagctaaagatgagatgatgtctgagttttcctgcctgctatttccagctatcaaaatccctgtcttttaaagcctaaggttatttccaaatctaggtctcagcaaatgagaacaaagatgaggttttagcacatctctatggtaggaaaaattgaggagcgagataggagaaattattgattttaatccatcagtaagaaggagctgaattcaccattatggagaacagttgttacattcccagtaagcaaattccaaatacatcttttagactgatgtaatttcccaagtaatgaaaaacttactactctgagacctcttcctccatttatggttgcattgagtgaatgttcacaaaagtactggagagccatggcctttcctccttgctcctgcatgatttcaaatgagaggcatgcaagataaccactggcaggtatgaatgtatttaaaaggtgtctagttattcttgccccagctagctcccagatgaatgaggtgaggctgagactattagttttacttaatcaaacgtcacctcacaatacctgggcagtaattgatctatttttattctctaaaataatttggctagagtccctaagatgcttgtattttattattagtctgctttctggacttcaggtgtgtcatcttattgtgtctctcccagaccccttcctcatggctgaatcccccctcacttctctctctgtctcttccccttgcctggttggcggaagtcgcactctattctctcttctgcccagcctttggctaactagttttattgacaaggcagagaataaatgatgagcactgtttacataaacttgaaacaggaggtatttggaataaccattacaatgccatgtccaaattgcaacagataggatggcagagaaatcagcattttaataacactgactgttcttcaaggagtcctgagttcaaatcccagcaaccacattgtggctcacaaccatccataatgagatctgatgccctcttcgggtgttctgaagtcagctacagtgtacttatatataataagtaaaaaaatctttgggctggagagagtggggcgagaatgagcggggctggtgtgagaaaaagaagggtaaaaaaaagaataatctttatatagtgcacaataacattatgcctacaggcagggaaacagaaatgttttatgagttatgctataggaatggtaccttattttattttattttttggtttttcgagacagggtttctctgtatagccctggctgttctggaactcgctttgtagaccaggctggccttgaactcagaaatccgcctgcctttgcctcccaagtgctgggattaaannnnnnnnnnnnnnnnnnnncccccccgccagaatggtaccttaattaatgcaaatgtggcagttcctttcctctagaaacatttgctttcctaaaatattggtcactatgaaaattaattccaccaccacgccttgtctgtttttcctgaaaaattacgcgggacgtctcgtaggaatgtttcctagttttgacagcataaaatagcagtgaagtgcccgagagctggagagcagcggaacctcacactcttcttcccctgatgttctctgtgtgaggttcctttaaaaccagcatgaatgagggagagaagattctatgggtttgattttaaccacagccataggacctcacttaactcccggccaggcagtaggacctcccaaacttaacagacgtaagttctaggtagaacccagcttgcagcaactcctgaatctcaggttttcactcagttttgacctacacaaggatgttgaatattatttttctcctgtcttttttgtgaagagcagaaaagctaataaatacagaggactttgggtgagatgagatgcggtcctgtgttttatatatatatttatagatagatagatagatagatagatagatagatagagatatagtcaggtaacaggaacccacccacgcttggtttcctctccactactcgtgagcttctatcatacgctgggagtttttaaattcccacttctccaaaccatcagctagagttctactgatcccctttttgaagcattaacaggaaccttaatggtgaactttttcagtagaaaataatcagttactggtctatgaaaacttctttccacttcactaagtgtgtctggaacaggttgttgcatatgcttttctttgattgtgtttggtttttttttttttttgaaagagcatcatcctcttaaatggttgtagggagaattctgtcactgatttaagttcttgaatatttgctttgttcagtccttcctctgtggccttcctagtttcacctgcatagccattctttacctgctgatagaagaactaactggctcattctgttccatcaaacagccgtatgctaggaaagtgtatgcagtttaaggtaaatcattcattttagcatatactaagcttatatgtttgctgcattacttaaatttatatatgcacaaattgcccagaagtgggccaaagggaaaaacatggctctatctctgagaaatgtgttgaacttctaactaggtcactagaggtataactggaagggtttggaggcccaagttagcacttagctgtggtatcaaaccataacagcatagcctgacagcatgcccagagattacttcagtccgaaaggatggggagctttgagagttagtagaattggggggtagggagaagttggaagtaaaggaggagggaatgagcctgactctatagggccttcctcctttgccagagtatggtaaatgaagcagagatctctctaatattaagtagaaacttaactgcctaaattaaggtttttggtggtggtggtggtggtggtcttattacaatgtgtgtgtgtctatgcacacatgccaagatagaaggattgccacaagtttgggaccagtcacggctatatgtataatgagaccttatagcaaagaagggagttggggggtggggggggcaaagaaaaaaaaggaaagggaaaacacattgttcatatttgtagttttctaggccttagtagaatttacatccagtattaatacctggcccagactgctgagttgtttcagtaataaaagtgtgtgaaggcttataacagaaacctagaaatctgaggtgagaggattgccacaagtttaagaccaacctgggctacagtgaggctctgtctcaaacaaaataaaacaaaaaatttgatatagtagtccttggttctagttttccatacctctgagacacttatggaatatatagttgttcttcctgacagaatgttctccaggagtattagaaaactactgttgaagccagaatgttgaccctgaacaaagttagatagaatgcagttctaccaggaggtgaagggtaaagccccctgtaccagtgctgcagccaacgcatcgattacaaagaaggaagactttccacaacagccaggctggcaattgatccagcctgtggtactggacccatcacgtagcaaaggtagcagagacaaacactggccagcctctagtactcccctgcctcatcccttcctgtgctaatttgtagttgctctccaggtgccctctgctaggagggtgccagctctgcccaaaaaacaatagaacttgggggcacagttagctgcctggaaggactgcatgcctgtacaagtgacacagctcgcaaacgttctcaatggggcatttgtagttgcttggcacttgttggtttccttgttagcactgtcactgggcctttgcatttgtacttttatgtactttgtgccattcgctatatttgagtgagtggttaggctaaagtaaagaatcattattctggcacccattacactttctctatatattctttgaggtagccattttctttgccttggaagtgcaggctatatttgaagataaaagccattgcccacagtgtccagcagaagcttgctggttttgctgatacttaaaattcattaaattttgttcccttaaagtatataatattacattttgataatgtctgtacattatttgataatgtctgtacattatttttcgtttaatattttttaagatagttggatggtggtggcacacgcctttaatcccagcactcaagaggcagaggcaggtggatttctgagtttgaggccggcctggtctacagagtgagttccaggtcagccaggactacacagatcctgtttcggaaaacatgtttatatatatatatgcttattttataagtatttatatttattgtatggatacttctatgtaatatgtacattcctgaagaaggaatatcataagttcaagtacagtgtcaggcctgaacacatagcttagtagtagaacacttgcaaagcattcctgaggccgctagttttaggccccagtatcactcaaagagcagtgggaatgtaaaaatgagaatgaacagccctgggctacgttaatgagatagtgtctcaaaagaatttccctttcttatataagatatggtctcgtgtaagccagcagggcctagaactcattatatagccaagggtgatcttgaaatcctcatcttcctgcttctgcctcccaagtgccgggatagcaggcatgcatcactgtgtgtgctttgattcttttttttttttttttctttttcttttttcgagacagggtttttctgtgtagccctggctgtcctggaactcactttgtagaccaggttggcctcgaactcagaaatccgcctgcctctgcctcccaagtgctgggattaaaggtgtgcgccaccacgcccggcttgctttgatttttttttttttttttttttttaaatagctgcctcaaaaggcaaaggcaggtagatcgcctgagttcaaagccagcctcaaaaaacaaaacaaaaaaattagctgggcacagtcacacacacctttaatcccagttctcaggatacagaggcaggtagacctctgaatctgaattggagggtagccaggccttcacagtgagatcctgtctccaaaaaaaaaaaagtattaacaattgtgtgatatatatgagaacatgccatgtcacattcatggaaaataggacagcttagatttagattttccttctttttttttgttttttgttttttgttttttcgagacagggtttctctgtgtagccctagctgtcctggaactcactttgtagaccaggctggcctcgaactcagaaatccgcttgtctctgcctcccaagtgctgggattaaaggtgtgcgccaccacgcccggcccttcttttttaaagatgaaaaaaatagtttacgtttatttatgtgcatgagtattttgcctgtgtgtatgtatgtgtaccacaaatatgcttggtgcctgtggagacaagagggggtcggatcccctagaacagagttgtagatagttgtaaaccaccacgtaagtaagtgttgggaaccaaacctggctcctctccagtggcagtgagtactcttaatctccaagctgtctttctgggttcaaaaggcttatttttagaaagatctcgaggtcctcatatagattacgatggctgctgtgtggttgaaatatggttgtggttttatcagcaatcactgtgcccttctttttgggtatggtgtcactttttgagctagcctagggcagcagcatcagtctgaaagtcaacctgttgtgaacctgttgtaagctgtattgtcctttctgtggttttcatggcgctgctgagtgtaattaggggattttaatctgctagtagacctcaaatggatacatgagactcgtgaactatgaaatgaaaaatcaaaactgcttacttagtgctgctatttacaaggcaagggtgtacatactgtggggaatcctcagaatcttctctgggtctgctactttatttcaactgaaattgttataaatagcctagaggacttaaatcttggtgattgatagtttctgacagaagggaccccaccagctcatgtgactggcctcttacacaagctcaggagagagactcttggtctgttgtatacagatagtgtttgtatatttagtgtgtctgttaagtatttgtattaaattgaatattttatcaatctacagagaaaatggggtggtttttttttaatattttcatccagtttttcttttgttctgtgatatataccaacagctttggttaagtgagatttttcattttttttcaggctgccactgactccagttttatgtcactgtcacttagatggatggatagttgcaagccacacatcagtgattgcacttttctttttttttttttttatctttaatgtctagatctgaacaccagtttttaaaaatctgcctgttgtaatacaaagaaaggatctctgaggtagaaggccatctttctgcttcgctgtctccctttctctctcctccctttgttcttatgttcccctcccccctctcttccagttccatattgaaaaactgcttgtgctgggtggataattagtgtagtgctatggagcaacaggtcccactggtggtgactagtctggagtaaatgttaatgttgtgcaggttcacatatgttaataggtcaggtaaatgcatgtagttagactcagatcaatgacactggcataggacttgaaatagatgctcttaattagagagccaagaaccatggcaactactaacatcttccatttgtggtggtgagctacagcctcattagagaaggaaaggcattctaaattaaaactggactccattctctggctgtaagttgggatcatctggaaatggactttgactcttacagaagtctgctagtataagcatcgcagtaagggatgtctgtagttttctctatttggcagacattctcatcagtagtggagatggactgtttgaatttgctcctggaagtttagctatgtgggagtcacacagcagaggttggctttaagaagtattattttagccaggtattagagcacatgtctctagagcacctggtaggcagagatagatagagagatggctcaggggttaagagcactgtctgctcttccaggggtcctgagttcaattcctagcaaccacatggcagctcataaccatccataatgagataaggtaccctcttctgacctgcaggcatacatgcaggcagaacgctatatatataataagtaaatcttttttaaattacttaattattttatatgagtacactgtagttatcttcaggtagaccagaagagggcatcagatcccattgcagatggttttgaaccatctgggtcctgagaattgaactcaggacctctggaagaatagccagtactcttaaccattgagccatctctccagccccctaaataaatcttttttttttttttttttttggctttttgagacagggtttctctgtatagccctgactgtcctggaactcactctgtagaccaggctggcctcgaactcagaaatccgcctgcctctgcctcccaagtgctgggattaaaggcgtgcgccaccacgcccggctaaataaatcttttttttaaaaagcatctggagctgagtgtggtcgcctacacctttaactcaggcaggtcaggctcaagccatctcatgccccaggttactgggatattgttgagagggggttgaggcaaagcctcactgtatagtccaggctgacctcaaactcacaatgatcattctggctgcccctagtccctaaatgttgggattgcaagtgtgatctaccatgcctggctttgaaggtctttttaatcagaagatatgatgatgataatagaggagaggcttttttgaaatagcctaggctctcctcagacttgttatgctcctgcctcagttcaatgagtattgtttattataggtatatgccaactctggaattgttttagatcattcttccaaaaacgttgaaaatcaactgaatcacaaaggatgcctagcaaatatatcattgacatcttggtggaaagtctaagcctataccaccatgtcttgttctctgccttctgtgtttgatacagtgtatcttagcatggtgccagcagatgggtggaaaggataatggagacaggagtgccaggcttcagggttagtgacattttaggacagctgctagagcatttgcagagtcagcaggccttcacaaagaatgcttgcctgtctcattccttagatatggtctgtttagaaatgtgggggaattagggaagaatttacaggtgatgtttacctgtggtcccaacaggctactttgtcactagtttctgtttggtggactgcctccacaaagatcccactaagaaagcggaaaggaaggaaacagtgagctaggaaggaagggtgagcatctgacaggtataccatggccagggaccatggcaaggttggtgtgcagagaagttaccaggccaaatgcccttagaggtggtgtgtgtttgtgtgtgtgtgtctgtctgtctctctcccctccatatttctcatattttcttagcatcctaagtaggtgattcctaagaaccaaaggcaggaatttcctgagtgtgaacatggatgtaaccttgttccatatagcatggttttcagcctttggggttcagcggaatcaccttaatggcatgccttttacacagattatgaaattctagagtctgctttttccttctttttctttctgggaaagtaaagagcaccaggattgaacttgctgtatagccaaggatgacctttaacacttgatcctcctacctccacctcacaagtcctgtgatgtgcaccccatacctgatatatgtgtgttagaccagtactctttttttttttttttttttttttagatttactcatttattatatgtaagtacactgtagctgtcttcagacactccagaagagggagtcagatctcgttacggatggttgtgagccaccatgtggttgctgggatttgaactcctgaccttcggaagagcagtcgggtgctcttacccactgagccatctcaccagcccccaagaccagtactcttatcaactttatcaatataaacgatcgactctatcaatattcccagtctagaatttacatttctaattccaggtgctgttgttgaactgggaatcattcttttagaatgagatatctgttgtatgaacagtataaatatgacacttttggaaattgatgaaatcttaatgtaattttaatgaaaaatcaacggcctacaaagcttgagttttgggttttgtttgtttgctctgggattgcctatattttgaagcagagtttcattcagccgaagttagtgtgtaatttactgtgtagcccaagctggcatcaaaatcaaaatcttcctgccttagcctcccaaattctggagttttaggcatatgttatcatgcttaatctagctctattttaaattcagtcttcatttattataaatgcaaagaggcaagctagaaattctagatggctttgagttgagaatgcatgccgctctttcagaggatctgagtttggttcccagaatttatagtaggtggctcacaactgcctataactctagctccagggtatccaacaccctcttctagagtctgaaggcacttgcactccatgcacatacccacatatgagaaaaaggaactcaactatttagcaggaaacataagattcatgagtagtgtagaaagagctggtggaaaagccatgtccaataatcattaatgtgtaataaactaccaaaactcagtggctcaaaacagaaagtagttatctaaaactccaaggcttgaactgggctcagttggctggttttctgttgtgtgtgtagtaggccaggaccacagttacttggagtctcgtctgatctggtatgtccaagatgattcatagcagtagttggtacaacctgttggaattcagctgaagctgttggttggagcacttcagacctccttgatgtggctttcttatggcagcagagccctgagatagaacattctaaacatagaagattggaatctacaggttgcttaaggctcagacttgaacgttacagtgtatcgtgtctgttactactgttgtcaaagcaagtcacaagataagcctaattcaggaggagggcaaaggactgtttgcggctgaagacagaacaaagccatgaggcttgccacaggctgccaagagcacgccttgagagtggatagctttgaaggggtacagatttcctaccagaatgttactgcaagaaaaatggcaaatgttgaatttaactaggggcctgggtacctgaggaggcctgccgggttggaatgggctgtgtgacaaggttctgaagcacagggagaagagactaggcttagactgaggacctcttggtgaggcatatatatagacttgggaataactcttctggctctcaactagtgtttcatgcctttttctgtaagctcagtgtcaatagctgtgatttggcttctctttctaagatgtggaaggaatttttgcccgtgaggtaattataaaggttgttgaataggcattttgaaggacatgaggactctagcagcactccagaactggccacagtagtagttgagggacgtgcagtttgtgccagatctattttcagctgcatgcaagggttagattagttacttagtcttgccctgtcttttccccacagtaaccctccactgagtgaagagatgttgcctcctggggagtggatgtgtcaccggtgtactgtccgccgaaaggtaatgctgctgctttctgaaggcttcacacagagtgccagagttagatcactggcactccacagttaaggtagtttggtcctatgggcattgcatcctcatcctgtcttgtctcttcagacactggagtcaccacacttgttccatgttaactatatggcctaaaactccagacgtgggatgtgaaaaagggccgagggtttgttaacccaccgagccatgtttagtcactagtaacagacagtctgatcttattgccctcttaggaaatagcctggagctgggcgtggtggcgcacgcctttaatcccagcactcgggaggcagaggcaggcggatttctgagttcgaggccatcctggtctacaaagtgagttccaggacagtcagggctatacagagaaaccctgtctcgaaaaaacaaacaaacaaacaaaaaaaaaaccaaataatctgaatgtggcgtccttacctgtagctctaaaaaagaaggctgcttcttgctgggttcctggacctccagaggcttggtcagttgtattagttagaggagtgggtttgaagtatgtgcatgactcattattttctattttgaagttttttatggagaacaagagctaaacttacatttatcactaaaggaagtaggagctgggtgtggtggcatatgccttttgtcccagcacccaggaggccagcctgcctgggctacacagaggaaccctgtaggggaggtggtgttgggtaggtgtgtatccaccagattatattgatgtcaccttcacattaagagctatagattataattttatctatactaggctaccctgttatcttcccacaacagttgtataaccagaaatttcttttcttgtgacatcactgttgtcttcttggtcccaatatgatgtcacagtcatcaattgcacaaatagaatgagctgattcagagattgtagcttatgtatgtaactgttttcaatctttaaaaagaaggtgaacaagcaggcattagtttccattgtatacacaatggtttccattagaaagcaagccagagccaagttagccactaaccagagctgtatgtagtttgatttcacctaaggtctaaaaactaggctatctgtcaagctacctagccttcaaaaccctttcctgtgagtctccatagagtgtgacctgtctcagtttagaaactgatcatgcaaagaagctagactctaaagggttgagatcagccaaggaagaaaggtaaaaacttgctagtgcccgtcatatgccaggtgttctactgtgactccacttaatccatgcagctaagaatgctggtagtagatcttaattatggagaggaagaaactgacctacaaaatacagaatattttcccaaagactcaatggaatggacagctgagattggaaccaaactttatctccctctaaagctttcaagttctttggaaacagtgtggcttggtaggttatagtacactgttttctagcataggtcatttttcctgagatgctgctgtaactcatagacctccctgcctaatggttccaactcttcctttcccactatcagcagcaccaccaccactcccctttggcccccagtatttacagtgaaatggattgaaatacacatcttctggacttcgtgagctgatgggtcagtccatgcctcttgtccatgcagtcctctttattgccaccacatccctaagaggagaaagattttagtgttttcactaatggagaagtttctgaattgcccaaggccacactaactgggtattagcatgatgacacttgtttggttttagagtcttggaagaaaatatattgtcagttacccagtcctactaaacacactgtagttttttccacttcgtggcttctaaggagtttgtggttaagaccggaagccatatttcatggccaccatgcttctccattggttctccccacgtggcacccttccatgccaacccctctgagaagtgagctctccagcctgttcaacctttgcagattttcttcattttgagctgttttccaaacctttcagtagcatgatgctctaagcaagtgacagtgaccttagctcacaatacgatgttctgaccttaatctcactaaatgtgttcttactgtatttagttttttagctgcttgccctgtgctttaatatgtatagaaatgttaagtattatatttttcaaacattccacactatttttggtgatttcattgctgccatgttttctcattttagttcagttatagctggaaagctcagcagttaggagcactggccattcttccaggggacctggattcaattcccagcacccacacggcagctcacaactgcctacaactccactttcaggagatctgaggccctcttctggcatttgtgggtattaggcgcatacacagcgcaagggaaaataccagtacatacaaaataaaatttcaattttaataattgttatgtgtaaggggctttataatttttataagtgatctagtaagacatatagccatctctgttttgttcttttcatgatggcccacctattcatttgcgcagaaacgagagcagaaaaaggagcttggccatgtcaatggactggtggacaagtctagcaaacggactacatcccccagcagtgacactgacttgttggacagaccagctagcaaaactgaactcaaggccattgcccatgcccggatcctggaaaggagagccagccggcctggcacccccacatccaacgccagcacagagacccccacctctgagcataatgacgtcgatgaggacatcgttgacgtggacgaggagccagtcgcagcagagccggactatgtgcagccccagctgcggcggccttttgagctgctgattgctgctgccatggagcggaaccctacccagtttcagttgcccaacgaactgacctgtaccactgcactaccaggttagcgacatcatcatcataaccctctcttaccctggcttcccaagggattactactgcccgtagccagttttttgttcctgttcctgattttgcctggagaagcgcatcaaaggttgtaattgttatagtacttattctgttttctgagtcgtctatctcctatcttgttattcccctgcatcttttgttttctgtttaagatatatgccaaatatcacacaccagtaatcttagcacttgtgaggataaagcaagaggatcatgagtttgaggccagcctgagctacctatctcaaaaacataggaggatttgagaaggtggcccaatccttaagaacactggctgcccctgcagaaaggactgaggtttagttcccagcctttgcatagtgattcacaaccatcaatatctccagtttcaagggatcttctggcctttataggcaccaggcgagcgcatagtgcacatgtgtacttgctggcaagcattcatattcataaaagaataaatgaaaaaaaaacttaattaaatagggggctagagcagtggctcagcagttaagggtacttgttcttggacttccagaggacctgagttccatttgcagcgcccatataaggcagttcacagctgtctctaaatgcagcctctggtttctgactcctagcctatgcaggcacctgcacgcacatgcataatcccacaatccacatggagatacatatttgtacataattacaattgttttttagttcttttttgttttgtttttgtttttcaagacagagtttctctgtgtagccctggctgtcctggaactcactctgtagaccaggctggcctcaaactcaaaacctgcctctgcctctcaagtgttgagactaaaggcgtgtgccaccactgccctactttttagtacttaaataaataaatgaaacaaagtttagggatgtagttaggtgatagagcatctccctaccatgcacaaagtcctggatttgatgctcagcatctcctgccctttgcagataaccacaaattgtgtgtcttgagagtatgtgtataagcaagtgtctatacatgctcgtattctcttcttaaataacataccaaaaaactgttctaatatttgggttttttatccttacaatgcattctagtggttttaacattaatttagcattttattaggtttttgttatagcaccataataatccattgtgtaaatgtaatcaaaatgatttaaacagttttctattcattgccagttaaattgttcctaatattttctcatttatttatgtgtatgggtattttgcctgcaagcatgtcttgtgtaccatgtgtgtaccttagtgcccacagaagccaaaagaagctatcagacagagtcctggcacaggagtcacagatgtttgtgaatcaccatgttagtgctagagattgaacttgggtccttggaaaaagcagccaggcctttgagctacctttgcactatctctctagcccccttaagatatgatctatagggctgatgtgtatggtaaattcctaatattggaattgctaggtcacagtttgcagtgggaggtttgctagctattatcaaattgtcccttttacaaagaaaatcaagtctacttgatagcatagtgcttctagatcttaatttctcttcctagagaaaatgagattggttgagcatggtgtctaccatacacctgtgttcctatcatacatgcttggatccttgcatttaagaggcagaagcagaactgtcaagagtttagagctagcctgagctacataatgagttcttggccagcccgggctacagagtctcaaaaaaacaaaagaggactaggaagatggctcaagagtaaagtgcttgccgtgcaaatgctggtgtttatatattcagagcccatgtcaagccgggtatggtagtgcatatctttttttttttttttttttttagatttatttatttattatatataagtacactgtagctgtcttcagacacaccagaagagggcatcagatctcgttacggatggttgtgagccaccatgtggttgctgggatttgaactccggacctttggaagagcagtcgggtgctcttacccactgagccatctcaccagcccccggtagtgcatatctttaatcccagcactcaggaggcagaggcaggcagatttttgagttcgaggccatcctggtctacaaagtgagttccattccaggacagccagggttatacagagaaaccctcttgggggggggggggggcataacagcttgcctataatcccagcctgtgggaggctgaaatggaggaagcttgcagctatccagacaaactaatatggtaagcgctaaaggaagtgtctgcctcaatcaatgaagacatctgacatctaccttatgcccacccacccccacacatacatacatacatacatacatacatacatacatacatatgtgcaaaaagaacattggcaggcttaaaaattacatataagccaagtgtggtgtgtgcctttaatcccaccatgggaaaatcaggaaaatagatctctaagattgaggcgagccagggctatgtgagaagaaagggggggcagtgggtgggtgggtgggtggatggatggatggatagataagcctatcaggctactagcaagttagttcatgtgataaaggcacttgccatggaagtctaatgagtttgattcctggaaccccataaaagtgaaagtagagaaaagttaccttctgacctttatgcacgtgtatactatgtgtgcacccccacatgcttttttttttaaaaaaagacacatatagttatgcttactgttgcacgcctttaatcccagcacttgggaggcagaggcaggtagatttctgagttctaggccagcctggtcacatcagccaggactaagagaaaacttaccttatgtcagagtgggagtgagggttgcatatggcatctgctttctatagaaacataattaaattacagtcttttgcttagttttcttcacagtctagtccttgttaaccatgtaacttagatgtgtgtatgtgtgtgtgtgcgcgaacatacgtgcaggtttctactatcagagatttctcattattttatattagtgaaatcaatatttctgccacaaagcaggtgacttctatttcctggttaccttgtggtctttctttcttactgtctgtctgtctgtcttgtctgaaccatggcacatgcttttgcttagatctgttctttcacttaatattttcatatttcaacaaggaattctgaagccaaggacagctcagcaccaccagcttcttttctaggttctagcaaacggagaagaaaggaagaaaccacagggaagaatgtaaaaaggacacagcatgagttagaccataatggtcttgttcccttgccggtcaaagtctgcttcacatgtaacaggtattttttttcctctgtcaccccttgtaagtcctgtgtgttaattaaatgtggacagcttatattctaatggtattagcacacagaactagttgactggccacttcttgaatatgtcaataacaaattacctgtggagtcaaagaattgagccagatatataatacattcctataatctcggcacttaagatattgaggtggtttggggagttcaaggctagcctaggctcacaaggcttcccccttccttgagggattctcaattgatggggaagtagtgccgtttaacttaatggtatcaccactgaagagtccatgttcattatgtaaccccctaccctgatttaaacccagtgggtcagaactcgttgacatggaccacagggtaaaggctcttgtatcatcacaacctgaacagaaggacaaaaccaactttggcaagttcttttctaacttatacatgggagttgtggcatatgcacacacatacaaacacattcactaaataaatgtaaaaaaaaaaaaattgtaggattaaactcaatcccacacccataaaagacatgaaactcacgggggcttgttgggggaagggaagggctaagagggtaacaagaggtgaacatgaccaaaatttattatgaaactgtggaacactaaaccataaaaagaagttgggtttggtggctcacacctttgatctgaaaggcaggcagattcctatgagttcaaggccagcctggtctacacagtgagtttcaggccagccaaagctacatcatgagaccatctcaaaaaggaaaaaaaaaaaaaaaagaaagccacagatcccagtacagtacattgatggtgattgctgtaagttagagttagacttaaactggagggcgagaggctgatgagatggtcagtgggttaaggtgcttgccgcaaagccttgaccttggttttaatccagagggcccatgtggtggaagaagactccatccctaaatgaacacatggcacatgtacttttcctccttcccaatacacacacaaaaggtttctggctttttttttttttaatgaggtacttagcaaaatgttaaacataaattttaaagtgttataggtatctgtccattccattgactacctacaagtaagtttgtataagtttgttatacacagctgccctaggacactagtttccttcagataggctcacctcagttataggagccagatgtttcaatgcctgaaactggaattgttggcttgagtatatcaggaaaactgtactatggttggagcagcctagcaggagaagatgcttagttggcatcacagaaacccaggatggtggtacagacagctatcccagcactcaggcggaggatgcaggaggggcaggcattcagagtcattcttagggatatagtaagttgaggttacatgagttggcttcacaaccatcgcctcaaccaaaaaaaaaaagtattcgctaggaaagctatggaaaactaaatggcatattagaatgagaagctctgagctctggcactagtacagttttgggagcactggtgtttgctgacaagctctctttggagtgttctcagaggtgcacacaacattccttgcctccatctccacttatcagcactggcttctttttatacagaagggaagttgtttgttctgtagttacaactccagaaagactgctcatgcattattcttttcacatttgtttgtatgacagacgatacacaattgccacaacataagtatacagatcagaggacaacttgaacaagttggttctccctttatcatgggtctgacgaattgaactcagcaggcaggcttgttgggaggtgcctcttgttgatttatgtatttatttttaagtgagaattccttaaagaacaggggcagagagcggagctgagtactaagcattggtcatttttgctctaacagctactttagccgtactccaaacatttagattcacaagatacattcttcgtataagataaaataatgaagaacctggttttcatcttccttgctgactgagtgtgacagagcctagagggagggaagatggacaggacaggctgtgaggactgactgaggaggaaaggatctttttagagtagaatggtcttgaattttgccccagaaatcacccatcacatctcgttcctctgcaggagttgtcgagtggcccccctcatccagtgtgactattgcccgcttctgtttcacatggactgcctcgagcccccgctcactgccatgcccctgggcagatggatgtgtccgaatcacatcgaacatgtggtggtaagcacactagtgtttagtgagctctctacaggcccagctggagcagggaccaatcccctagaaacagtaacatccccttgtgcagagctcagtataatcttgcaggtgctgggttcagcagaccatcctaattatgcttggtttatctcccctgcgcatcttgcctttccccagtaccttcttcagctgtacaggcaggcttgacttgcttgcttataatttttactccacagtgaattaaacaattgctattatagccatagagactgagtattagagccaaccttaaaaaaataaatggttggctgtcaggagtccgtgtggcccatgcgtccagtgagtttgttgccctcttgcattagttctttataacgaccctgtgtcagtcatcctgggtttcagtgagttgttgaatggcacctttatacactgagccatctcacaggctctcttcagacactgcttcctacactagaacagatctgctctttgcaggacagatagtccttctatacagtcacccaaaaggtcgtagagggcaacttcatgaaaaggtattccctcacaaaaacagcctttccaaattaaaccattggtgcttacgacatacagcgggggagtagaggtgtagctcagtggccgagcacttcgaggtcctgggctttatccccaagacagtgagtagaagggagacggtaacagccatggagtgactgttagcattcattataccatgagcacttcgggaaacttgctgtcaaaagtcactctcaaaaggatggagagtagaggagcagagtgtttgattagtacagatgaagctctggcttcattcctagtactgttgctaagacatgcacgcagacacacgcacacactgtatgcatacgctgtgcacatacagaagaatcacttcctatctcaggtccataccattcagagagactgacctgggaagaagctgcactgggctctgtgtcatatttgcttcctgctgaaacagataaaaaaaaaaaaaagaaaaaaaaagccataaacagttcacccaaacactcgtcctaaggagcagcagtggagactggctgattttattggtcactttgctatctaggaagttgcaggaatgagtcttactgggctgttctaaggttctaagtctttttgtttggttggtttggtttggtttttttggaataaggattctctgtgtagccctgtatcccagaacttgctttgtagacaaggttggcctttaccttgtagagtgctacctgcctctgcctccagagtattagtattaaaactgtgtaccaagatttatttttatcaagactagagagttgacttagcagttcttgcagaggattcatgttcagttcccagcacccatatggctgctgtctataactccagtttcagggtatccagtctgcaggcatcatacatacatacaggcaaaagattcatacacataaattttttttaagttatgtcatttttgagatggtcatattctgtagcccaggctagctagtagatcaggctggtcttaaactcacaaaggtctgtctgtctcagctgcctcccaagtgctgagagcaaaggctcgcatggccatacccaacatagagtaataggctttttttttttttaattattaagattcatttttattggtgagcatggatgtttgtctttgtgaatgaatgccacatgtatgtaggtgacctgaggggacagcagtggagggcatcagacatcttagaactgcatacaagtggttgtaagccacttagcatgtcctctggaagagtggaaagtcttgaccttgagccatttcttatccagaccctgtcttttgaaataaagtatagggggccaaatgtaacagaggagatgggaagtgtcaagtctccatgcctccctcctctccctttgacctttaagagcaggccagagctttctcccttcaagggaagacataataaatgaggtgagctcagcaatgcttcctggtaccctagaacaggaatagggcagaacacacaggattttgattcagtgtgagcaaggcatctatgtaggacagctttttctgtgagagattgacttgatgggcagggtgtctggttctttggcttttacagggccaagatctacatcttctttaactctgtgctgctaggaacaatcctgatgggttgctctgacctagcgtatggtcagactaaatgagaaggcatttccaggctacttcactttcgtaactcacaaaagcaggtgtttccttactcccattgacatcctgtccacatagaagtagcccattccccagagagcttctgggtttttttaagcccagagaatggggcttagctggaggggccagcacccttcaaattcaccagagtggtctctgctctgtctccagctgaaccagaagaacctgactctgagcaatcggtgccaggtgtttgatcggttccaggacaccatttcacaacatgttgtcaaagtagatttcctgaaccgaatccacaagaagcaccctcctaaccgccgtgtgctccagtctgtcaaaagaagaagcttgaaggtaagtcacagccctttcagtaagatatgtctttggtgtctcggcaagtaataaatgtgacctcgtgtagtaataacctgagagtggtggtcagaattctaaaggcaacattgcaggtgcgcttttgtaatctgtctataattctccagaagataagcacccttcagcctattacaagcccagttgtctcccttgtcacatacaacattttgtcctagggtttctattgctgtgataaacaccataactgtaaacaactggtttttgttttgttttgggggaggattggtagcatttgtttcagcttacaactgagatggtcacacttcactgctgagggaatcagggcaggaacctaagataacagctgatgcacaagcttggctgatgctgcttggtagcatggcctcatggttggttctgcccactttcttacatctctcagagctaccagcccaaggggtggaaccgcccacaggccaatctgaaagggcattttcccaattgattctatcttgtgccaagttaaaactagccagcatacttgactattacttacattgtctgtccctgttaagtggtccccttctgagaactctgaggtgacattgtaattaatcaagcagaatatcactaaagcaactgtaagttgttatgatacaatatttctaggcacttcatacttctaaacaatgtccaaaaagactgaagaacatttgcagctgggtggtggtggcggagaacacctttaatcctagcacttgggaggcagaggcaggtgaatctctacaagttcaaggccagcctgctctacagagaatagacccaactgttccatttagagcatgaatcactatttgatttttttttcttcttttatgactgctgtttgtgggtgtgttgtctttgtttggatttttaatgtttctgtttcttgagttgcttgagagtaacttgaaattaggaattgttttgttgtgtgtgaagcaagtgctggaataagtatttttaagaatgatttcaatcagactatgatttggccactagaacaaagattgttcttgagtgatacctataatattgattcttggtaactcataatttctgttttagaaaaaaatgtcttttaaaaatgagacattttaccgggcatggtggcatacacctttaatcccagcactcaagaggcagaggcaggcggatttctgagtttgaggtcagcctggtctacagagtgaattccaggacagccagggctacacagagaaaccctgtcttgaaaagagagagagacagagagacagagagagacatttccaaaactggatgtggtggcgcacgcctttaatctcagaactggaaagcagcagaggcaagcagcagaggcagctgggtttctgggttagaggggagcttggtctacagagtgagttcctagacagccagggttacacagagaaaaccgtttcccaaaaactgaaaacgaagaaaagcatttgctatttttcaaattattcagtccccatattcagttgatctagaaggcttaatacactattctcacatataaacttgttctttctctttggaaatcagtgcatgcatgtggtggtggagatcagcagttctaaacatggccactaggtggcgcccgtattttaagctccatcacactactcccctctgtagctgatctttggtactttatgggttcttcttcccaccctttgtccacctggtttcaccttctattactagataggaaagaaaggatagggagatgagagggagagagagatcactgaagctaatctccttttgtttctttgagcacaactactaacaaaccaaaaccactcacccaccccacccccacatgacccccaccccctgacctcacctactggggctctgaaaagttcccagaattcagaatgtcacacaattacagaaattatctgcaactggcaaatccacacctctgttagagcgtgaggcaagtcatagtcagctgcttcgaacagtccaaagccaccacatttccccaccctgggagtaaaacagaaacataattttataatatttctaggttgttgttggggtgtttgtttgtttgtttttaagaaaccaaactttcggaattctcactatatacactgtagtggtacagatggttgtgagccacagtgtggttgctgtgaattgaactcaggacttctgcttgctctggccctgcttgctccagcccaaagatttttatttattcttatatgtaagtacactgtagctggttttagacgcactagaagagggatctcattacgggtggttgtgagccaatatgttgttgctgggatttgaactcaggacctttggaagagctcttacccgctgagccatctcatcagccccatgtagcgaaatcttaactaagtaactatttaccctctggtataatggttttctcagtgtttctcattacagaaataggttataaggtgggatgcctcatacagctagttaaatggatctaaaaggaatccaaactaattcgttttccatgtaaattcagtagatagcctgggggctagagagatagctcagcagtcaagagcactgactattcttccagaggtcctgagtaaatgaaataaataaatctttttgtttgtttgtttgtttgtttgttttctgagacagagtttctttgtatagctgtcgctgtcctggaactcactttgtagaccaggctggcctcgaactcaagaaatccacctgcctctgcctcccaagtgctgggattaaaggcatgtgccaccactgcccacataaatcttttttttttttcattagaagacagcctagagctgaagtgaacacattgggagaccttggttaaatcctttccttggctttccttaaatagtttattgttgaagagaaagtcagggttataaacttcctgaagaacagtttgtttttagacagcttgagaatgaaatgagaacagtgtcattggaccgtggcctctgtgcttggtcacagcagtacagggggaacctgctgagagcctggtacccggctcagagctccctagcttccctgcctttttgcccttacccagggcatagccatagtgtagcccactgcttcatcctcctgctgctttagaaagcacgcagcactatttggtgattctcaacttcatgtttctttcctcattgtctagcctcagactcacagagatccacccgactctccttgccacatgctgggattacaagtgtgcagcaccactgccctgctggacttttcctttctaataacagcacctcaaatgtgcctgtaccctaggatgcattgtgttgtattgtaatagcctttctatgttttcccccactagactgagtttcttgagggcaaggcttatatattatatacttttatattcacccctggacctctaggatttggaacagtgccagacttataaggcactcagtaagtgttagtggaatttatgagtagttctttcatgtgtttctttcgttcgtgtataatgtaagtcaaagtgtctttttttttcttcaacaaagaagtcttcggttgtcatatgagtcatgaagggatggataatgaaaactaacattgactaagtactcagattcatcaggcatcaggttaaatttttctgccatgaatataacctcatttaacttatttctcgattactgttcagccttggccattggcactaggaaatacaaaccttcagcctggaccaccctgatgaaagcccagtccagtatcagtcttgcatgtttcaggacaaaaatggaagacagcatgctgtagtgctacaattctgtaaggccttagatcttaataaagaacaatgaggtccctacctattgtttctgtttccgtaccttttcaggacaagatgtctgtgctggtgtcaaagggcccaaaacagttgcagcacactgagcctcttgggttttggtggatcacagagtagatgatcccttgggcaccagcccttcaatcaaaatagtgtctcattaggtcagattcaactgggcatgttggcactatcaacctttccttttctcctgtcctgaacaggttcctgatgctataaaatctcagtaccagtttccacccccgcttattgcacccgcggccattcgggacggggagctgatctgcagtggggtccctgaggaatcacaaacgcaccttttgaactctgagcacttagccactcaggcagagcagcaggaggtgagtgcaaggattgggatcccaagtccagtctctcttccacatcaccagggcctctgtgtctgtcattcctaccctgccttacctcctggcccctaaaacttgagtgtcccttggagaatcccaagctcatattccagaagcaagaaggtgacttcaaacaggccgctctcctcatctgtctcccattgctgcaagctgggcagttctgtactgtagcgagagatgcgcagactcacagagaggttaggtgatagttccagacacagagcagatactggggtgtttgctgaatgttgatcactggaaatgtcagctccactggctgaggttgtactgccaagtggaccaggaagtcttgcttgggaatgaaagtgggattcctttctagtcactgtgttggaaccttggaaacagtgcttatcaactctgctgtagccctggccactgtagcaggatggaccaacgtctcccaggcctctcacctcctctcctctccttccattgcagtggctctgtagtgttgttgcgctccagtgcagcatattgaaacatttatctgctaagcagatgccttcgccttgggactctgaacagacagagaaggctgatattaagcctgttattgtgactgacagctcaatcaccacctccctgcaaaccgctgacaaggcacctcttccttcccactaccctttgtcctgcccctcagcagtgagcacccaaaattccctgggctgctctccaccccaccaacccccaaccctagaagacatcagctgcagttcttgtgtggaaaagtccaagaaagccccttgtgggactgccaatgggccggtgaacacagagataaaagccaatggcccacacctctacagcagccccactgattccacggatccccggcgacttcctggcgccaacacccctttaccaggcctcacacaccggcaaggctggccccggcccctcacgccaccatcggctgggggacttcagaaccacgtcggcatcattgtgaagacagaaaatgccactggccccagctcttgtccccagaggagtttggtacccgtcccaagcctgcccccttccattcccagctcttgtgccagcatcgagaacaccagcactttgcatagaaagactgtccagtcacagataggaccttcgtcgacagaatcgaggcctctgggctcacccccaaatgccacccgggtgctcactcccccccaggctgcaggagacagtatcttggccacaggtgccaaccaacgattctgctcaccagcgccatcatcaggtgagtttcagtattccagtattctctggaatgatcctgtgttaatagcacagacttaagagtccgaaacagtttatccctgggaatacttgaggcctttcatctctgtgtcagtgatccatcttctgcatcttatggcagatgaaaggctgtgttagcttattccagccataagttggggctgttctcactaatttaagtcacttccttagggtggcctgccaggtcagtggcaatactggaactgcagttgggtcactggcccctcctctcaccttctggacctagtcttctgcctgtctgttccatcacctcagaaggcacatgctttctggaaccacttgggtcagcctgaggcttggtgtgtacattcacatacgagtgatgcagattctcagagccagctcattggaggaacattcatgttcaagaagcagggacagaaagcagcattgcctttcttagagttataaagtgggatgcctacagaggttggtctggcccaaaggcttgcccttggccatatgtctaaagagaatcctgtaggtctgtacttgacccagtatagacttgttctctcagctgtcccaggcagcatttggaccccgagcttgctgatccaagcatctgaaccaggtttcataagcagttgtcacctgtgtgttcccacatgaactgacgccatcctcccagtcagcaaccaggtgcctgtgatttctttgcttggaagcccctggccctatttccaactctaatgctagagtgagtaaattctgcaaactgacatttgtccgtcagcagataggaactgtaggtgctgtttctgtaagagtagaggtagcagagaggtaggtggtcatgaaccaaagaataaagcaacctcagcacttggccccagaatagtaaattgccacagttgtcaagtgctctggaaatcctgcgtgcccgggtatgttattattccatctacccttcctcaccacacgtttttagctctaggagttccagagcctgtgggttgagaatcaagaagggaacatcaccttgggtccgaaatccagaactgtctcaacaatgggggattggaccggtgggtttccctcaggcgacgtaagtaacagtcttcctgctccgtccccagatggcaaggtcagccccggcacgttatccataggaagcgctttaaccgtaccctctttcccagccaactctactgccatggtggacctcaccaactcacttcgagcatttatggatgtcaacggaggtgagtgatgtcccagtagctttcagctcctttttgaagagggttagggagatggggatacgtgtatccatttgggtagaagaatgggaaagaagggctggtgagatggctcagtgggtaagagcacccgactgctcttccgaaggtcaggagttcaaatcccagcaaccacatggtggctcacaaccatccgtaacgagatctgactctctcttctggagtgtctcaggacagctacagtgtatttacatataataaataaataaataaatattaaaaaaaaaaaaaaaaaaagaatgggaaagaaggcaccatctcttgtctctgccttctgggtttacacaatataaccaaagaggaagaaaaggagaacacagctaagctgaaccagtgggaaagaacagaatcacattaggcagctcccttggtttgggcagcaaaacaaaaccaggagacttgtttccatctgtggtgaaccccaaagttaaagagaatagagatggatttctctgcacagagtgggtagaaaagactatatataagtctataccaggcaactttgggtcattggttctgcctttctttatttaaaattagcctgccttactacaagaagccaccgctctgggtccttctcactgcaaatggcacgtgagatacccattttcagatctttgttccactgtgaactttatattgtttgaataaaagtcacttgctggatttgccctgtctcccttatctgcttccacaatccatttctctcagctttttttgatctttttctttggttgatagaaatcgagataaatatgttggatgagaagctgatcaagtttctggccttgcagagagtacatcagcttttcccttcccgggtccaagcttcaccgggcaatgttgggacacatccgctggcttctggagggcaccacccagaaggtgcgcgcgcgtgcatatgcctgccaccacaccatcagctctcctgtctgatgtgtgtgaatgaccaccttgctccatggagaatctctgatttcagtagcttaaactctttgtacctttgggtttaataaagcaccgtgattttttttttttctcagtgtgaacaagataaacaactttttggtcagacttggggagtttgccataacttctttcacacaagtccactttgattcatagcaaagcagctaccatcctttggggtgtatgttgtatgctttctgttcagttactttgtaacatttgaactaataggttttcctaaggttcaaggtgagaaatagaacaacagtaggaaattcttctccagtgttaattccacttggttatctggaagccttgctcagcacatgagagctttggtgcttcagggaatgtgccatgccagcaacatcagagccccaggagcttattagaaatacaaattctagaactaggaggtccctaagttgaaaaagaaacctgagttgtatccctagaacccacataacaaaagctaggtatggtgatacctgcagtacatacaatcccagaactgagcaagtggggatagaccggtccctgggattcattagctgtccagcctaatctacttcttgaattctaggccactgagagaccttgttcctccaaaaaccagaatatgaggaacaacaccaaaagttgtttgtgtatgtgtgaacgctaacaagtgcgtgtgaacgccaatgcagtaaatgcaaatttacagattctagacccttttattcccaactaaatccaaaatcagtttttggatgtgggtggcagtagttctagggatcaaagccattgacttactggacaagtactgtataactaaactataattaacaatatccataggcagttgaagtgctcattaaagcttaagaaacgctgacctatgccttaggtttttccatgttctctttttattaccagttggaatatccttgttaagctaaccaggatcccaggatcttaaagtactaatgtcttcaaattctgtaaccatcttcattgaaggcccttcctaacctgtcgtggaagtgctgtgggtggggtggagcactccctgaagcagctctgggtcaggtgtgagtctgagcttgagtcacctagtgagattttttttcaaggccaccaaccatagatccaggttttgttggtttgtgtttgggtcacaggttctgggtttctgaatgatcctatccctatgtttgtcttgtagtgcaaagaaaggaggtacaggcccgagctgtgttctgccccctcttagggttgggaggagctgtgaacatgtgctatcgaaccctctacatcgggacaggtgagccagccaggagtctgggaggggtactggaccttcagcctaaaggtggacacttagagaaacccttttgaggttgatagatctaacaacaccccactggggtgtccaggcaagagagactgagaacccagacaatccaatggggtacttccttggctcaggccttttgctttaactgcctctcagtagcttctgaaacactgtaaggaaagacttaaaaagagaacacttctttattctcaggtgtgataagctcacacataaccttcctttatttgttagtttatttttggtcatcaagatgatttaagataggatctcctctgtagttcagggtggccttgaactccagtctgttctcttgcctcaacctctcaggtactacatctatgagtattgcccaccacacctctgatcacccctagaaattgccctttaaagtgccctacactattgtgttcacatggatataccatcctcttcagtagcttactgtctgtctgggtggcagccatgtattctaatgcagattagctttagaacaacaaaaggaattgctgaacttgccaacatatatctataatctcagtacttcagtacttacggaatggaggcagggagatcaagagttcaaagctataccccattactataaaggggaaaaaaaagagaaaaaaaaaaaagaggccttgagctaccttgaagtttctactagcacccacccactcccctctctttcacctccccaacacatacaccttacagtctgttctctaccttttccttgactcctgccaccttgcaggagctgacatggatgtgtgccttacaaactatggtcactgtaactacgtgtccgggaaacatgcctgcatattctacgatgaggtgaggggcagagatgggtgggagggagctttcctagcctgaggtccttccccagcactgggttctggacacaggcagaggcaaggatgaaaggcttgtcctttttcttcctgtccatcttggaaggaaagactcagtgtgaagggcttggcattccaccatggcaacctgtttgtaggagcaggcaatcgctgcaactaatgttgccctcagaaacaattgagggaagccacctcaaaatgggaagggatcaaaatagaaggaagccaagctctgtgtgtccctgagtttcatcataattatgtgccagtgaatttcagatcaacaggagccagtgctgaggagcagggtgagggaggagatgtggagtcaatggggcaggctttcacatgggtgagtcttggtgaattctgaaagaggcaggctgtgactgaggaagagcatgagatcttgctaggtagagcagcaagccctatgtcctctcccaaggctgcacacagcaactacacatcattatctcccctcctcctcagaataccaaacattatgagctgttaaactacagtgagcatgggacaacggtggacaatgtgctgtattcatgtgacttctctgagaagaccccgccaacccccccaagcagtattgttgccaaagtacagagtgtcatcagtaagttggagcagaggcctgtggccacacagctaaggccccccgtcaccttggttctaccatgctgtcagtgacctacagtttcttgccttcccagtccccttggccaagctcattgatggtgggcctggaaaaagccaccgaaaatcaagtgctgaacacccacatatgtatcagacctgggcagggacttgagactccagccccgtctgagcatcctcagccctgatcatgtagcatagaatggggagacgcagggggccagtactgccagtcaccccagacaggtcagccattcactcttcccctcctatgatcatgcccctttttcccagggcgccgccgacaccagaaacaggatgaagagccaagtgaggaggcagccatgatgagttcccaggcccaggggccacagcggagaccctgcaattgcaaagccagcagctcaagcttgattgggggcagtggggccggctgggagggcacagccttactccaccatggcagctacatcaagctgggctgcctgcagtttgtcttcagcatcactgagtttgcgaccaaacagcccaaaggcgatgccagcctgctgcaggatggggtcttggctgagaaactctctctcaagccccatcagggccctgtgctgcgctccaactccgttccctaggccattggcctggacgcccacccaagactcctgcaatgcaaaaatgtacacgaaccaagcctgggtgttttctataccagaaaccctcaactacaatctttgcatgaaatgaagaaaaccttttgactgttttttaagactttttttcttttctcaagttctagggggcatttgcacatatatttgtactcaacatttcatgggaaagcggcagatccgcgctgaggagcagcgagggcagggacaggaggccctggtctggacacttcctccagcacaatcccttcccccgcctcctgctcctccccctcgaccgcctgcccactgttgtaaaataatcagaaacttgttctattttgtggcagtgacaatagttttatattaaaagaaaaaaatacagttttcatacagcaaaatctatacaatatcattgttttatttaatataaagatcgctacccactcctttccatggttcccaccctacaaggacttcccctctctgcagcagttgcactacaggtagctactgtgtatatggacaaatgagaaatgaatccttttttctggctgtccatctattttatttcaaataaggaaaagtgtatttggattttgtgtaaatacatctagtgatggcattttttcaatgtttttaaaagctgtgtacagtacatgtggtagagtgtttctcaaattgtctattgtagcaaaggcgtttttgtcgtaaacctgttctgtgtccttttttgttcttaccacttctcttcctcctcaccccagatacttcctcttccccacaaccaatgtacatagtaattgtaatgttttagacttgacagaaactttcctgtattctgtatataaaaaccaaaaatacttcaaattatgttttctgcctgtctgtcctccctgtcatgcttagaaggggaagtgtcctggatctcacttttcacaccctttgtacaagtgtcagtctcaggtagtctccagggaagcttggtggagaaggcagatgttagtgaagggagcctaagctctgagagggaactggaaaggagtgcttgcctttggagggctgctgtttccctagggagccctaatacagtaacatctctctagaccaatggttctcaacagtcctgatgctgtgacccttttatacagtctgtcgtgtggtgaccacctaccctaaaagtatttcagtgctacatcataactttaattttgctactgttgcaaattataaatgtctgacacaggatatctgagatgcaactcctgtgaaggggtccttcgactcttggtaaggaggtgacccaggttaaagactgctgctctagcctgtgcggctcttggtgtaacttgaataacttctgctgttctcatcaggaaataccctgctgtgttaccctaattctaatttcctgggcatcctgctagcttcctggagatggcttattcaggaagttcttcctgagaacagtcccctagaaaaatctgtgttctggcactattctaactagtacctattcatatattcaagtctgttgatagggctagaagacgagctttacatccacagcgtctatagttgtgctccaagaacacagtgcagtattaaatagggaattccctggtctcagaaatctgaccctgactcccacatatagttgtattcttgtccctgccactctgcttccacttcaggaaggacttcttaaacctccaaaggcagaaaggaactacctgtccttcactgtcctaggcaaggtcctgcttggaatgcccacatccctagctgtccctgcccagcttaccctcagtcactgtttccagagtaatggagtgtctacctacctagtcttgctacctgtgaaccgttctagaaacaaattaccgccttttcgaaagcagaggtcatggagtaacaaccatgtaatacccactgtttcggagtttgaggaaggaggatctcaaatttaaggccaccatgggcctagggaaaccacctccaaaatcgacagggaaaggggtggggtcacaaagttaggaaatcacatggttgaatcctgacaaccctgtcagtgccagcataagaagcctcatgcctctggcctgtaacgggaaatgtcctagaagagcagcggagggctggataatgaaagaatgagaaaagagtcgcttcattgaggaaaaggcatccaggactcgactccagacacacgagcccattcatgtacacaggactccagactgagagactgctacatactcacacctagagtaaacagagatgttcattcagtcacacgcgttggtggagactacagatgcatgcacagcctggaggactcccgcgatgggcacagacacctacgcagtgctctcaccgccggcgcccgcccagaatccagaagcacgcccaaagcctgagcggagatctcagggccctaggcatgcacacacccacccgtccctcaggcagatgtttccgggtacttaccgagcacgcgttcccgggagttcgcaagcctagagggcgctcccaggactccaaggtgtttctcctaggcacgccgccagggcacgcaggcgcacgcctagggggcgctcgcaggggccacgcgtgcgcgcacacccctgcccagcctgccgccgccctcgcgaggccgaggcgggagcgacgaggcccgggcgggaatcgggagcactgccggcatggagatgctgctgctgggcgccgggctgctgctgggcgcctacgtgcttgtctactacaacctggtgaaggccccgtcgtgcggcggcatcggcagccttcggggccgcacggtcgtggtcactggtgagtgcgcgcgagcgggcggcggggaggccgggcgggtggccgcggcccgaccggctgagctggctcccacccgccgcccgcaggcgccaatagcggcatcggaaagatgacagcgctggagctggcgcgccggggagcgcgcgtggtgctggcctgccgcagccgggagcgcggggaagcggccgctttcgacctccgtcaggtgagaccataggggaatgcgggaggcgggtgagcccgggacgcggagggcggagcagagcgacggaggaatcaagatctgagaggagagagcctcactatcccttaaacagagaggaagatgcagggactgctgtggtctttaatcttgagagctttaagaatcagagttaatgaagtcaggtgtggtcccagcaccgggctgcgagctcaaggccagccttggcaaaggcgacaaagaaggaagggttaggataatgaagagatgcagaaagaacagcaggtgcaaatgccctgagactagagagtctaattggagagacagggggcgggagatgaagcaaggaataaaaggaatgtcctgaagtggttctgagccacagccagcttctgaaggcccttccaaataccatcgagttgaagacagctgagcagagaagacacttcagtaggctctggaccatcctgatggctttttcagatgaatttcttagaactgtgcggtgtctagactgcagaggacaggagtgagagggtcacatacctttaatcctagcacttgagaggcagagacaggtagatttctgtgagttgaagaccagcttgggctacatcctaagactctgtctcaaaataaacaagcaaacaaataaaataaattttttttaaaaaggtgtgtaagagaagaccacagtctcttaggaaaagtttgttacagcaggacatgctggtgcacacctgtaattccagccctgaagaggctgaggaagggagatcatgagttccaaggcagtctgagctacgtagcaagatgctgtctacaacaggtgaaaggctgtaattgatttttatggtaaatgataataaaaacaagggatgttaatggcaaatacctgcacgctgctgactgggtatttaatatatattaactctagctcaggcaggccttgaactggtgacaaaagggtagctaggataaccaatgtgtgccaccacaccagacatacatgtattttatctgatttaactctcccagcttttttttccagtagaaagtattattattgctgttaatattattactatcctctcatttttcagtaagagaacagaggcccaaaagatattcagtatcacgtctgaagtcacactctagttaggggcaaagtcaagatttgaatccacacacccattacacgctgatgcatagaggcaggttttagtcataggtgggtagactctcagaagcctggaaagagggaggagaagggagatacccagtaacaatcctagcccttgctgctccacaggaaagtggaaacaatgaggtcatcttcatggccttggacttggccagtctggcctccgtgcaggcctttgccacagccttcttaagctctgagccaaggctggacgtcctcatccacaatgcaggtgaggagtagcaggccctgtgggagggcggcggggagcctggagaggcagaccctccagcagacacatctcacaagtggggattctaagacctgtgggacacctatgacagcacctcatgcctagcttctgctctagggatcagctcctgtggccggactcgggaaacctttaacctgctgttgcgagtgaaccatgttggcccttttctgctgacgcacttgttgctaccccgcctgaggtcatgtgcccccagccgtgtggtaatagtgtcatcggctgcccaccgacgtggtcgtctcgacttcacacgtctggactgcccagtggtgggctggcagcaggagcttcgggcgtacgctgacagcaaactagccaacgtgctgtttgcccgggagcttgccacccagcttgagggcactggtgttacctgctatgcggcccacccaggtgaggcctgactgacggctcttccttacttctctagcatctttgtatgttactatgtgcctccatacccccagtctcctattgagtcacagaatggaaacatggtcaaagggaaacctgttccttgctgatcttgggagcagactttcttctcatctgttttcttccttgctcaccttcacgcttggatgctgaccactggcttggggataaaacaagatcctgatgataatatagagggctgcggctgcagctgataggtagaacacatgtcctagtataggccaaaccctgagcttctgctctttggtttaggatgtttggttggttggttgtttggttgatttggttttgagacaggatctcactgtgtagactaagctggcctggagtttgctttgtaggcaaggctggcctcaaacatccaaagacctgcctgcttctgtctccagagtgctgggatcaaaggtatggaacatcattcctggcttagtttagtgtgtgtgtgtgtgtgtgtgtgtgtgtgtatgtgtatgtgttagttttctctgcatggctatatactgtagtggtggcagtgcccacagacgtaagattctcctagcactggtgttacggatggttgtgaccttccttccatgtgggtgctaagaaccaacctaggggctggagagatggctcagcggttaagagcactgactgctcttccagaggtcctgagttcagttcccagtagccacatggtggctcacaaccatctgtaatggggtctgatgccctcttctggtgtgtttgaaaatagctacagtgcactcatatgaataaaaaaataaataaaatctttaaaaccaaaaacccaggtcctctacaagagcagcgagtactcttaaccactgagccatctggttgttctagctgtttgttggcattttattttgttctgttttttgttttagttttgatgggggaggggggtggttgagacagttttctggaattctgggtagctcagtcaagcctcaaattcaccccaaacttcttgcctcatatttagatttcccatataagccaccacaccaagctaagattgggtttggtccccaacaccactgaaaagacaagtcagggcggtggtgatgataagtacggtgccatccagtcaaggatccctttctttatggaacctactatacagtaggcatgatttatgtgctgggacaaaagtagtgaggccgccttggtctgtaagaccccgtctctctgagagaagacaaagcaaacaccaaggacctcgccctcatatcccatgacaagtggcgataacatccggagagagacactagggaaagataaacaggaaaagagggaccttctcagatgtaacgtttttattttgtcagtggctgtcaaggaagacacttggttagaattgaacacagatctgaaagagataaagggatctttgaagctcagaacttgaataaggagcacagaggcaggtgttgctaatgtgctgcaggaggctggtgtgcctagaacggaggaggaggagacatgggctggtgaatcatctttgtccttagacaataggctacaatagacagggctcgcctagatcatcgtactaacatcttagaaaaccgttgtttggggcttctttgtaatcgcactgataataatgctattaacctttattaagctcttgttacaattacagatccccagtgttaaaaaaaaaaaacggtggctgatatactataggttcttaaaaatgatggctaaacaaaggaatggggctcaagatagatgaaaagctggtatgaattaggcactgtggtacccccagtgggaagctgaggcaggtgtattgctgccagttcgaggttagactgaatttacagaggcgtgagactctttctcagaaagaaaggaaaggaccagggatgtagctcagttgatagagtactagacagcaggtacacagccctgggttcaagtcactagcaccaaaagcggggacaatagcgattaaacagcaaagaacatagaacacacataagcacagcctaggagatgggactatacaggccgttaggctggtaggaaggctttctgtaggaaatgggttaaatcaccttgtggggcccctgaatacctggtagacactttccctggaagcagattctaccgtctgatcctagctggtttttttccctgcctgatgcctgggcccccattgccttcctccacaaatcctctttcttcctgcccacaggacctgtgaactcggagctcttcctgcgtcatcttcctggatggctgcgtcctattttgcgcccactggcttggctggtgctccgggcacctcaagggggtgcccagacacccctgtactgcgctctgcaggagggcattgagcccctcagcgggagatattttgccaactgccacgtggaggaggtctccccagctgctagagatgaccaggctgctcaaaggctatggaaagctaccaagaagttggcagggcttgcacctggagacgatgatgatgaccctgatgaagagccggaacctgaggatcccagggccccatcttctcagagcgcccccagccctgagaaaaccacagtttctggaccttctcatagctatcagggctcgcaagacttatccaaattgacacagcgaagaattcaggtgaaggatgaacctacaccctaactttcctaacccccgggatagaatgcttttgtagcccagtgggatccctcaaaaatctcagttgtgtgcctgggcactgaagggttgccacatttacctcggaacctcttgtcatgtcctgaacagcccttttccttgtgaaaggaaatgaatactacttcctaagagacactgtaaccccagattcagggatgatatatgagatactgtgttgctctggaatttgattttcagatttctgagcccttccctgagtagtgatctgcccagggaaagggccggagactttgtggttgatgcactgcagatgttaaacattaattactgactgaattcagcccttggcaactttctagctaggtagtgaatttacccccatttttatggaggcggaattgggaaaggactaagtcagggcaggaactggggttttgagcccgggagtctgccctagggccggtgcccgaggtgacgcagtagtaactgtgatacaactgaggtgccccaaaggtgctacagggccaaaccccctggaataaagcgagctgactgtggatgctctggctcccgcctctttccacatgccggccccgccctccgccgctacacttccggcggggccgcggccgcagaggggcgcaggcgggcggggctgggggaggcgggataggctgggcgcggccggcgctgcggacccgccacagccctcccggtcgctgcggacccaaggcctgctggcctgccaacggcgccatgggcaactgccacacggtgggccccaacgaggcgctggtggtctcaggtgaggagaaggcgaggggtgggaaagggccggcgtggggtgcgggtccctcggacgcacctgagccagccctccggagagcggtcctccctcccacagcacggcctcaggcgctgacccttcctctgctccatggtgggtttaggggtttctaaggtttgtgggttccagtgctgggactcgcagctctggaaggcaggtgcctgtccgggaggggcctgaggcacgggtccctcttttccgggtgaggcagacccgttaattccgagcaggctagggcttgccaggaattactgccatcacccgccctgcaaacgcgggtgcggcctctacagttgggtaacccggctgtggcctgtaccgctctagattacaaaatgcagcaagctctagatttgaccagatggggctttggggggacggtagcgtaggaagccttatagctgatatttcttttaggtggtgtatttggaatgtcataggaggtagctcaaggcaccaaggaccctgttgcatgcaagctcgcaactgtaacctcttcccagcatcagcactgattttcagcctgtgtgcagaattcacaaggctggctgccaaaaggggaggtagaagccccgagccaaggcttatagatgccattcttggggagatataataaatccactgggccccaaacatagctctcagcgttgttgtttggatttcaaaatcaatccctttcctgagacatcctcacagtctgtaaccaggaccctactaaagcgagagacatatgatcttgttgaagaccaggagtcttggctggagtcagaaggaaaagcacagaggctaacttttggcatcctaaagcccagtcttgtctccctcctcatccatacctaaagatggcttttggagccacataatggtttgagtaggcttgaatttccagtttgttttgttggggggtggggaggcttagtgtttttgtttgtttgtttgtttgtttgtttgaggtttatctttttaggttaaattttttttaagttgtatgtgtgcgtgtgtcagtgccttgtctgcctatctgtctggacatgcacaggtgagtacaggtacctgaaaaggcctcacaggtgttgaaatatcttggagctggagttacagatggttgtgagccatttgacgtgggcactaggaaatgaatatgtgcccttaactgttgaacaacctctgtgtttgttttgaaagagaggtttgacttggtaccccccgatgatgcgattacaggcattcagtcaccacacccagcttgttgattctgtgtgagtgtgcttatggtgctaggaatcaaaccctggggactcacctgatgccagtcaggcagtatgccacactcctcgggcataggagggtattagacaccagaatctggggctaagcagaaggctcagtagacaaaggagactgacaccaagcctgatgacctgaggatggaatccccagggctcatacgttggaggaaaggaacaaactaattcaagaagcctgtacacacatgtacacacacacacacacacacacacaaacacatacaataaacattacttttttcctctgggtgtggctgcgcatgcctttaattcctgcacaaggaaggcagagtcagacaggtctttgagagttccaggacagccagggctatgtatatacaccctgtccgaaaaaaaaaattttaataactaaattaaagtctggggctggagaaatggcaccattaagagcactcactgcagccgggtgtggtggctcatgcctttaatcccagctctcgggaggcagaggcaggcggatttctgagttcaagaccagcctagtctacaaagtgagttccaggacagccagggctatacagagaaccctgtcaaaaaaaaaaacaaaaacaaaaaacaaaaccactcattgctcttggagaggaccgtccttcaatttccagcaccgacatggcaggtaacaccagtcccggggcacacacaccctcttctcgattccttgtgcatgtggtgctcagacatacctgcaggcaaaaagccacacagaataaaataaaaagaaaatctcaaagataaaacaaatcagaatttgggcagcactttctcctcttttgtttcaggaagcccagactctgggctgaggagaccaaagcttaagttctgccctgtggaaaggctggcaactacagggtgagaggcagccctgggatgggtggctctgtacctgtctccagaggcaatgcagagctggattggaagctgttggggtgggggagggcggggttggagagaggtgattgtgctaagagtccatgagcacaggatgttaggatgtgaggggtggggagaaatagtgcctaacgtaatagcaccatggcgtttgagatgtgg

SEQ ID NO: 2838 - DNA, 4447 bp, Mus musculus
gcggcgatcccggggcgcctgcgcgggtggctttgcgggcgctcgcggtaagtttgcgccaagtgcgcggcagccgggacgcagacggcagcggcggcgagaggcggagcccgggaccaccccccatcatcctccccagagtcacctcacgaaccacaacctcacctaacctctcacccccccctccggtcccccaagcccgggatggcagcgcccgctagccttcccggccggaccagcggtcgccagcgccagctttagcctgtgggcctaggcccccgccgaggcctgacccccggagccgggatccactgtgcagccagccgctgggccggggctgaggggttgctcccctctcgcggcccgtggggaggacgctgccgtcccagggactgggggccggggggtgggggggagccagggcgaggaagtcggaacctgtgttgggaagagagaaggggaccgggggtcagagtgcccccttcccctcctcccccctccccccggggctgggggggccggagcagagagcgcccagcccgagaggtggatgaatgtgggagaaaatggagaccaagacgatcgtgtacgacttggacacgtcgggggggctgatggagcaaatccaagctctgctggctccccccaagacggacgaggcagaaaagcggagtcggaagcccgagaaggagtcccggagaagcggcagggccaccaaccacgacagctgcgatagctgcaaggaaggtggggatctcttgtgctgcgatcactgccctgccgccttccacctccagtgctgtaaccctccactgagtgaagagatgttgcctcctggggagtggatgtgtcaccggtgtactgtccgccgaaagaaacgagagcagaaaaaggagcttggccatgtcaatggactggtggacaagtctagcaaacggactacatcccccagcagtgacactgacttgttggacagaccagctagcaaaactgaactcaaggccattgcccatgcccggatcctggaaaggagagccagccggcctggcacccccacatccaacgccagcacagagacccccacctctgagcataatgacgtcgatgaggacatcgttgacgtggacgaggagccagtcgcagcagagccggactatgtgcagccccagctgcggcggccttttgagctgctgattgctgctgccatggagcggaaccctacccagtttcagttgcccaacgaactgacctgtaccactgcactaccaggttctagcaaacggagaagaaaggaagaaaccacagggaagaatgtaaaaaggacacagcatgagttagaccataatggtcttgttcccttgccggtcaaagtctgcttcacatgtaacaggagttgtcgagtggcccccctcatccagtgtgactattgcccgcttctgtttcacatggactgcctcgagcccccgctcactgccatgcccctgggcagatggatgtgtccgaatcacatcgaacatgtggtgctgaaccagaagaacctgactctgagcaatcggtgccaggtgtttgatcggttccaggacaccatttcacaacatgttgtcaaagtagatttcctgaaccgaatccacaagaagcaccctcctaaccgccgtgtgctccagtctgtcaaaagaagaagcttgaaggttcctgatgctataaaatctcagtaccagtttccacccccgcttattgcacccgcggccattcgggacggggagctgatctgcagtggggtccctgaggaatcacaaacgcaccttttgaactctgagcacttagccactcaggcagagcagcaggagtggctctgtagtgttgttgcgctccagtgcagcatattgaaacatttatctgctaagcagatgccttcgccttgggactctgaacagacagagaaggctgatattaagcctgttattgtgactgacagctcaatcaccacctccctgcaaaccgctgacaaggcacctcttccttcccactaccctttgtcctgcccctcagcagtgagcacccaaaattccctgggctgctctccaccccaccaacccccaaccctagaagacatcagctgcagttcttgtgtggaaaagtccaagaaagccccttgtgggactgccaatgggccggtgaacacagagataaaagccaatggcccacacctctacagcagccccactgattccacggatccccggcgacttcctggcgccaacacccctttaccaggcctcacacaccggcaaggctggccccggcccctcacgccaccatcggctgggggacttcagaaccacgtcggcatcattgtgaagacagaaaatgccactggccccagctcttgtccccagaggagtttggtacccgtcccaagcctgcccccttccattcccagctcttgtgccagcatcgagaacaccagcactttgcatagaaagactgtccagtcacagataggaccttcgtcgacagaatcgaggcctctgggctcacccccaaatgccacccgggtgctcactcccccccaggctgcaggagacagtatcttggccacaggtgccaaccaacgattctgctcaccagcgccatcatcagatggcaaggtcagccccggcacgttatccataggaagcgctttaaccgtaccctctttcccagccaactctactgccatggtggacctcaccaactcacttcgagcatttatggatgtcaacggagaaatcgagataaatatgttggatgagaagctgatcaagtttctggccttgcagagagtacatcagcttttcccttcccgggtccaagcttcaccgggcaatgttgggacacatccgctggcttctggagggcaccacccagaagtgcaaagaaaggaggtacaggcccgagctgtgttctgccccctcttagggttgggaggagctgtgaacatgtgctatcgaaccctctacatcgggacaggagctgacatggatgtgtgccttacaaactatggtcactgtaactacgtgtccgggaaacatgcctgcatattctacgatgagaataccaaacattatgagctgttaaactacagtgagcatgggacaacggtggacaatgtgctgtattcatgtgacttctctgagaagaccccgccaacccccccaagcagtattgttgccaaagtacagagtgtcatcaggcgccgccgacaccagaaacaggatgaagagccaagtgaggaggcagccatgatgagttcccaggcccaggggccacagcggagaccctgcaattgcaaagccagcagctcaagcttgattgggggcagtggggccggctgggagggcacagccttactccaccatggcagctacatcaagctgggctgcctgcagtttgtcttcagcatcactgagtttgcgaccaaacagcccaaaggcgatgccagcctgctgcaggatggggtcttggctgagaaactctctctcaagccccatcagggccctgtgctgcgctccaactccgttccctaggccattggcctggacgcccacccaagactcctgcaatgcaaaaatgtacacgaaccaagcctgggtgttttctataccagaaaccctcaactacaatctttgcatgaaatgaagaaaaccttttgactgttttttaagactttttttcttttctcaagttctagggggcatttgcacatatatttgtactcaacatttcatgggaaagcggcagatccgcgctgaggagcagcgagggcagggacaggaggccctggtctggacacttcctccagcacaatcccttcccccgcctcctgctcctccccctcgaccgcctgcccactgttgtaaaataatcagaaacttgttctattttgtggcagtgacaatagttttatattaaaagaaaaaaatacagttttcatacagcaaaatctatacaatatcattgttttatttaatataaagatcgctacccactcctttccatggttcccaccctacaaggacttcccctctctgcagcagttgcactacaggtagctactgtgtatatggacaaatgagaaatgaatccttttttctggctgtccatctattttatttcaaataaggaaaagtgtatttggattttgtgtaaatacatctagtgatggcattttttcaatgtttttaaaagctgtgtacagtacatgtggtagagtgtttctcaaattgtctattgtagcaaaggcgtttttgtcgtaaacctgttctgtgtccttttttgttcttaccacttctcttcctcctcaccccagatacttcctcttccccacaaccaatgtacatagtaattgtaatgttttagacttgacagaaactttcctgtattctgtatataaaaaccaaaaatactt

SEQ ID NO: 2839 - protein, 989 aa, Mus musculus
MWEKMKTIVYDLDTSGGLMEQIQALLAPPKTDEAEKRSRKPEKESRRSGRATNHDSCDSCKEGGDLLCCDHCPAAFHLQCCNPPLSEEMLPPGEWMCHRCTVRRKKREQKKELGHVNGLVDKSSKRTTSPSSDTDLLDRPASKTELKAIAHARIRRASRPGTPTSNASTETPTSEHNDVDEDIVDVDEEPVAAEPDYVQPQLRRPFELLIAAAMERNPTQFQLPNELTCTTALPGSSKRRRKEETTGKNVKRTQHELDHNGLVPLPVKVCFTCNRSCRVAPLIQCDYCPLLFHMDCLEPPLTAMPLGRWMCPNHIEHVVLNQKNLTLSNRCQVFDRFQDTISQHVVKVDFLNRIHKKHPPNRRVLQSVKRRSLKVPDAIKSQYQFPPPLIAPAAIRDGELICSGVPEESQTHLLNSEHLATQAEQQEWLCSVVQCSILKHLSAKQMPSPWDSEQTEKADIKPVIVTDSSITTSLQTADKAPLPSHYPLSCPSAVSTQNSLGCSPPHQPPTLEDISCSSCVEKSKKAPCGTANGPVNTEIKANGPHKSPTDSTDPRRLPGANTPLPGLTQGWPRPLTPPSAGGLQNHVGIIVKTENATGPSSCPQRSLVPVPSLPPSIPSSCASIENTSTLHRKTVQSQIGPSSTESRPLGSPPNATRVLTPPQAAGDSILATGANQRFCSPAPSSDGKVSPGTLSIGSALTVPSFPANSTAMVDLTNSLRAFMDVNGEIEINMLDEKLIKFLALQRVHQLFPSRVQDGNVGTHPLASGGHHPEVQRKEVQARAVFCPLLGLGGAVNMCYRTLYIGTGADMDVCLTNYGHCNYVSGKHACIFYDENTKHYELLNYSEHGTTVDNVKCDFSEKTPPTPPSSIVAKVQSVIRRRRHQKQDEEPSEEAAMMSSQAQGPQRRPCNCKASSSSLIGGSGAGWEGTALLHHGSYIKLGCLQFVFSITEFATKQPKGDASLLQDGVLAEKLSLKPHQGPVLRSNSVP

SEQ ID NO: 2840 - DNA, 66481 bp, Homo sapiens
cccctctctggcctcacataaccgccaggagtttgtggccaagtaacccagcaatcctcacagatagccataggcaaactgttcagtctctccttagaaagagaggacagccccaagccagtagggtcagcactagaaaggtcagtcagcccaggaacggcagtggtagtgaggccggggcggatggcatgcacatcaggtgtttgccgcccggatctagtgctaacccctttttacattcattcactcattttattcaaccaacgctgaacaccaactctgtgcctggcctggaaagacctggttcctgctccagggggtcctagttaagggacatacccaaacaactgattttaggaaagtggcatgaggtagaagtagcagatgtatccaagaaggttgaagcccacagtaagggctttagtaaagtctacctagggagagtcggccttctagagaagtcagcagagagggaaagtgacttacctgggcacacaaccaggcagtgatacatctacccacagtcaagagagttaccctggtcagtcccaggggtgtgaaaggttaggcggcaggattctggagctcaggctgcctggagatgcaggttcacagggctaaaaggttgaccttcaggacgatgagggccaagatggcagggaggcaaggtccccgctgctccaagcagaggatatagggctgggatagggaggaaggcatgttaggctgcctgggttcaggcaggggcctagcctacgtcctgtcctggtcttaacagctgcttgcggcggagtgatccgcaatgccaccaccggccgcatcgtctctccaggcttcccgggcaactacagcaacaacctcacctgtcactggctgcttgaggctcctgagggccagcggctacacctgcactttgagaaggtttccctggcagaggatgatgacaggtgaggggctgtcctagtggaatgggagtgcctggcctggtaataccctgctggagggacgctacccaagcctggggccacaccccatctgggtcagccaccagcctacatagctgccactctcctggttcaggctcatcattcgcaatggggacaacgtggaggccccaccagtgtatgattcctatgaggtggaatacctgcccattgagggcctgctcagctctggcaaacacttctttgttgagctcagtactgacagcagcggggcagctgcaggcatggccctgcgctatgagggtgagcctgctggggcctcactgggggtggcgggtccacggggatgggctcgggcctagggtctttctcccacaccctacccctctctgcctccatgctgtcactccttccaagtcagcccctgctcactcagtacttaggccccctttccctgcccctctctttgggtccgggatccctaccacagctttgcaggaaacctctgcctggacccaggccctatggtccaagggaataaattctccagattttgaaaagcaaaaaaggcctcaacccttaagaaagaattgctgtaagagacattctagaaccatttatgcatgcatgcattgattaattcattcaaaaaacatgtatggagtaccttctgtgtactaagcacaaaaccaggcagtgggaacaggatggtaatcaagatggcctcctgagcataatagggatggatgctcttggctgtccctcctccatcacattcctgctccaaccccaggacatatatttgtcattcgtacccaggaaaagaaaggctctggggagggaagtagggggatgcttgcccactgtgtttaataccagtcaaggctgagctgggctgggacctgtggtttacagccttccagcagggccattgctatgagccctttgtcaaatacggtaacttcagcagcagcacacccacctaccctgtgggtaccactgtggagttcagctgcgaccctggctacaccctggagcagggctccatcatcatcgagtgtgttgacccccacgacccccagtggaatgagacagagccagcctgccgaggtcagtagacaccagtggatgggcctaccgggcaaaaggcagggtcataccaggagaatagcagcagagcccggggccacaggggccctgtgatatgcgtggttcaggcttcctccaaggaggaggtggggggtcccagcaatttgtgggcactcctgcgggcagatggtaagcaacaccatggtaagcttgaaaagacccttctgggcctcctctgccttccagccgtgtgcagcggggagatcacagactcggctggcgtggtactctctcccaactggccagagccctacggtcgtgggcaggattgtatctggggtgtgcatgtggaagaggacaagcgcatcatgctggacatccgagtgtgagtgcctaccgggtcaggccgagccaactcctgaggtctggggatatcccttgtccagcccatcctcgggcccccaggccggctctgccctgacgctcctccttcacaggctgcgcataggccctggtgatgtgcttaccttctatgatggggatgacctgacggcccgggttctgggccagtactcagggccccgtagccacttcaagctctttacctccatggctgatgtcaccattcagttccagtcggaccccgggacctcagtgctgggctaccagcagggcttcgtcatccacttctttggtgagcttgtccctaccccactcagagtgcagacagcaagccatggcaagccaaagaggctagggcagtgaggtgcctgaatgctgtctcagacaagagtaagctggaaaagcaccagggatcacctggaggaagctagtcctgttctccatctgccctgagggagagccagaattctatagtggcaagaggggtttgggtaggcagcagaacaactttctttttcttcctttttttttttttctgagacagtttccctctgtcacccagaccatggtgtgatctctgttcattgcaacctccacctcctgggctcaagcgattctcgtgcctcatcctcctgagtagctgggattataggcacatgccaccacgcctggctaatttttttatttttagtggagaccggattttgccatgttggcctggctggtctcgaactcctggcttcaagtgatctgcccacctcagcctcccaaagtgctggcattacaggtgtgagccactgcacctggccagaacaactttcaaacaaaaatgggggaactaaggaaaggtgctggcttctatctttctgacaatctttcatagaagtgacgatttccctcaccctacctggccccatctctcaggcctaaggaactggtcaaggtgcttttggaagtaaggccaaagcttaaatgctaaccctggaatctaggagacagagcaatgtcaggcagtcaaggaggggcccttgagcagggaggaatggatccctgagcccgcccaggacagtctaggtccaggacaaactagcaggagccagagtgccctcaaggtgagggggacagtcactttggtgctggccgagggcctgcatcttgtgcctctgtgcccccagaggtgccccgcaatgacacatgtccggagctgcctgagatccccaatggctggaagagcccatcgcagcctgagctagtgcacggcaccgtggtcacttaccagtgctaccctggctaccaggtagtgggatccagtgtcctcatgtgccagtgggacctaacttggagtgaggacctgccctcatgccagaggggtgagtatacctgttccccacgctccccttcccaacacaaactccaaacctctctcctggattctgaaccagactgtagctgttattagctagtatcttcaaagttccttcacctcttatagcctcagtttcctcatctgtgaaatggggatgatacttttcatggggttatcagccacgtactctaagtatttcattcctggtagatggccaatcagtttttatcgaacctaatagatgggaaggggacaaatggggggacacactagcataatggtagggacagatacgtagggggtagacccatacgacatgaagaagttagctggcctggaacaaagccagggtggattggcctctgcttagttctccttgggctacttctccccatcacccctacccatagtgacttcctgccacgatcctggagatgtggagcacagccgacgcctcatatccagccccaagtttcccgtgggggccaccgtgcaatatatctgtgaccagggttttgtgctgacgggcagctccatcctcacctgccatgatcgccaggctggcagccccaagtggagtgaccgggcccctaaatgtctccgtaagtgtcaattgagtaggagggaaaacctctagctggagataaaagatgctgccctggaggccaagggcatgacaccctcactgcactctgcctgctttgtagtggaacagctcaagccatgccatggtctcagtgcccctgagaatggtgcccgaagtcctgagaagcagctacacccagcaggggccaccatccacttctcgtgtgcccctggctatgtgctgaagggccaggccagcatcaagtgtgtgcctgggcacccctcgcattggagtgaccccccacccatctgtagggctggtgagtgccctgtcacccctcaaaaccctccctggcccatagagctgctctggcaaagatgtccaatgtttagaaccagaaccacctgcccatgccaccttcatgttacccttggtctccccagtctctgccagatccttctgacctggcatcaccaagacaaatgctggagtggcctctccttggacaaatccttcccatgatcatcccactacctcctctccctgccttagtggtttggcccattgggctcactcactgcccttggccctccccttttgttccagcctctctggatgggttctacaacagtcgcagcctggatggtaagtctccacccttgaggccagagaagtggtctccctggtcctggttctcacggctcccaggtcatgggcttcccaaggagggagggcagagaaagagagaggtttgggcctagcaggttaaaaagctccttccctacacccagccagctagagggagctggtagtcagatgcccttgggcagaggtgagagaatatgggctccaggtgacagagacctctgctccagtcacaccctctgtgtcttcagttgccaaggcacctgctgcctccagcaccctggatgctgcccacattgcagctgccatcttcttgccactggtggcgatggtgttgttggtaggaggtgtatacttctacttctccaggtgagtctggcttctctttctgctctgcatacctgcatacctcactcctacccagtgctcctgacttgcaggcttctctgccccacaggctccagggaaaaagctccctgcagctgccccgcccccgcccccgcccctacaaccgcattaccatagagtcagcgtttgacaatccaacttacgagactggagtaagtaaccatgccagccttgccaccctatccaagacccagttctttgcttctttgggcagataaccctgagggtcctgccaagccctctcactttttcccttttcctagggaaggtgaattatggcctggcaaacctaatacaagtttccaactcccagcagtctctttcctttgcaggagacgagagaatatgaagtctccatctaggtgggggcagtctagggaagtcaactcagacttgcaccacagtccagcagcaaggctccttgcttcctgctgtccctccacctcctgtatataccacctaggaggagatgccaccaagccctcaagaagttgtgcccttccccgcctgcgatgcccaccatggcctattttcttggtgtcattgcccacttggggcccttcattgggcccatgtcagggggcatctacctgtgggaagaacatagctggagcacaagcatcaacagccagcatcctgagcctcctcatgccctggaccagcctggaacacactagcagagcaggagtacctttctccacatgaccaccatcccgccctggcatggcaacctgcagcaggattaacttgaccatggtgggaactgcaccagggtactcctcacagcgccatcaccaatggccaaaactcctctcaacggtgacctctgggtagtcctggcatgccaacatcagcctcttgggaggtctctagttctctaaagttctggacagttctgcctcctgccctgtcccagtggaggcagtaattctaggagatcctaaggggttcagggggaccctacccccacctcaggttgggcttccctgggcactcatgctccacaccaaagcaggacacgccattttccactgaccaccctataccctgaggaaagggagactttcctccgatgtttatttagctgttgcaaacatcttcaccctaatagtccctcctccaattccagccacttgtcaggctctcctcttgaccactgtgttatgggataaggggagggggtgggcatattctggagaggagcagaggtccaaggacccaggaatttggcatggaacaggtggtaggagagccccagggagacgcccaggagctggctgaaagccactttgtacatgtaatgtattatatggggtctgggctccagccagagaacaatcttttatttctgttgtttccttattaaaatggtgtttttggaaaaaaaaaaaaaaaaaaaaaaaaagcaatggccaggtgaatgatgctttcttggagggacgggaggtggcagataaatgggatatggacttcaggaccagaaggcatgctagacccaccaatcaatcatcttcagattttattttattactactgtttttgagatagggtctcactctgtcaaccagggtggaatgcagtgactggatcacggttcactgcagcctcaacctccaaggctcaagtgatccacctcagcctcctgaatagttaagactatagatgcaggccaccacacatggctaatttaaaaaaaaattattgtagagatggggtcttactatgttgcccaggctggtctccaactcctgggctcaagtgatcctcccacctcagccacccaaagtgctcagattttattttaaaagaaattattgcatgcagttgaacagggtcccctgtaccaaaagggacagtgcaacagatagcaggcaaaatcagaggccccaatggctgatgttacagggatgtgggagcccaggaaccccactgcacatccacccaatgccttatttcctcctctttgccaggtccagaactacaggctggcacactcccaaatcccttctcaacgccactgatgcccttctcaatgctaactaggctcaggaagtctgatgcatctctccttccccttatttctaagtaagcaaggcttgggaaattagaataggaaacagagactgatccccaaaacatgaagccctaatctggcttggccttacaaaacccttagattgtcaggagcagtggtaatgcagcttacgggcttggatcctaagttaggcaaaggccctaaccatgggctctggaaaaaggtggctgggaggatgtgctcaagtttgccccttccctatgggccccagcacctacaaagatggaaagtgcccagcgttggcccccagtatgcacattccatgctgagaggtgtgccctgcattgctgctctccaagagtgacagcaagaggcaggcaacaggaaattatgggagctcagaaaccagtagagaaaaatccatgaaagaaataatagcagcaaccagcaccttctgcttctacagtcttccaaaagggaagtcttgaccactcatgctgcctacccctggctctagcacaagccaccttgaaggatggagaagctcttgtccatgcagagtgcagtgcctagattagccacaagaggtcacttccaaaggcgtctgtatcccacctgctcgcccctcaatcccccctcaactgtcagggcgggagctctccaaggtgggagcattccttggccccactggcctaacctcatcctgcaagttccaagaggaagaggtgtgaagtttccctggctcttgtcaacagagccaagtcttatttccctcattagcccatagttcctattatcagctgcaattgatggtgttgatcaaagcaaagccttgtccagtggatggatgccaatggcttacttacctgttccataatgcctccaggttaacacagcagcacagctgggccctgagcagtaggaaaaaaagccaaagagagagggcacatgaggttctaaactctgagagcctgtgacataaaatatagccataggagatagaaaatcttgcctctttcatacaaacaatctagctcagccctcccctctctgatggccacatctctggtccacagctcctgaagtttattgttggctcagaatggtagaaagcagagggcagccaattcacatgacattctccaccccaccatccatgaccttatcattctttccaggcaccaagagggtcatcagaaaagcgaaaagtcaggaaaacagaaacctaagactccatacactgacatccccactctgtctaactcatcctccttactgtccccaaagcaagcatagtaattccttagacacagtcgacatagtgtaatggacagtgtctggcttgagaatcaagaaatccaattcttaggtctgccataaatgcactatgtgacctaggcaaatcactgcgcctccctgtgcatctggaaaagaggggattaaatcagatggtctctaaacccttgctagtttgacgactctgagaatgctgtgtcccttaacattaaaagtgggccgagcacagctacgaagcaacaattccaactaaacccctagtgtcaagcacaacgatacaattctcttttccactgcttcatccaccatcaggcagcaataaccaaccgcccatctctgacggcaataccaaggggaggagcgggcgccctgaaaaggagcatgaatccccgcccagaatgcgaggcgggccctcagactacaaatcccggcatgcagcactgacgctctcaaaagtatcccttcctggccggcaaatgactcttccccgggtctatcctaccatagagtgcatcgcacgcacatggaactacagttcccacaatccatcagacctatcgcgattcttgctcccaggatgcaatgcgcccccgttcgccctttagaccctttggcgttgcaaactgggagttggagtccggggtacgcaggtagctgggcgttgtcaggattacaaactctccactttaggcttcctcttgaagagcagatctcagggacagtggtgaagagagggtggtaacgggcaggcggaactctccagtgccaccaccacgcaaggcagggatgctgaggatacaattaactgataaaattatctgtcaggagcgggagagaattaggaaccacagtcatcccacacgcctccaaaagcgtcattttctgtctcaaatggcttttctctttaccaatatggtggcctggtccagccacacccgatggtagaaccaaacggtcaagtacaacatccctaggaatactgctgtcaccgacaggcgaccagctccatccaacaccacaccttgctcctttctgttcatgcctgaggactccaagggcatgatagcccatatcccattaccaaaatggcgaaaggagcagctttcttgtgagggcctgcggaaggcaatacgcctgcgcgggaggcgtctgtgttatggagaggaagggggagcacccccaacacgcctgcgcagaacagagtcgtcttagtttgcacacaaacaccaatggatgaacagtccctagcttcctgcggctgcgccttgacccctacaagctttctcaagcgcctgcgcgagacctcaggtcccgcccttttgtctcagtgcgctggcgcagggcagaaaggtggggcttcggtcctccagacgaatgccagcgcggctgcgcgctggggggtactccctcaccgcggctgcgcgggagccaggccgccggctgtcactgcggttgcgcgcggcgagcgccgatcccggggcgcctgcgcgggtggctttgcgggcgctcgcggtaagtttgcgccaagtgcgcggcagccgggacgcagacggcggcggcggcgagaggcggagcccggggaccaccccccatcaccctccccccagtcacctcacgtaccacaacctcacgtaacctctcaccccccctccgatacccccagccccgggatggcagcgcccgccagccttcccggccggaccggctgtcgccagtgccggctttagcctgtgggactaggccccgccgaggcctgacccccggagccgggacccactgtgcagccagcagccgggccgggactgaggggccgctcccccctcgcggcccgtcgggaggacgctgtcgtcccggggactgggggccggggggtgggggggagccagggcgaggaagtcgggacccgtattgggaaaaaagcggggccggggtcaggagcgccccctcccctcacctcccccctccccccggggttgggggggccggagcagagagcacccagcccgggaggtggatgaatgtgggagaaaatggagaccaagacgatcgtgtacgacttggacacatcaggggggctgatggaggtaagagtggccctcctcatctccttcctccagcgccgggagggaacctccgccctccgccccacaaagccagtcctaaactcgaagcgcctagatggccgagggagggggattcttcctcacctagcctctccctcccctctttgcaatttagggggctgagctcagcctccgaggacgtttgcagcagtttcacctacccgccgccctcgattcgctctcccgaggcgccagcccactccatctcgttgcaccggcaggcctccccacccccttcttgttggcccctttgtgcttcccccagcacgtccgggtaccgggctttgggcctctcccgagcgggtctttggagtcccccactgtccatacaaggaagtggcaagaagggaaccgcgcaccctcttcccatccccctacccttgatcctccccatttggaagaagctgttctcgttgttgtgctgcaggaacgcggttagggtgggctccccctggttccgggggctgagagattctgggagcagcctggatgggaggaagaaggacaaaaggggggagaggggtgggtgacggagaaaccgcgccgggggggcgacggaccgcccgggagctccgagtgtgcacacacgccgtttgtatgtgtgtgcagcaaatccaagctctgctggctccccccaagacggacgaggcagaaaagcgcagtcggaagcctgagaaggagccccggagaagcggcagggccaccaaccacgacagctgcgatagctgcaaggaaggtggagatctcctgtgctgcgaccactgcccggctgccttccacctccagtgctggtaaggtctggggacccttttggagcttcttggcggacccttctctgcgcattccttcacccggcctgcccctgactgccgaaataacgggcgcttgcagccgctagctgactttctgcagctgccggggcgagcacctccccgcccccaggtgtccgccgggttctggcagtttagcggggaggagcagcggtgggtccggaccccgaggtgggggttgggacgagtgaagagaaccccatatgggattggaagtcgctggggagccgggacagagccggccggggacagccggcagtggcgggggaggaaggggaggagctccgggcccagtgccgcttgcctgcccgcgcgcccgctgccctcggggctcctgcccggccgggatctcctcggggtgggtgcgtggagccctcggccacctgagttgccctggtccagaccccggcaaccgggcgcttgtggctgtagaaaaaatcgtggagggtgtctctcgagtccgcctcttctttgcctctctgtttacaatatggcgacctgcctttaaattatatttttattctcagcgccattttggctgcatatatgatttgcaaacgtctctcgggggaacggtggggacagccccagagtcctttctgcagaagctcctcgggggccccgtctgggatctcgccgctttgatcccctttctctgcctccgcttgccccctgttgcctctcagagctgccttccttcctcctccctcttccctcctccctcccggcgccgctgcctcttaggaaatcgggccgggttagacaattaaaattgcccttgggcgccgatttcatttctccgctccggatcggcgagcccttcgctgcaaaattctttgctgccagagggaggattgtgtgcggtggcactagaaaggcatttttaaggagctgagagctggaaagccgtacgctttttcccccttactggacatgagaggaggggagagaccgaaccgagagggagggacctgagttgatcgcccgctgcgtgatcctcctcagcggctcagcccaggacaatccggcaaagaagagtttaaactccatcttctgccggccgaaatcacctctgccctccacaaaaatcccacatctgcggcagcaaacccagatttcgtcttgttctactgggtctcgttctgttgttctgcaacagttgactgaggcaggggtttgagagaggagccagactggagagaggaaaagggggctgttctgtgttcccaccagttgtttgatgttgccttttttagccctctttttattttgttttaagtgaaatttcaccgaaggtctctcaacagttccattcacgttccatctctcggtttgtggagtagtgtctactgtatatttgtactaattgcaggtttgggaacacttattagacagatgactgatactgagcaaattaagtttatggtcagaagttatgtaggaaactcccattaccattcccaagatacttttgcccaggagggcaccccatcccagcttgtaaaattgctgggacaaaaatgattatcgtagaggaagttttgctgctggctttaaaatttttattatgaagtgactaagggtctgtggtttttagcctttacttcctataaggtgtaatccacctggagaagatatttctggtcacatttcttttgctattcttaggagaaatttgtgcctgaatatacgttgtgttgcttaccagttattcccagttgcttacatttttttagtgtgtttgtttggtatgtataccaggactgagttgtagacttcttgatttaaaatgtgggcttacgtcctactcctaggatgaaattggtgttaaccatgattgctgacatgcatgttgagtgagaatttgataagctctcttatttgataaagctgaaattgtttattagaaacctcaggcatgggaaaagtgtgctgtctgttttgcctgagattgggcttttaaactctaaaacctaacctctgaattttttaattagacgagtctaaagtcttgtcaagttgtaacaattaacagtttccactttagatgaaaggagaaagaaggagggactctttagctgttggtgagattcagacttgcccagactgtgcatttcattgaaattttttttttttttgaggcattgaatgggaactggtaatcagagatttgtgaatgtgtaaatgaagtagtgcttgtttcacatctccaattctccctttgaagatgtcaatactgaatgtaccattgacttatctgagttattatctaaatcacaaagcattgtagatattggtgcaaaggcaggaagtcttttaagtaggtattccctagacgaatttcatttagtgaggcttatctcacttttctgcgtctgaagccacactctttccaccaagagtgaagttttttttgttgttgttttttgtttgtttgtttttttctgagacaggcgtcttcgctttgtcacccaggctggagtgcagtggtgcaatctcggcttattgcaacctccacctcccaggttcaacggattcttctgcctcagcctcccaagtagctgggattataggtgcccgccaccacacccagctaatttttgtatttttagtagagacagggtttcaccacgttggccaggctggagagtgaagtattttattaactcaatcagagtagttagatcaagtatttaatgtctcagaacatttttattcttgaatgtgttttcatgaatttgtcccagccgggtgctgtggctcacgcctgtaatcccagcactttgggaggccgaggagggtggatcacgaggtcaggagttcgagaccagcctggccaacatagtgaaactccgtctctactaaaaatacaaaattagccgggtgtggtggcacgagcctgtagttccagctactcaggaggctgaggcaggagaatcacttgaacccaggcagcagaggttgtagtgagccgagatcacactactgcaccccagcctaggtgacagagtaagaccccatctcaggagaaaaaaaaaaaattgtcctattactgcttaattttatcatgtgagagtaaggttatatttcctctggcttcccttttaaactggctaagactgaattatttaggtaggcatgataatgataattttccttccatacggaaagtacaagagtaaggttgaagccgagtatggtggctcatgcctgtaatcccagcacttaaaggggccaaggtgggaggatcgcctgaggccaggagttcaagaccagtctaggcaacatagcaagactccatctctacaaaatttaaagaaaaagtgaaatttaaattttgcaaatgctgtaggtcttaattgcagtgctgctgtggttctctatccaaagctctgtgggataagtcttttttcagtctctagtattccttgccagtctgcctcactgtgaacggaatccagtacaagtgttccaaaagtggttctaggcaaactttacctcccgggcttggtaacacagctataaaccacaggagatctttctaagataaatagtaaggaaatgactagtcaaataagctgttttaattgttgtcttttctcaggagacaatgctttgtatgaggcacgtcatctcttcccagttagactgggaacctatttctgggttttctgtaatgattctctggaatgaattgtcttgtgctcagtaccgtgacctcaccaaagaattaaggttgaagaactgatgtctttttgattaagtgatagtgtaatcattttatccaagtttaactggtttatcaattattcagagtgatagtaggggttactaaacctgtccctagagaattggaaagagatgtgtgtgtggtgtttttgtttttgtttttctgagacggagtcttgctctgtcaccgaggctggagtgcagtagcgcaatctcagctcactgcaacgcctcccgggctcaagcaattctcctttctcagccttctgagtagctgggattacaggcgcacgccaccaggcctggctaattttcttgtatttttagtagagacagggtttcaccgtgttggtcaggctggtctcgaactcctgacctcatgatccacccgcctcggcctcccaaagagctgggattacaggtgtgagccaccacacccggccatggagggagatatgtttttaagtgtcccttggtgaatctgacttcatcataattatcatgccatgagttgagctttctgaaaggtctctggactgatcccaaaaaatctgttaaaaattagaataaccagtacagctttacttttcactgacccatctttctgtttgagattggtaggattgttgtcattgacagagtgaataccatggggcatcagtaatcaggatgataaaactgactggtttcctgtgattaccttcttatggcattttgctccaaacagactgagggaccaaaatggtctgatagagaagtgcatctacctcggcagacctcagcatggtcccttcccgtcagacagatttctgtagcatttgcctccgcgtgttatatttggaattgttggccagctttcctctctctggtgttggcagcgagatccaaaatgaggttttcgaagaatgagagtaaaaaggtctctgtgcacaggcaaaactaagctcagcttggagttttgcatattttcagtgagtcgtaacaaaggtttcacacatagaatagaaaactgccttgcagaaaatgtttgatgtttgaagtggggttgtttgtttgtttttggatacagggtctccaaggcttgatcctagctccctgcagcctcaaactctgggctcaagtgatcctcccacctaagcctcccaagtagtgggaccacaggaacattccaccatgctgggctaattttttaaatgtttttgtagaaatagggtctcactatgctgcccaggcacgtcaagcagtcctctcaccttggcctcacaaagtgttgagattataggagtgagctgtcatgcccaacctgtttgaacttttaaggaggtggtttttctgattttgttgtgtttagctcctcattagaatagtatcaggcaagtgatagattaaaatatattaactttaacattatcttgtcagcatgttgtttttgacattgtaagtgcttagaagcctagcactgacgaactggaggtgacaacgtctagattccttcccctcgcccggccccatcaatagtaaaatgattctacagtaaacaaacctaatttggttttatgtttattttatttatttatttatttgttttgcattttctgtgttgaattagaatctaggtatgtcgtattgtctttgttttttttcttttttgagacagagtctcactctgttgcccaggctagagtgcattggtgtgatctcagttcactgcaatctccgccttccaggttcaagtgattctcctgccttacgtgtcatgttgtcttactggtccacctaaatatggaagatacggtaatgttcaattttaactcaggttcagatgcatgcttcttaatgtagggcttaggggctaattgttatgaaatgagtgcaagtgtcagaaatatttaaagtggaaaaggaggttatactcttgaaagattacagtttttgtgtaaagtaaggcaagtacttagtagtactgttatgggaaatttttcacttaaggcctgtcccaaaattaattgccatactcagtaaaaggtaggatgcagttgtaatctcatcaatctgctgctgttccttaaggctcactaagtactttacatatagctccactaataatatattaggacagttttggcttttgtaaatgacttgtgtatttttaatagatataaaggttcaaaggaatatttaggtactgctttcatttgaatctggagatgggattcatgttggtctgttgtaagttcttggtatgttcttggtaagttcaagtatgcctccaggagtatttttgaaagctaaatcagtaatgttcaataaattgtctaatcttaatttaaatggaattcaactagtcactatgaatgtgttgaataaaacactggtttttgctaacctgagtgaaagtacaagtgatacctaaaattactcagaggagctcagtgaatctttccaaggttcatcctggttgtagcatttatcaatacttacattgctttttaatggctaaacaatattccattgtatggatgacattttatttattagttcattagttgatagacacttgggtagtttctactttttggtgttgtaaataatgttgtgaacatttgggtgccagttttctttgttgttggttttggttttgtttgtttgtttgtttgtttattttttgagacagagtctagcttcgttgcctaggctgaaatgcagtggagtgatctcagctcactgcagcgtccacctcccaggttcaagcgattctcctgcctcagcctcccgggtagctgggattacagatgtccgccaccacgcccgactaatttttgtaattttagtagaaacggggtttcaccatgttggtcagactggtctcatactcctgacctcaagtgatccacccacctcagcctcctaaaatgctgggattacaggtgtgagccaccgtgccagccagggtgcaagtttttatgtgcaagttttcatttctcttggatatacacctagaggcagaattgctgggtcgtatggtaactcttaacctttggaggaactgcctgttttccaaagaagctgcattattttactttcctaccagtagtgtaggagggttctaatttctccacttccttgacaacacttgttattttctgccttcttgattaaagccatcctagtgagcgtgaagtagtatcacattatggttttgaatcagatttccctgaaggctagtgatgttaaactttttttcatgtggttattggtcatttgtgtatttacttagagatctctattaagatttttgtctatttttaattgagttgtttggttttttaattgagttatgagagttctttatatgttgtaaatataagttccttgtcgcatatatgatttacaagtattcttccattttgtgggttgtctttacacttcccccatcttttatttatttatttatttattttattttacttattatttttttgggacagagtctccctctgtcgccgaggctggagtacagtggtgtgatctcagctcactgcaaccttcacctcccaggttcaagtggttctcctgcctcagcctcccaagtagctgggattacaggcgcctgccaccacacccagctaatttttgtattttttgttgagacggggtttcaccatgttggtcaggctggtctcaaactcctgacctcgtgatctgcccgcctcggcctcgcaaagtgctgggattacaggtgtgagccaccgcacctggcctatttatttatttttagaggcagagtcttgctatgtctcccaggctggagggcagtggcacagtcataactcacagtaaccttgaactcctagtctcaagcaatcctccacctcagcctcctgagtagctgggactacaggcatttgccactacacccggctaattttttcctttttttgtagagatagggtctcactgtgttacccaggctgttctcgaactcctgtcctggcctcaaccgatcctcctgcctcagcctctattttttattttttagtcttaacctagcaaaagatggttgatttaagcacactttaatatctatgcctatattagctctgtaatgtcagtaaattaagagtttcttccgtgagctccagttaggatggtacatcccagtgaagagaaccttacgatgtgatttggtatgttgttgtttcaacttttctgcatgtcctttcctagcaaagaagtctaaagctgtattgttgccttagaggaagtacaaaaaatccaccatctgcctttagataggatgctcacctgtcacccactagccacaacagaaaatgtctgtgtttgagcacttctcatacttggaggaccctagtttaagaaagaagatgttggctgagggcagtggctcacacctgtaatcccagcactttggggagccgaggcaggtggatcacttgaggtcaggagttcgagaccagcctgaccaacatggtgaaaccccatctctactaaaaatacaaaattagctgggcgtggtgatgcacgctacttgggagtcccaagtacttgggaggctgaggcaggagaatcgcttgaacccgggaggtggaggttgcagtgatcacgccattgcactctagcctgggcaccaagagtgaaactccatctcaaaaaaaaaagattttaattgtctcagttttattggttgtggtggaaataacttcaggtcaattaaaatgtgctgtcttttgagcccagttaacaagaacaaaaagttgtttgtatattacagcaaactcacctgtgtatttgtatctttatataagcccagataacagtaaataaagagagcgcagagaatatttactggacagttttatatggctcataaaaagaaaccatctgctttgatcctcccaagaggatttttgctacctaaaaatgcagctgtcctgcttcttgaacagaaatgggtacatcttttctcccacaagaagagtaatagaaaatagattaatactctgggcttttgataatgggtaagcatactgaaatccatctctcaactttcttgtcccaaccccaacacagggacaattccttgggtatgcagttaagtaggccaccctgataaaagattccgtttgggtttatggtagcccttatatattaatgcagcacaagctcctggaaatgcattcaagttttaaggtccagcgttttaagtcaccagaacaggaaaaaaaaaaaaaaaaaagtctgttttcccccctccactgggctcctcctttgacttagaggccccagggagtacaacatggccagctgcattgccattcaatgagtgacacttagaagagaacctctgcataatgcgtgcctcccaagagaatacaggacaggagcacggctgtacccctgccagtttcctgaaagaggaggacattgtattcagtgcaagtcctagaccaaatttcagaaagccactttggtattgcagatttgtcaccatgcccaggacgcatgcacaggtcactagctgactgcttttcccaggacttgagagcagttaagaagaatgagaatgtgactcctttttctgcctgccatttccagatatcaaaatccttatcctttaagcctaaggttattcctaaacctaagtctcagcaaataagaacaaagatgaggttttagcacattttgtgtgaggcaaaagctgaggcatacaatagacactaataaaaggaggaatccatgagttgacccatcagcaggaaggaacttgactactacatagagctgttgtggaattcacaataagtaaattacatgtgcaccttgcagattgatgcaattttcaaagtaatgaaaaacttgacttgctcactcagagagtgagtcccttttgctctgctgcctactttcccttttgctacaatcgtactacataaatgctcactaaactacttaaaagccggaggctgacccatttcctcttctcactgccgtgtaattcctagtggtattacagatgagagacatgcaaaggtaaacagtagttggggaacaaaaatgatatctgggttattccaagtggatgatacctttgttaacacagacacaaggtgaaaatttcttttcccctaattacatttgctttcttttaagttagtgactttggtgtttaatttttgcctctcccctgttttctgacaaattttatgggatatctcccaagaaatgtttctcagccttgacaggacaaaagacatacagagtaacagcagggcagggagcaactccgtgcctgaatgtagcgtcagtctttcctactgatctgggctctctgcgtgaggctcgttttgaaataagcttgagtgagcaaaagaggactctctgcagggtttgaatttaacggtagcccaaagacatcactttacctccaagccaggcagggataggggaacctctcagaattactagcaagcttgagttccaggtggacccctgtttgtggcagcacaagcatcttttttactcagctatggtcctcagagggatgttgaatattatttttctcctgtctgcatttgtgcagagaacagagcagagaaactaatgaaatgcacagagcttcaagtgaatttaaagaagcctctgcattatgaaataaggcaatgatgacctactcttgcttttctttccactacccctaggctcctgtgatcagctgagtgctcgttaattcccacgttcactaaaccatcatagttctgctgattctcagctttagagggaaactctacagtgaactttttcaattagcagtcatcaattactggtcagaatacattataattgtgaaaattatgctccattaatctcattaaatgtgcctaaacctgtaacttgtcatagttcgatacataggttggctatatttaactttccctgatcttatttgccattttttgcaaaagcatcatctaaaatgtagagagagttgtcagtaattttggctttttaataaacattgttttgctttgtcatttttgttttgctgtatccctcctttgtggtccttgttgttttgcctggcatgggtgacacttagccattttaacttagcaaactgtcataccaaaggaaatgcctaattctgtgatattaggcatctgactgcaggctacagtttgttggtgttgaagtaagctgtatgttaagaaaagtatctccattttatttgttatagcaaataacgcatgtccaaggtttgtatgcttgctgcctttctttgagggctttcctgagtgctcaccgtttgtgtgtacacatgcagacctttagggtgatcattctttggttagggaccatctgaaagaaaagtggaccaaaggggaaaatcatggctctggagaagtatgttcaactcataaataggtcactggtgggtataactggaaggctttggaagcccaagtcagcacttagctgtggcatcaaaccatgacagcacagtttgacagcatgcccaggagattacttcagtcctgtagggtggggagctttgatgtttatgagtggaattgggggatgggagagggtaagggtaaaagtaggggggtataatccctgtgctggcatggcccaaatagtattattctcactttttcctgtttctatagaccctgtcaggggagggtaaattaaaccaaagtccctccttaggaaaaagcagctgggtcttaagtagaaacctgctctcaggctgggtgcggtggctcacacctgtaatcctagcactttgggaagctgaggtggacggatcacaaggtcaggagttcaagaccagcctgaccaacatggtgaaaccccgtctctactaaaaatacaaaaattagccgggtgtggtggtgcctgcctgtaatcccagccgctcaggaggctgaggcaggagaatcagttgaaccgggaggcggaggttgcagtgagctgagatggtgccattgcactccaacctggatgacagagtgagactccatctcaaaaagaaagaaagaaacctgctctcttgattttgttgggttttaaatacattgttagtattttttgttttctgagcctttatagaattttaggtacaatatatataaactgtaaactggcccacattcctgagctgtgtctgcaagaagtgtgtcacctggctatttcctttttcttgatagtctgttaaaatttggcaatagaatagtacccagctttccatacctctgagactcttccagaatacagagttggcagttgttggttcttccttccaatggaatgttcccaagagtgtgagaaaattaccgttgaggccagaattttgtcccttttccaaaacaggtgggctctagcatcaatcatgaggtgaattaatgaaggccctttttaaaatgtttgcaccccagcccatctttctttgtagagaagccagaattgcaagaatagccaaaccaggctagtgatagatcaggcccttgagactgaggctcagcttgtagaaaagttagcagaggcaaacacctggtataactgtcagtgctctaccctccctgcttccttttttccctgtactaactagtaacactcgtatccaggtgtcctttaccgggaagatgccaccagccagctctacatagaaggcgataaaacttgggggcacagtcagccagtttaaaaggattgtttgcctgtggaagtgacgcaactagctaagtttctcaatggggcatttgtaatgttctggcacttcatttgtttccttgttaacactctcactgaggctttgcatgagaaacccaacagtccttgtacctttttatgtactttgtggcattagtggtgtttgagtcagtagccaggatgaaggaggataagggattaaggttgagggaccctatgaattttctccttccatctctttaatatccttcaatatagctatcttcctgcaaaagacaggccatacttgaagagaaaagctgatgcccacacaagtgtccagaggaagctagctatttctgctgacatttacatttcattaaatgttgttccctcaaggcatgcactttaaaatttgggtgtattaatgcaacttttaatttaaattaaaatttaaattaaactttacccagcaccacttagcttttccaggacataagtttgttttcgtttataaaaggctggttctctgtgctcatggctccctttatagagcaaaatggctgctaggaggctgagacatgattgtggtcctttcagtgatcaccttcactccccattttggctagtatcaacacattttctgagctggatgagggccgcagggccagtctgagggagagtaggctagttctgagcatgtatttatgttttgcagtttgtcttacacagtgagactaaatataattgcaggatttttatctggtagtggtcctcagatggatggatgagccccgtgaactgtgaaattaaaaatcaaaactgctcagtcctattgtttgcttgctgaacacctcttcccccaccaaaaaaaagggtggggaggcatacagatgatgataggggcagtgaactctttctttttagtccaactgatgttttattttgactgaaactgaaactgctatagatggctagagagcttctgattcctgaagaattacgggttctgacaagaaagaccctaccagttcatgtgactgacctcttttggaagagaacctgcttagtaggctgttggtgtattgtatatggatatgctatttacatagtgttcctgttaagtatttgtattaaatagaattattttgttaatccagaaagagaaaatggagtgtactttttcttaaatatttttcatctacttgctttctctccctctacctctcgcctcttccctttgttctcttattcccccatcccccgctctcccctccaattccagactgagaaactgcttgttctggatggataattaacatggtgctgtggagcaacaggtcccactggtagcgactaaatctgaagtaaatgttaatgtcgtgcaggttcacatgtattaataggcgagggagatgagtgaggttagactcagatcaaccacactggtatatgacttgaaatagatcctcttaattagagcgccaagaaccatgacaactaccaacatcttctacttgcagtgttgagctgcagccttattagtgaatgcaaggcattctaaattaaaactgaactttaacctcgggctgagagttgggatcatctggctctgggcttcgatttgaatctttgaaacagaaatctgtcagtataggcattacagttagctgagggatgtatgtttgtggttttctccttgatgactccagaaatagactgatctagataaccttctcagcagtagagatgggccatttggatttgtttatgggagtctaggtatgttggagtcatgctgaagaggttggctttaggaattggtttgtatgttaatattactcttaacactttgtaggccctctaggcctcacagagagccacaccaaactgagaaacataccctccaattgaatgtacagtctctgaagatttagggctttactgttatgaacagctttataactaacagcatgtctttaagatcaggtagtggttaaaatagtgagctggggccaggagtggtggctcacacctgtaatcccaacactttgggaggctgaggagggcggatcacttgaggtcaggagttcaagaccagcctggccaacgtggtgaaaccccatctctactaaaaagacaaaaattagcccagtgtggtggtgcatgcctgtaatcccagctactcaggaggctgaggcacaacaatctcttgaacccgggagacagaggctacaatgagctgagatcgcaccactgcattccagcctgggcgacagagtgaggctccatctcaaaataaaaaaataaaataaataaaataaaatagtgagttgtaaaagcagtgaacggtcgctttctggccaggaattgtaggccagggccttttaacaaatgatctggtaggaaatttatcaacagcagtgaaaatgggaagatactctgcaagagctctgtcttcatagggcactgtcatctctgcctatggaaaagaatgcatgtctcatagcaatgcaggctatgctcttttgaagccagaaaataaagtagaggtccttggcttgttggctaaaaagctaccagttttccaagacaagccagttcaggtacagaagacaactattccagagctcaccatcccaagtactcagataattctcagaaggaatctaaaggttcaaacatgctggacacagtggcttacgcctgtaatctcagcactttggaaggcataggcgggtagatcaccttaggtcaggagttcgagaccagcctgaccaagatagtgaaaccctgtctctactaaaaatacaaaaagtagctgggcgtggtggcgggtgcctgtaatcccagctactccagaggagaattgcttgaactcgggaggcagaggttgcagtgagcagagatcgcaccattgcgctccagcctgggcaacagagcaagactccatctcaaaaaaaaaaaaaaaaaatagaaaagaaaaaaagaaagaaaagaaaggttcaaacactattgtgctctagacagacttaaacattcattttcagaagaaatgtctccactgctagaaccttccttttatcaggtattttatcaaaatgcagaaatatacctgcttctgaaactatggcttcctcctgaactcctcacgatccttaacttcactgtctttaaaggctcactggctgaattaccatttgttaaatagctctgaattatgaaaagagtaggaaaaaatcgcatgtcaccttcaggtaccaaatgtccaaactttggggctcttcattgattctggcatccataagtaattgagttttatgtgggtctttatggtaagaatcagtttgtagttgattatgtatgttctcattactgcatgtccttttcaccttatctccagcccatgatccctaaaatcaagaaccatgtctgaaataccagcacttagcacattgtctagcctaaaataaacatccaataatttttgagtggatggatgattttgatcctctctccccaaggctactttttttttgaggcggggtcttgctttgaagcccaggttggggtgtagtcgtgtggacatggctcacttcagttttgccctcctggactcaagtgatcctcctgcctcagcctcccaagtagctgggactacagatgcatgccaccacatctagctcatttttgtatttttgtagaaatggggtctcaccatgttgcccagcctggcctctaactcctggggtcaagtagtcctcccaccttagcctcccaaagtgctgggattacagatatgagctacagcctggcctagactacttttttgatggggtagatgataatttgtttgctttgcgttcatttttcagtgtggtacctagtacattgatgagaaagtcatgggtactcaataaatattgactgatgtagaaggaaatgcgcagccttgaggttaaggagggtaccctgatggatatttcactgtgtaccccagaaataagaagactactaaaggttcttaaaaaacaacttgggctctgaagcatatcctgagagtgaaccaaaaacaaaacaacaacaacaaaaatagcttaggctcaagatttcaaagagccaggaaactttgatttgggttccagttctgctacttagtggctttagataagtcagtttcctcacctgtatgatgggaataagaattatctcacagtatggtagtgaagatcaaataagaacatctgttaaaatactttgtgaactgtaatacctagatgtcaatgaaattatcactatgctatttctaggctttagtttaagaaacacattgatgtctttacaaaagcagcattgtctcattatagtgttttcactgctaagcagctgaaactctggtagagtaatctcagtgttacgtgacttttaacttttaatgattttttcttataaaggacggcctccaggaccctgtcttcattgatacatgaggatgagagggagcgagggcagagcctttttttcttgacaggcatatcatgatttaaagactctggtgtgcatgtaattgttttcagagttgcacgctaggcttatgggaataccattcttccaaggaagaaggggtttttgtttttgtttttgggaagaatctcctgtcacccaggctagagtgcagtgatgcggtctcggctcactgcaacctccacctcctgggttcaagcaattctcttgcctcagcttccccagtagctgggactacaagtgcacaccaccacacccagccaatttttgtgtttttagtagagacagggttttgccatgttggccaggctggtctcgaattcctgacctaaagtgacccacccaccttggcctcccaaagtgctgggattacaggcgtgagccaccacacccagctgcggaaggagttttgagatgggcagctgaggtggggagtcctcagaataagtacatgagtaccgtgaggctgcagaatctcctttctccctggaatcctttccctgtcagcagtatttctgatatggagcaaaacagcctctttcagaattggttcctgagcttaccccaatgacagtgtctttcctggaaccatttcatgaatccctttcctctaaaaaatttgcattgagccaggcgtgttggctcacacgtgtaatcccagcactttggaaggcagaggcaagcggaccatttgagcccaggagttcaagacccagccttcggcaacatagtgaaaccctatttctacaaaaaatataaaatttagcccagcgtagtggtatgcgcctgtggtcccagctactcgggaggctgaggtgggaggactgcttgagcctagggggtcaaggcttcagtgagccaagattgccccactgcactccagcctgggtgacagagtgagaccctgcctcaaaaaaaagatagaagtttgaattgaaaagctgccttctaaatagcttgaaaggaattaattgcttgaagcagagaggaaacatggtcatgagaaagctttatgatgggtgattcttgtgttccagctatgcctatgatgatcattttctaagacctttctttcctatccatctaatcttagatattactgccttctcccaagataccatcatttcaaatttgttatttcaagatgcatgttctgtccctaagaaagcagcaaatcttggccaggcacagtggctcacacctgtaatcccagtactttgggaggccgaggtaggcagattacttgaggtcaggagttcgagaccagcctggccaacatggtgaaaccccatctctaaaaaaaaaacaaaaattagctggacatgggggcaggcacctgtaatcccagctactcgggaggctgaggcaggagaatcacttgaacccaggaggcagaggttgcagtgagccgagatcacgccactgaactccagcttgggtgatacggtgagactacatctcaaaacaaacaaaaaaaaagcagatcttaagaagtgatggcctcagccaggtgcagtggctcacgcctgtaatcccagtactttgggaggctgaggtgggtggatcacttgaggttaggaggtcaagaccagcctggccaacatggtgaaaccccatctctactaaaaatataaaaattagccgggtgtgatggcgggcaacctgtaatcccagctactcgggaggctgaggcaagggaatcgcttgaaccctggaggcagaggttgcagtgagccaagatcgcgccactgcactccagcctgggcaactgagcaagactccgtctcaaaaaaaaaaaaaaaaaggaatgatggcctcagtcttttaaatgttttgtcttcatctgggagacaatgcttgggtttccctggactactccctaaattcatagcccctatccatactttagggcaggcttaacaaagggagcctgtggtcattatctagagttctgaggaatgtgtggttttgtttgtttgttttttgttgttgttatttttgagacagggtctcactctgttgcccaaactggagtgcagtggcacgatcacggctctacctcccaggctcaagtgatcctctcacctcagccccacaagtagctggggctataggctcatgccgcctcacctggctaattttttgtatttttagtagaggtggggtttcaccatgtcgcccaggctggtcttgaactcctgggctcaagcaatccacccacctcggcctcacaaagtgctggtattacaggcatgagctactgcacccggccagaagtgtgttcttaaacttggtaactctaaaagtgatcctttagaaactagcaagatgctacttctgagagcctcttaatacaagtttaagcattttaccttgtgttaagataaacgatattgaaaatcaaattgtttaaagaagattaaaatgagtagaggtgggatggttcagtaagtacaggcttgccagtatggacttggactcctcttctgtctcattgtgtagtaacttagaaaacataagtaatttcatgtgtgatttaacccacaaaacagttgcctgccccattgcattacctcccctcatagctttgaaggattacactcacttcctagaagcccattccttagtgttccccagttctttaaagctttattgagtacttactacatgccaggcattgtacagggtgtggaggtacaaaggcaaatgaggcatggagaaggggattcagacatgtaatggtttgaatacagtgtggtgcagaagtgctctgtggaaccagagactttcagagaaagcttcctggaaagaatacgtgacttgagtctcaaaagataaagagcttaccaggtgaagtagttagggaagagtggtgtagttgtgggtagcagccctggagtgagcagagacacagatgagaaacagtatggtctgtgtagggagccggccaactgattgagctggagaaagaagagggttctggccacaggggtcttatcttctctactttaaatgttttaaatgtttgatgtaggatatcttggtacaaagccagtgggcagatgaacagaaatgatgagaaacagaatcagaagtgacacccttcagggttaattttgataggacagctactgaagcatagcagagtctgtaggcctttgaaaattacttgcatgcatttcagtagtttagatgtggccttttgtagaattacattggctagaatgagcggagacttacaggtgacattcacctgtggtcctctagggcttggagatctgtcccagcaggccattgtttttccagtttcctgattcctggtaagcatcctcctgagatttcactaaggaaacagggaggaagggaagtaatgagctgtgaagccttggtgggcatctgacatgtaagcttggggctctggggaaacagggagctaagaaaatttgccaagtcaagtgctattttatgtagaaatggtaaaacagcatagctttaagctctgagatactcaagtttggctgggcacagtggctcacgcctgtacacccagcactttgggaggccgaggttggtggatcacctgaggtcaggagttcaagaccagtctgaccaacatggagaaaccccatctctactaaaaatactaaaaaatttgccaggcatggtggcgcatgcttgtaatcctagctactcaggaggctgaggcgggagaattgcttgaacatgggaggcggaggttgcagtgagccaagatcgcaccattgcactccagcctgggcaacaagagcaaaactccatctcaaaaaaaaatactcaatttttttttttttttaccatttcccccattatttgaagaaaaatttcctgcataccattccaagtaggtgacttagccaagaactcaatggtaggaatttcttaagcataaatgtggtttttgttgttgttgttgttgttttgtttttgagacagagtctcactctgtcgcccaggctggagtgcagtggcactgtctcggctcactgcaacctccacttcccaggttcaagcgattctcctgcctcggcctcctgagtagctgggactacaggcgcgtgccactacacccggctaatttttgtattattagtagagacagggtttcaccatgttggccaggctgttctcaaactcctgacgtcgtgttctgcctgcctcggcctcccaaagtgctgggattacaagtgtaagccaccatgcctggcctgttttttggtttggtttgtttgtttgtttgtttgttttgagatggagttttgtcacgcaggctggagtgcaatgacataatcttggctcactgcaacttccgcctcccgagttcaaaggattctcctgcctcagcctcccaagtagctgggattacaggtgcccaccaccacgcccagctaatttttgtatttgtaatagagatggggtttcaccgtgttagccaggctggtcttgaacttccaatctcaggtgatctgctgtgtgcacaacctctgtattataaaaatacaaggagggaagagatccaatcattgtcctagtccctctaataaaataagtaagagaactgctgaaatgggcaaagcatgagaagtgccaaaagagaactaacccatgcagcaagaggtccaagatacaggagtaatatgaactcatggaaaagctgtttggttatctattgttgcataacaaactacgccaaaactcattggcctggtacagaaactcattattatctctcacagttctgagggttgcctgggctctgctgggtggtttttctgtttcacatgatgttggctgggactgcagtcatttggaggcttcactgaactggtaagtccaagatgactcactcacatagcagtagttgctgctgcgtgttggcttggagttcagctgaagctggttttttgttttctcaagatggagtttcactctgttgcccaggctagagtgcagtggtgtgatcttggttcactgcaacctccacctcccaaattcaagcaattcttctgcctcagcctcccaaatagctgggattacaggcatgtgccaccatatttggctaatttttatatttttagtagagatggggtttcgccatgttggccaggctggtcttgaactcctgatctcgagtgatccaccagcctcggcctcccaaagtgctgggattccaggtgtgagccaccacgcccagcccaaaactgttgattggaataccttgtctcctccatgtcctctctcatagcatgacagcagggctctgagatggaactttccaagcatatttcttaaaaaatagaatctgcagatctcttaaggccaagctttggaagttgcaacattgtcacctctgctgcattctgtggtcaaagcaagtcataagacaagcacaattcaagaggagggaaagggactacctgtggatgggaggcagagcagataatttgcagctgtctttaatccatcacagctgattgaggcaggtatgaaaggatgaatagagttttgacaggcatagctttctaaaggaagagtattctagaggaagaaataggaagtcttccatttgaatagtgggaagagcacctgaaggggtctgggaagatggaacggtgggaccatgtgacagggctttgaacagcagttagaaaagcttggctctacactaacaggctttaagaaaacagtgtggaggacctctcagttattttattatacctttccctacaaacccagtgttaatagctctggatttggcttctctctctaaggtgtgggaagggatggtcactccttaggttattatgagtgatgctgacttaggcattttggaggagacaaccctagcagtcctgcaggactggccacaataggagtttaggaacatgcaaacctagctaggcttttcctactgcctcaaagggctagttatttagtcttgcccttgtctgttccccacagtaaccctccactgagtgaagaaatgttgcctcctggagagtggatgtgtcaccggtgcactgttcgccgaaaggtaataatgctgctttctgaagactgtccagaaagcctgatccagagcactgatatgctagagctaagacggcctagccctgaaggcattcttgtcccttcttcttgtctcttccagccctggaatcaccccactcttcccatggtgactgtttggaatccagtagggcctaaaaatccaaacatgggctgctgaaatgggcagaagaggtgtgttaacttactgagccatgtttagtcactagtgacaggagtagtcttaccttcttgttgtcctcctaataagtggccttatccatggctgaaaaacaaaggctgcttctccagcttgatggaaaatggagttttctctcaccccagggcaaataagtcactggtatccagagacttggcatactgacggagaggattttgaacgcatttgtaccccaagttgcctaatctttctttagcttcccttccttcagctttgataattcagtactggcttcaagaacatggtttattattttctactttgagaactcttgtgggtaacaagagctaaattctcccttattaaaaaaggaagtaggtgtgcttgcacccaaattatgattgacccaaccctcaaattacaggctatggattagaatttgtctgtgcattgtaatccacccccctgtgctccccacactaattatacaccaagcaactttcctatgttgtgacctcacctctatttgcctggtccccgaacatgatgtcacaatgaatgatgacttccttggttgcagaaacaggatgagatgattaagattgtggtttatgtgtgtaacagtttcagcctttaagaaagaaagtaaacaagcagacattatttttcaaatacgtgcataagggttcatatttaaaagcaagccaaagccaggtcaaccacctaaccacagctgtagttaaatttctccataaaccaggctgtcttccagcctctccaccttccaagatcctttcctgtgcatccctaattaggttagagcagggcctgttagaggcacctgccagccaggagccctctcaaacttgccactcaaaaaagctggacctgaaaaggtttaggggagctgaaggaaaaggggtaaagacggtggagaaaaggaaatattatgttagtgcccatcgtgtgccaggtgttttaattacgttatcccattatctatccatccagccatagatggataccgaatgctggccgtaggtttccattttagaaaggaagaaacggaggctcaaaaatgtagattaactttcccaaggactcaaaggtattgacagaaccaatgtttgaaccaaattctctcattccaaacctctgttacctcttcatcagttttctagaaggagagctacttgttggggattacagtatgcccttttctaacatggcacttctcctgagatgcctctcttacctttcacatggacctctgcctaccagtgccaagtctgccttttccaccatcaccagcactactcccctttggcctcttgtatttacactgaagtggattgaaataatacatcctctggccttcatcagctcctgacattcaggccctatcatgattcgtagtggaagactaggtcctactccaactccaaattatccctttcgtatatatgaccctttttatctccctccaccatatccctgagaggaggaggagaaagatttttctgtctcattttacagatgaagaaattcctgcccaccagcctgagtcaccacaaggtcagaggggatccgtggcagaaataggacaagatcacaggtctcctacctggagatcagtgttaaaccttcatttgaccactctatttggagtcctggaggaaaatgtactatcagatatccagtcctactgagtacacttaatctttttccatttccccactttctaagaagtgtcacttattttgagcaaagtttttatttttaaaaccattcaggaggtcagaaggctctatagtgatctcactgattttttttttttttttttttgagatggaatcttgctctgtcgcccaagctggagtgcaatggcgcaatctcagttcactgcaatctttgcctcccaggttcaagcgattctcctgcctcagcctcctgagtagctgggattacaggcacatgccaccacacccagctaatttttgtgtttttagtagagatggggtttcaccatgttggccaggctggtcttgaactcctgacctcaggtgatctgcctgcctcggcctcccaaagtgctgggattacagacgtgagccaccgtgcctgccccattgatttttactattggtctcactaaatttattctcactgtgttacctttttagccctttaccctatactttatagatgttgtatgtcatacaatgagttaatgttaatgatatatattttgtatagttattcctaacttaccatgctttttggtgattctctgatgcaacagttttgtcagctttagttcagttagagttgtgtcaactttaacagaccagtgttccaagtgaccaggtagatgagtctgtgatatgtgaaggccttttacagttttgattagtggtctaccaggactttgtagcacccatctctttgtttcatggtacttttcatgatgggcccacctgttcatttgcacagaaacgagagcagaaaaaggagctgggtcatgtcaatggactggtggacaaatctggcaaacggactacatcccccagcagtgacactgacttgttggacagatcggccagcaaaactgaactaaaggccattgcccatgcccggatcctggaaaggagagccagcaggcctggcacacccacatccagcgccagcacagagactcccacctctgagcagaatgatgtcgacgaagacatcattgacgtggatgaggaaccagtagcagcggagccagactatgtgcagccccagctgaggcggccctttgagctgctgattgctgccgccatggagcggaaccccacccaatttcagttgcccaatgaactgacttgtaccactgcactaccaggtcagccaaaccatcatcatatcccttcccaaccccagtttccccaaaggaccagcacaagagcagtgctgcctgtggagtcactgttcatgtagctactgtcttgggttcctgttcctagttctgcttggagagatctttgaaggtcttagccattacagagcttactcagttttccattttctcagtttctgaacttctttccttcccctcccccagaattatctttttccttttttttttttttttttttttgtgagtctcactttgtcactcaggctagagtgcagtggcacgatctcggctcattgcaacctccgcctcccaggttcaggcgattctcgtgcttcagccttccaagtagctgggactacaggcgcatgctaccatgcctggctaatttttgtattttcagtagagacaggattttaccatgttgttcaggctggtcttgaactcctgacctcaggtgatctgcccacctcggcctcccgaagtgctgggattacaggtgcgagtcaccacgcccggccccagaattatcttttaaaaaaaaaaaagtattatacattcacatggttcaaaaatcaaaaaatattaagggctacaatgaaaatttccctcccacccgtctgccatttgcctactttccaccttcctgctcttcacaggtaaccactggttgattcttgtttattcttctcaaatttctttgtgcatgtaaaagcaaatacagatatatgctgattaattttcccttaagtaacatgctagttaaaccattctacacgttgctttttttttctcactttaaaatatgttctagaagtcttttcatattaatatagaatttttttttttttgagacagaggctgcactgcactgtggtgcagtggtgtgaccacagctcaagcaatcctcccacctcagcctcccaagtagctgggaccacagttgtacaccaccacactcagctaatttttatattttttataaagacagggtctcactatgttgccagggctggtctcaaattgtgctcacacgatcctcccgcctcagaggatcccaaagtgctgggattataggcatgagccactgcgcctggccttcttgctttttttaatggttgcatagtagttctttgtacagatacgtcataatttatttaaccagtgccattttctattaatggacattttctattaatggacatttaggttccaaatctttcattactactggtagtgcttcagagaataactttgtaaatacatcattatatacatgtatagatgtgtgactatgtctataggacaataaaattgctgggtcaaaactatatagttttgatagatattgccaaattgtcctccattctttttttttaagtcctggcttcttgatactgtaaagcttctaggtcttagtttttattcccaaagaaagtgaaattggtaggcttaagaaggatgcatatagaatcaaagcttctctgatttttatgaaaatgtgggccaggtgtggtggctcacacctgtaatcctagtactttgagagatcaaggcaggaggattgcttaaggccaggaattggagaccagtcttggcaacataatgagaccccatctctcaaaaaataaaaataaaaaagttagctgagtttgatggcccacacctgtagtcctggctcatatggaggctgaggcaggaaagttgcttgagcccagtagttcaagactgcaggccaactccacagaatagtccttgttgactatgtggcttggacatttacatttcttaggttgcctgtatctaacctagcatttctgaccattttatgtttgcaaaacagttagatgtgtttctgccatagaacaggtgacttctggttctgacttacgtattagtctctttttttttcctccctaatctttcttttttctaacttaaaatcaaccccaggggcctcagagagcaattcatgcttaggccatgacacatgcttaagatctgtttttgtcacttaatgttgtttccatattgcaggctaggaactctgaagccagggatagctcagcaccatcattttcttttctaggttctagcaagaggagaagaaaggaggaaaccacagggaaaaatgttaagaagacacagcatgaattagatcacaatggtctcgttcccttacccgtcaaagtctgcttcacgtgtaacaggtattttctttcatactaaggggctctttctcattatttagcagatgatactttttctctcatcacctcttccagaccatgtatgttaaatgtgaacagcccatattctgatagtatgagtacatggagactaactaatggactgacgagagccttgaatgtgtatgtgttaacaaattttctgaagaatcacagtacaggagtactgtgaactgtgttgaggccgagcacggtggcttatgcctgtaatcgcagcaatctgggaggccgaggcggtcagattgtttgaacctgggagcttgagaccaacctgggcaacacagtgaaaccttgtctctacaaaaaaaaatttttttaatgaaccaggtatggtgatacgcacctgtagtcccagctactccagaggcttaagcagattagccctggaggctaaactgtgatcacgccactgcactccagcctggtcaacagagcgagaccctgtattttaaaacaaaaacaaggggccgggcgctgtggcacatgcctgtaatcccaacactttgggaggccgaggcaggctgatcacaaggtcaggatattgagaccatcctggctaacatggtgaaaccctgtctcaactaaaaattcaaacaaacaaaaaaaaattagccgggcatggtggcaggcatctgtaatcccagctactctgaaggctgaggcaggagaatggcatgaacctgggaggcggagcttgcagtgagccaagatcgcgccactgcactccagcctgggcgacagagcaagactccgtctcaaaaaaataaataaaaataaataaaaacaatggcccggtgtggtggctcacgcctgtaatcccaacactttgggaggccgaggcgggcagatcatgaggtcaggagatcaagaccatcctggtcaacatggtgaaactccatctctactaaaaatacaaaaattagctgggtgtggtggcacgcacctgtagtcccagctactcaggaggctgaggcaggagaatcacttgaacccaggaggcggaggttgcagtgagctgaggtcacgccactgcactctagcctggtgacagaccaagactccatctcaaaaaaactgtgtttacacactagaacaagaggagttggacttaaactaaacattaacttgaatcactaaagataagtttaaaagtagtataaggatctatgatagtgtgtattggactggatgacttccaaaagcccctagggctgccccagttatagtctctgggacactggtttccttcaaataggatctctttgacagaaaccagctgcttcagttactgaagctggacttgttggcttgggtgtgttagaaggactgtattatggtcagagcagggtagcaagagaaagtaactatcaaaaagaaatgtttcacagcaaaaggtatagggaaagggaactagatagtagagtggcagaactctgagccaggacaaactgtggctccagtgcatcttggggaccccaggagtattgtagttacaaatcgtagttgtcatttgcttagtcctcttttgaaccctgcttacatgaatacattacaaaatcatctttccagcacacctctaattgtcagttctgctgagtgcttcatgcagaagagaaatattttcttgctatagttaagactccagaaaggttgctagtgatttttttaatgaagtaggctctctcttttaagaagtaggaagatcagagcagagttcactgttttcccctagtgagtactgagcattgatcatccctactctgccactttagctgtactccaaataaacattcactttcccgcaagacatgttcttcttagaagagagaataatgaagaacctaatgggagcccccaaatccatccatgttgtttttttgttttgttgtgttctgttttgttttgtttgagatagagtctctctctgtcacccaggctggagtgcagtggcgccatcttggctcactgcaacctccggcctcctaggttcaagcaattctcctgcctcagcctcccgagtagctgggattacaggtgcccaccaccacgcccagctaattttttgtatttttagtagagacagggtttcaccatgttggtcaggctagtctcagtctcagtctcctgacctcaggcaatccgcccacctcggcctcccaaagtgcagggattataggcgtgagccatcgcaccagccccatccatctttctaatcataaatgtaactgaatcactggaggaagataggggagaatgttaggatcaaggaggggaggctgttccacaggtcaaagttagtttgaattttccttttcttgccacagaaatggccaacatctcttttttgcaggagttgccgtgtggctcctctcatccagtgtgactattgccctctcctgtttcacatggattgcctcgagccgccgctcactgccatgcccctgggcagatggatgtgtccgaatcacatcgaacatgtggtggtaagcacagcagtgtccattcagtcctcaatgggcatagctggagcgtggactgattagcagaaagcatattaaggtcagcttggtgccaagttcaccacattgtcataggtactggtttctgcaggccaccctactcaattctgatcattttgacatatttcagctatgctttttctcacaatgttttgtttcagctgcccatacagacttaactcactagtgcttggttgtttgtaagtgacttatagggaattaagcagttgatgttatagccctaaaaggggagtatattagatccaaccttaaggaaataaatcgttggctgtctggggtacatgtgtcccaggcaccaaatgaagtttagtaaataagctgttgaatgaataatagtgtgaaggtcctattgctttctcttccaagagtcttgggtttattttccagactgaggctagaaaagagctgtcacttgctatctccaaaagaagtttaggacatctctttataggcagttagaacagtcactcacaagattgaatgggagaggatttgaggaggaggagctccctcataagagcagccttccaaattaaaaaggctactgcttaagacattgtctgtcaaatgatgataaccatggaatgaccgttggccttcatggcagtgtgctgctgaccttgcactgagaggaacctcggttaaagacttgcacacatggaagagaagagttactttgtgttcttttgactcatgccagtcaaagatttttctaggaggaaaatctagtcttgttttgcttccttgtttctctcctagtcttgttttgcttcctgatgaaccagaaaaaaaatgaccataagcagtttacccaaatgtgaaacttaaagagcagctttctagcagttgagaaattcttagtgggttaaatttttgttagccacttaaaggtttttcctgatttatgaattaggcagctgccacagcaggtcctttcttttgaattaaaatgtaggagcccagatgtagaataggaaaagtggcataatttctgtatgccttcgtatattattgcagaaactcttctttcttttctccttttggcttctaagagcaatccaaggttttcccttccagtagaggaagactgatatcaagatgggttaacttatgctccttggtaccacggagtaggagtagagcagagcacacggatttctggttctgacccagttgtcagccaagctcctatgtaggacacagtcctgcttttcctattagagagaggcccttcctgggaagggagtgtgggtctcttaagggtcgaagcatacgtcttctctgaaacctgtgctgctattagagggccctgacagaggcttctctgagctggaacagaagactgtcagaggccgaatttggaagggcacgtcttggctaatttctcctgccttccttaaggctctctagggaacaggaacatattggctctcttccactggactgggcagggctgagtaggaagtctcatccatgttcccttgctctctgacaaagagtgccgacatcctggtccctaattgagggaacctatgtggctgagggcttctagtttttaaacacagggaatggggttaactgggataggaggtgccttttgaggctcaccacaaggttgtgtctgctttgtccctagctgaaccagaagaatatgacactgagcaatcggtgccaggtgtttgatcgtttccaggacaccgtttcgcagcatgtcgtcaaagtggacttcctgaaccgaatccacaagaagcacccccctaaccggcgtgtgctccagtcggtcaaaagaagaagcttgaaggtgagtcacaatcaggtgcaggcaagatggtagtctgcctgccatcatgggttagacagaggatcactgtcccaattttacaggcagggaaactgaagccccagaaataggtttgtggtgtctcgtgagtaatgagtgtgaccttcattttaatacttggggatgatggtcaggattatgagggccgaacctcaagttagccttcgaagtctaccagtctctagttttccaaaggataagcactcttcagcccatcccaccaaacccaaatgtgctctgttgttactgccaccctcacctaacgctcattctatctgttcctgttagatggcctctgtccaagaggcaaagtaaaggtggggatgattaagcagaaagagccatgtggaaggtgaagagctaatcccagctcaggaacttaagtggaaaatatctaaaggaaacttgaatctatttttccaggctgctgttaatatatcaccaatgctccaaattgtggcatagctgtaataatgcctaatatttatatgctcttgacattggccaaagtgtgtttacagagattgacagaaaaatttccctccttgaaaagcatttggtggtagtgaggatgtttttaaaccattcaatcccctcattcagttaacctagagggtccaacactatatacccatatataaacttgtttttctcttttgaaatgatcccacagtcttatgtgctaacagaaaccagcacttctcaagtatggccacttggtggcagccacattttaaaatcaatcacactggccaggcgcggtggctcacgcctgtaatcctagcactttgggagaccaaggcaggtggattacctgaggtcaggagtttgagaccagcctgaccaacgtggtgaaaccccgtctctgctaaaaatataaaacattagcctggcattgtggcaggcacctgtaataccagctactcgggaggctgaggcaggagaatcattagaacctgggaggtggaggttgcagtgagccgagatcgcgccattgcactccggcctggacaacaagagtgaaactctgtctcaaaaaaaaaggtcagtcacaccactgccatcaccttcagtgggtatcagcactagcaagatgctaactgttgaaaattgtataacaaacttaactgggcaaatatttatacatcagtggagacacaggttttccaaaactagattcaaatatttcggaaatggatgatattaaaggtagtatgcctcatctcagtgaaacagatctaaaagtaatccagactgtgtaattcactgtgtagatttgtcagagagcatagctgctgaagtgaacgggccaggagaccttgataaaaatccccttgttgtatggtgcccctcccaccttttaagtgtttctctagtgaggaaactcaaagggcatgagttacctgcaaagcattttgtacttggacagtttgagagtgaaatgaggaccgtagcaccatagaacattggtgaagaaccccagctctctcctggaacattagcctttacacttgattctagcaattcaggaaaaatctgctgagaactttgtatcttcgttgcgaatttctcttccacttagcccttcactcttccccaggggtatcctgttcttaccccaggggtagtggaataaactagtccactgtttattcctcctcctctcattcctgggtgatctcagaaagcccatggcaccagctaaggccatcaccagcccatggtgatgactctcaactccatattccatgcctttctccttatatccagactcatatctgcctgcccatcccacagatatctcaggatgaacctcctccataagaccagaagtcttctgcctctccacatctgctcttcctcctgtatctcctattgcagtaaataacaatgatcactactcagtccctcaaactaaaattctgggaaccattttcagttctcccttgtctaccataaggattttgtcaccaaatctgttggttctctggatgttttccaaatccacaaagtgctatcacatctctatgccttacatgcttctccccctcccttatttttcctttatctgcctggaagatccttctcaacttccaagtgtcaacccaaatactgacttcctataaaatcatccccaatcccaaattcctgtcccccaaactaaaataagcactatgtttttaatagcaccttagacatgcttctcttctagaacccattaccttgtgttgtaatatttctgtgtttatctccccactagactgtgagctccttgagggcaagtcttaacttttattcatctctggatctctagaacttggaacagtgcccagacacaggaggtgctcaataaatgttggttgaatgtatgaatgactctttgcttgtgtggctctttcattcttacatggtgtgattcagagtgtggcttctgtttttgttgcacaaagacgtctttagttgtttcatgagtcatgaatgaatggatgaaggaaactgacattgatggagtgcttatcatgagccaggcctcatgtcaagcatttttttttttttttttttttttttttttttgagacggagtctcgctctttcacccaggccggactgcagtggccctatctcggttcactgcaagctccgcctcccgggttcatgccattctcctgcctcagcctcccaagtagctgggactataggcgcccaccaccacgcccggctaatttttcatatttgtagtagagatggggtttcaccatgttagccaggatggtctcgatctcctgacctcatgatcctcccgcctcggcctcccaaagtgctgggattacaggcgtgagccaccgcgcctggcctaagcatttttatctctcagtgactgctcacccactcccaaacttgacactgagcaataagaacccagagtaccactctgaagccctgtccagtgccagtcttacacctttcaggctaaagcagaagacagaacgcagtggtttctgtgttctgcaggccttagaccttgatgaaggaaagtggaggccccacctgctatttccatttctgagcctccttttcctcagcagaccccagagtggatggtcccttgagcaccagcaccacagacagaacagcataccagggcagaatcaactagacatgttggaactatctccctctccttcctccttctatctatcctgaacaggttcctgatgctataaaatctcagtaccagtttccaccccctctcattgcacccgcggccattcgggacggggagctgatctgcaatgggatccctgaggaatcacagatgcaccttttgaactctgagcacttagccacccaagcagagcagcaagaggtgagtgaaggtggggcggggattccaaatccaaccttccttctgtgtcaccacagctgttatcagaagtagcctcagtgtcattctcattccagtccccacccaccctcatcctaacccctcaagagttgagtattccagggggaacttctggctcaaatcccaaaggcaagtaagagatctacaaaggcaactggtctgcttctctccatcgttaccccagtgcactgtgagatgggcaaatctatactgtagaaagagatgagtagacccatagagaggttaggtgatagtgctggacataccacaggtgctcggggtaattgctgaatattggtcacaagtaagccttaaaggcagagtcaaaatgcagatcccaagctctgttggccagagggagtgttggcctgctgagggtacctataagtcttgcttgggaatggaaatggaattctatcaggagtcaagcacaccctttgtgagcattcatgatgggacctcggaaactgcttgtcagctctgctgcagccctggccactgtggcaggaaggaccggcgcctctcaggcttctcacccccctctcctctccttccattgcagtggctctgtagtgttgttgcgctccagtgcagcatattgaaacatttatctgctaagcagatgccttcgcattgggactctgaacagacagagaaggctgatattaagcctgttattgtgactgacagctcagtcaccacctccctgcaaacagctgacaagacacctacaccttcccactaccccttgtcctgcccctcagggattagcacccagaattccctgagctgctctccaccccaccagtccccagccctagaggacatcggctgcagttcttgtgcggaaaaatccaagaaaaccccttgtgggactgccaatgggccagtgaacacagaggtgaaagctaatggcccacacctctacagcagccctactgattccacggacccccggcgacttccaggcgctaacaccccactaccaggcctctcacaccggcaaggctggccccggcccctcacgccaccagcggctgggggccttcagaaccacaccgtcggcatcattgtgaagacagagaatgccactggccccagctcttgcccccagaggagtttggttcctgtcccaagcctgcccccttccattcccagctcttgtgccagcatcgagaacaccagcactttgcaaagaaagactgtccaatcacagataggacctccgttgacagattcaaggccactgggctcacccccaaacgccacccgggtgctcactcccccgcaagcagcaggagatggtatcttggccacaacagccaaccaacgattcagctcaccagcgccatcgtcaggtgagtgctgctcagccttgggttgatttggaataattttatgctctttctggcaaataagattctaaaagcacttatatccctgtgaatacttcagaggactttggcctttgtattgtttgtcttactctcatttccgtaatagaagaggaagcacatgttaacttgtcccgtttataaatgggactgcttaggctctgaaagcttcagtgatttccttaaaatgacctactgagtcagtggcaggattggaaccacagcccaggtctcctgactccatcccataccttccaggcctaggcctctgcctgttttgttctgtcaccttaaaagaaggcagggtgctctctggaattactatgatcagcctgaggttctgcgtgatggcctcagtattgtcagatccacacaaaagaatggattcatgcctgatgcatattctcagaaagagttaatctgatgaacttccatgtcaggaagcagggctagacagcagcactgtctttcagaggagctgtagagtgggatgcccacagggattgttctagcccagaagcgtgccctcaggccacatgccaaagggcggtccttcaggtctgtacttggcctactgtggacctgctctctcagctgtccccagagagcactcaggaccttgaagttgctgaccccagcatctgaaccaggtttcagatgctgccggaaccctctgtggtctctcccgtctgaactgaagccggcctcctagtcagctgggagtctcggtaaccagatgattgtgatttctctgcatgggagcccctggtcccaggatggccccgctcccaggctgttttcctatctctgtttatcgcttaaaaccagcgtgggtagattctccacgccgtgagtcatatttcagtaggcaagaattataagggcaggcactacttattttaaagtagaggcagcagggaggtggtcatggcccaaagaatgaagctgccccaccactttccccagagcagtggatttcagtggttctcagtgctctggagactcctgcgtgcctgggtgctttgtcgttccatctgcccttcctcaccacacgtttttagctctaggagttccagagcctatgggttgagaatcaagaagggaacatcaccttgggtccgaaatccagacctgtctcagcagtgggggattggacggtgggtttccctcaggcgacgtaagtaacagtcttcctgctccgtccccagatggcaaggtcagccccggcacgttatccataggaagcgctttaaccgtaccctctttcccagccaactctactgccatggtggacctcaccaactcacttcgagcatttatggatgtcaatggaggtgagtgaatgagctgctgctgttccaccgtttgctatgttgaaggtgctattcctatacagcattcagctcatttcagaaagggagggaagggacacctgatcccagaggcctagggggagatgggaatgaggagtatccttttggatgggggggcggggtgaaaaagaaagctccttctgtagctctgccttctacatgtgcatatacacataatcaaagatgaagggaggacagagccaagctgaaccagtgagacgagaacaaaatcactttaggcagatcacctggatttgcagaataaaactaagatcctcactcccaaaggagggacctcatctgtgggaaacccccaaagtccaggagaacagggacagatcttgatctctgtgaacacaaggtgggtagaaagttcaagtctcaatatcagacatccaggccctcccccacagacaggcaagtggtttattccactctgcctttctaggggcactttaattaaaatcagtccacccaactacaggaggcagctgcacaggctgcattggggcccatctcactgcaaatggcaagtgagatgcccagctgcagatccttgtacgctctgcactcaatgctgtttgagtaaaaatcacttggctggattttagaaatgccaaactatttgctctgtgaccctgatttgcttccacattccacttcccatctcagctgctttttaatctttctctttggctaatagaaatcgagataaatatgctggacgagaagctgatcaagtttctggccttgcagagaatacatcagcttttcccctcccgggtccaaccttcaccgggcagtgtcgggacacatcagctggcttctggagggcaccacatagaaggtgcgcatgtacacacctgtcaccacatcatcagatctcccctctacgtgtgcgaatggtcaccttgcctccatggagaatctgagcttccagtatctcaaacctccttgtgtgcttttcatgggcttaataaagcaccatggtttttttctgaagagagcaggaacaagatggcaaccacagctttctgatcagacttggggaagtctgctgtaactttctttcatatataagtccacttcgagacacagcaaagcagctaccagtacctttgggtatatgtagtgtactttctgcttacttgctttcaaatatttgaattagaagggcttcccgactgagtgcagtggctcacacctgtaatcccagcactttgggaggctgaggcgggaggatcacttgagcccaggagttggagaccagcctgggcaacacagtgagaccctatctctacaaataattttaaacttacccaggcatggtggcatacacctgtaatcccagctgcttggaaggctaagatgggaggatcgcttgagtctgggaggtcaaggctgcagtgagctatgattgtgccactgcactccagcctgggtgacagagtgagaccctgtctccaaataaataagtaaataaataaataaaattttaaaaagaatggcttcccaagagggaacttttcaagttcaagttgagaaatagaataacactaggccaaccttctggaaattttccccaagtggttaactctgtttcagatatgtctgagcattggccattaagagccttgctgcttcaaagtgtggttcgcagaccagcagcatcagcagcccctgagagcttgttagaaatgcagagctcaatgcattggttttttgcctatttttaaagaaaacagcaaaagaaatgcagagctaaggcccctcctcagacctattgaatcagaatctgcatttcaacaagatctgtaggcgattcttatgcacattaaagtttgagaaacactggtccatgccgtctgtttttccatattctccctatagtaccagctggaatatcccggattagccagccaggagcccaggaacttacacagtactgtcatctctgacttctctgaccatcttcaaagatggtcctctgtaccctgtgttggaaatgctgtgggtggggagagaaagccttaccctgccgcagctcagtgttggatgtgagtttggaaagatgagtcatccagcgggattttctccaggccatgagccaaaggtccagattttgttggtttatgtttggatcacaggatctgagtttctgaatgatcctattcctatgtttgtcttgtagtgcaaagaaaggaggtacaggcccgagctgtgttctaccccctcttagggttgggaggagctgtgaacatgtgctatcgaaccctctacatcgggacaggtgagccagccaggaagctgggagagacactgaatctgttcagccctaaagactgacacccttacccacagaagttagaaaggggtgagggaagccctttccagagttgactgctttaaatcagtggatagctagacaagagaaactaagaatagagacaatcagccagtcacggtggctcacgcctataatcccaacactttgggaggacaaggcaggaggaacacttgagcccaggacttcgagaccagcctgggcaacatggtgaaaccctatctctaccaaaaacaaatataaaaaattagctgggctaacatgcctatagtcccagctacttgggaggctgaggtgggaagatcacctgaggctgggaggtccaggcagtgatcctttttgtgcctctgcactccagcccaggcaacagagtgagaccctgtctcaaaaataaaagagacaatcagttccttgtcttcccttgttcaggcccttttgctttgtctttgcccagtgttgcaacagcagagatgaaagtcagctctgactactgcccagggaggcactttaaacactgcagggaagaacctaaggagaaggcagatgctttgtccctggtggtctttgaaagagtgatagactcacacatacccaatcttcagttagccctgtatctgttttttgttttgttttgttttccctaaaagtcctagagaccgatagctctgtatctggtacagaaggacagacagattagcccttaccctagaaacttccctttctttaaggtgataagattttctaggctctgcaccccgatgttgtattttcatagaaatatcccatcctcttcagtagctcactcttcccttctgggtagcagccacatgttctaaagcagatcagctggcagggacagctgttctttatcaggagcttggaaaagacaacagtttttgttcaaaaataaaaggggagggccctgagctactcacccttgaagtctctgctagtgccaacccagaagctaactctctccctgtcttacctccccgacacatgcaccttacaatctgttctctgccttccttttcctctactcctgccaccttgcaggagctgacatggatgtgtgccttacaaactatggtcactgtaactacgtgtccgggaaacatgcctgcatattctacgatgaggtgagggccggagatgcggtgggagggagctttcccaacctgaggcctctcccaggcagtaggtttttgttcagtgccctgaggggagggaagagggattgggggtcctctctttttcttccctccctgtcattcctggaggaggagagtcttgatgtgaaatagcatcctacctgggaagctacctgcttcccaggagcagggctaccatttttcctgaggttagtcacaggcacaacagagggagcctaccctaaagcaagggaggggaccagcatagaaggaagccaagccttgtgggtgtgtccctgtgaatttcattatcatcacgggccagtgagtatcataccaagaggagcggtgctgagagggcagagtgaaggagtgggagagtagggagtgtgggacaccagaaggaaagcttccctgaggaggtgtctccagcccccttctgaaaggacaggggccatgactggggaggcaagtaaggactctctaggtagagtagcacggccttctccatatgtcctctctccccttagccccaggccccacacagcagaccacacatcttatctcccctcctcctcctcagaataccaaacattatgagctgttaaactacagtgagcatgggacaacggtggacaatgtgctgtattcatgtgacttctcggagaagaccccgccaacccccccaagcagtattgttgccaaagtgcagagtgtcatcagtaagttggagcagagatctgtggccacaaagctgaggccccagtcagggtggttctgacttgctgcccatggtctgtctcttgccttcccagtcctattggccaagctctacttcctcgtgggcccagggcaggccacagagaagcaagtgctgagtacccccatgtgtgtacacacctgtggggacttcagactccaccaaccctttctgagcatccttcctccctagtcatgcagcagttggaatggggagatgcaggagcccaaccttggcaaacagcccacatgggttggctgctcactgttcctcttctgtgaccatccccctttttcccagggcgccgccggcaccagaaacaggacgaagagccaagtgaggaggcagccatgatgagttcccaggcccaggggccgcagcggagaccctgcaattgcaaagccagcagctcgagcttgattgggggcagtggggccggctgggagggcacagccttactgcaccatggcagctacatcaagctgggctgcctgcagtttgtcttcagcatcactgagtttgcgaccaaacagcccaaaggcgatgccagcctgctgcaggatggggtcttggccgagaagctctctctcaagccccaccagggccctgtgctgcgctccaactctgttccttaggactggcggctaccccgccactggcctgtacacccacccaagactcctgcaatgcaaaaatgtacacaaaccaagcccgggtgttttctatactctaccagaaacccttcaactacaatctttgcatgaaatgaagaaaaccttttgactgttttttaaaaatcctttttcttttctcaagttctagggggcatttgcacatatatttgtactcaacatttcatgggaaagcggcagacctgagctgaggaacagcgtgggcagggagggaaagacccagggtctggacacttcctccaacacaaaacccttccccacccacctcctgctccctccccctcgcccaccattgtaaaataatcagaaacttgttctattttgtggcagtgacaatagttttatattaaaagaaaaaatacagttttcatacagcaaaatctatacaatatcattgttttatttaatataaagatcgctacccaccttccttccatggttcccaccctccacgttattttccctttctgcagcggttgcactacaggtagctactgtgtattatggacaaatgagaaatgaattctttttctggctgtccatctattttatttcaaataaggaaaagtgtatttggattttgtgtaaatacatctagtgatgacattttttcaatgtttttaaaaaccgtgtacagtactacatgtggtagagcgttttctcaaattgtctattgtagcaaaaatgtttttgtcgtaaacctgttttgtctcctttttttgttctcttgccacttctctcctcttcctcctgcccctggttccctcctctcctcccacccccacaaccagtaccaatgtacatagtaattgtaatgttttagactttacagaaactttcctgtattctgtatataaaaaacaaaaatacttcaaattgttttctgactgtctgtcctacctgtcatcacccttagaggagaccctcccctagatctgggtctagcaggtggggggccttttgaacaggtctcattcccatagggaagtttggtaggggaggtgttggagaaaagtgagccagggtgggtggatgacaatggaatgacatgggtgcgtctgctggcccggggggagctgtttctccagagaaccctgactgatagtggaatctagtcttgacctgtcacttctagtcatgtgatctgcagtcacacttctctacaactgctattcctcatcaaaaaacgagtctgctgcattaccttaattctcaagtcccggggaccttcattaaaccaaattccatgctttcctcccagatcttagtgaaaaactctccaggaagttttcctgaggtcagcctcctcagatggagagcacctctgtgtatattccagcactgtttgtgtaggtgcatctgcttgtgtgtcaggattttgccttagggatagaaaatgaatattctacccccagcctcatcccacagcatctacaatggaaacccgaatccgcagtgcagctaaataggaaactggccctggaatctgaggtctgtccctgactttcatctgcccatgcaggcgtcatcactctgctcccggtgccctaatgggctttttgaactccctaaggacagaaacttgtatatcttccactcggaatttccaagtctaactacactgctgggcacaccataagtgccaaataccaggttctaaattgtactgaatgtatcaggcaacggccttctgccctggaatggtcttacccatttgttcctagccagccccacccttcctgccatcatggtcacttgtaattgagtgatggagcttctctgcctgtctcttatcacctatgagaaccattccaaaggcaaatttcctcctgaaaggcaataacagattttactctctatctcttcctgcttcccttcagccatggaaggcactagtggggttgaggtagggagatacagagggggaatgaaggagtgaattctgacaccccttaactgcctgtgccacctttaacagtgtcctctctagcctgtgtggggagaacacggaagaatcctagaagctgggggctggatgtgaagataagaaaacgaaggatttggcccagtgcagaggctcacacctgtaatcccagcactttgagaggctgaggcaggtgggtcacttaaggtcagaagtttgagaccaacctggccaacatagtgaaaacccttctctactaaaatacaaaaattagccgggtgtggtgtcacacacctgtgatcccagctactctggattctgaggcaggagaattgcttgaacccgggaagcggaggttgcagtgagccgggatcacgccactgcactccagcctgggcaacgagagtgaaactccgtctcaaaagaaagaaagaaaggaaagaaggaaggaagggagggagggaaggaaggaaggaaggaagggaggaaggaaggaagggaaggaaggaaggaaggaaggaaggaaggaaaggaaaggaaggaaaggagaaggatttgtgcagaagggaaggaaggagaaggatttgttcttagagggaaaagcatctaggactagactcaaagacacacgtgtattcatgtacacacctaacttcagaagggagggactgtgctacatacacctcgagtaaacatatggagatatgcaagcacatgcactggcagagactacagatgcaggcacatacctggagggactctgccagaatgcacacaaacacctacaaggtgcttacaggagctcacacacaggatccagaggcacgcacacaacccaaagggtgatcctcagggacatgggcacatacacacctagagatcattcacatacaagcgttgcagatgcatgcacatacctagcgtgcactcacagggtgtacgtggacacacacacccaggagttcacacaggcacacacctagggggcgctcccagggcccaagcgcacacactcacctcaaaggtgtccacagaggcacacgcccccaggacgccgacgcacgcctagggggcgctcgcagggccggcgcgcacccgcacgcgcacacgcccctgcccagcctcctgcccgcctccgccttcggaggctgacgcgcccgggcgccgttccaggcctgtgcagggcggatcggcagccgcctggcggcgatccagggcggtgcggggcctgggcgggagccgggaggcgcggccggcatggaggcgctgctgctgggcgcggggttgctgctgggcgcttacgtgcttgtctactacaacctggtgaaggccccgccgtgcggcggcatgggcaacctgcggggccgcacggccgtggtcacgggtgagtgcggaggcgggtgagtgcgagctggcggggcgcgcggagaggaggccgggccggcggtagcagcggcccgccgggctcagctcagctcggctcccgcccgcggtccgcaggcgccaacagcggcatcggaaagatgacggcgctggagctggcgcgccggggagcgcgcgtggtgctggcctgccgcagccaggagcgcggggaggcggctgccttcgacctccgccaggtgagaggcagcgggggcgcgtgggacggtgagccgagaacccgccgggacacagagaagccagcaaaggggctgcggaggatccgggtccagggaggagagcgcggcgcgggcggctgagcgcgaagagggagtgcacggagcgctggggtcacccgaggaaggcgcaccagagccgagtgggggaggggcttcctgaaggccgtaattgcagttctgagacgtttaagcatcagtagaagttgggttaatgatcagtaggaaagggaacagcagagggcacagcataagcaaaggctctgaggcaaagagagctggactgatctgaaaaactgagaaaaagatttaatgaggctggagcacaaagtatgaggaagatgggcaaatgagggggctggagaacattctagagcctattgagaagcttggattttatagattgggcagcagagaccagtggagaccatgaacagccctcagtaggctccggactgtcagaatagcctttggaaggaactcctttgtggctgcgtggtgcctggagtgggggggcaagagcgggagagaggagaccagtgagaagttacagattttagggtaaatggtaatggggaaaggaggtgataataataatagcaagtacctacccagtgctgctagagtgtattttacacgttaactcctttcatcctcacaaaagctcagtgagattgggactgttgttattattattccctttacgcagtgagagaactgagacccagagagattaagtatcttgcccaaggtcacactttagtaaaaggcaaagtcaggatttgaatccacacacttatctagtacactctaagacacaggggcagattttagtaaacagtaggagatggactctcagaatttggtgcctggggagagggaagaggagagagatgcctggtgacaagcccagcccttgcctctccacaggagagtgggaacaatgaggtcatcttcatggccttggacttggccagtctggcctcggtgcgggcctttgccactgcctttctgagctctgagccacggttggacatcctcatccacaatgccggtgaggggcagcaggccctgcgtgggggtggggtggcgggtggccaggggcaactgccccctccagcgggggccctgctggggccagtggacacatgggaaggatgcccccttctcccatctcatagatagggatgccaaggctgcagagctccttctggagcagccgctcacatttagcctctgccccaggtatcagttcctgtggccggacccgtgaggcgtttaacctgctgcttcgggtgaaccatatcggtccctttctgctgacacatctgctgctgccttgcctgaaggcatgtgcccctagccgcgtggtggtggtagcctcagctgcccactgtcggggacgtcttgacttcaaacgcctggaccgcccagtggtgggctggcggcaggagctgcgggcatatgctgacactaagctggctaatgtactgtttgcccgggagctcgccaaccagcttgaggccactggcgtcacctgctatgcagcccacccaggtgaggtctggttctttggcttccgattcccctctcctttccttgccccatcctgtgccccccacaccactaccgcctccccaccctccatccctcattgagtcacagaatctcagggcagcaaggaagcatagtccaaggagagacctgttccttgctgctcttggaaccaggttctcctggtttaggttcttcctctcacaccacaagcctgggtcctcagccctggggggtatatggccatgaataagacctggattcccacccccaggagccatctgcactgactgaactgataatgatgatgatgatagctaataattcatccaagaagcatttaccgagtacctactctgtatcaggcattacttgcagtgctggggatatagcagtgaacaaaacaaagaccctgccctcatagagtttgcattctagtttggaggagagggagacagccaataaatatatacgatgaggggtggtgatagagtgctctgaggaaaaaggaaacagcaaggggcaaatggaacgggaatatggtgtggcagtcaaggaagacatatctataaaggtgacatttgaacagaggtctgaaagatacatggctcactggggagatgcccagaaaaagagagaacagtgcaaataataagtgcagaggggctggaagcggtggctcatgcctgtaatcccagcactttgggaggccaaggctggtagatcacttgaggtcaggagttcgagaccaacctgggcaacatggtgaaaccccatctctaggctgggcgtggtggctcacacctgtaatcccagcattttgggaggccgaggcgggcaatcacaaggtcaggagttcgagaccagcctgaccaacatggtgaaaccccatctgtactaaaaatacaaaaattagccaggtgtggtggcgcgcgcctgtaatcccagctactcaggaggctgaggcaggagaatcgctttaatccgggaggtggaggttgcagtgagccgtgatcacgccaccgcactccagcctgggggacagagcaagactccatctcaaaaaaaaagaaaaaagaaaaaaaaaagaaaacctgtctctactacaaatacaaaaattagctaggcattgtggctatcacctgtagtcccagctattcaggaggctgaggcaggagaatcgcctgaacctagaggtggacgttgccagtaagctgagatctcgccactgtactccagcctgggtgacagagcgagactctgtctccaaaacagaaaaaagtaagtgcagaggccctaaggcagaagttcctggtgtgcttgagaaaggctaatgtggctggaacagagtgaggggggagagtggcaagaggtgaggtcatagagaggcactgtgtcctgtagggtttggagggaggttcactataggcattctggcttttactctgagtgagataattggggatccagagcaacactttgtcttatggaagaggttataccaggataacaagatctgtcatattcatattaccatactgcattttagatagtcactgcctaaggctcattagtaattataatagcgatgatcacaattagcctttattaagtctttattacactccatatcactaatgtccaaaatagtggctggtatactgcaagtacttaataaatgctggttaaacaaggaacaggacttgagctagaagaaaagatggagagagactgagaattgtttcagacatgggacacagcatgaacaaaatctgggatgtggggtgaacaagcagtctggatggaagcgaagaggcttcatgcaggaaatgagtgaagtcacctcgcagaagccccgaatgcctggtaaatactatcctggttcccttgaaaccagattctgtccctgttcttctagctctgttctattttttttgttgttgtttttttttttaaagagacagagcttgactatgttgcccagtctggtctcaaactcctgggctcaagtgatcctcctgctccgcctcccgagtagctgtgactgtaaatacacaccactgtgcctagcccaactcctttctttcttcctgcctacagggcctgtgaactcggagctgttcctgcgccatgttcctggatggctgcgcccacttttgcgcccattggcttggctggtgctccgggcaccaagagggggtgcccagacacccctgtattgtgctctacaagagggcatcgagcccctcagtgggagatattttgccaactgccatgtggaagaggtgcctccagctgcccgagacgaccgggcagcccatcggctatgggaggccagcaagaggctggcagggcttgggcctggggaggatgctgaacccgatgaagacccccagtctgaggactcagaggccccatcttctctaagcaccccccaccctgaggagcccacagtttctcaaccttaccccagccctcagagctcaccagatttgtctaagatgacgcaccgaattcaggctaaagttgagcctgagatccagctctcctaaccctcaggccaggatgcttgccatggcacttcatggtccttgaaaacctcggatgtgtgcgaggccatgccctggacactgacgggtttgtgatcttgacctccgtggttactttctggggccccaagctgtgccctggacatctcttttcctggttgaaggaataatgggtgattatttcttcctgagagtgacagtaaccccagatggagagataggggtatgctagacactgtgcttctcggaaatttggatgtagtattttcaggccccacccttattgattctgatcagctctggagcagaggcagggagtttgcaatgtgatgcactgccaacattgagaattagtgaactgatccctttgcaaccgtctagctaggtagttaaattacccccatgttaatgaagcggaattaggctcccgagctaagggactcgcctagggtctcacagtgagtaggaggagggcctgggatctgaacccaagggtctgaggccagggccgactgccgtaagatgggtgctgagaagtgagtcagggcagggcagctggtatcgaggtgccccatgggagtaaggggacgccttccgggcggatgcagggctggggtcatctgtatctgaagcccctcggaataaagcgcgttgaccgccgaagctgcgctcactcctgcctcaacgcgccggccccgccctccgccgccacacttccggcggggctgcgaccgcagaggggcgcgggcgagcgagcgggcggccggccgctgggggtggcgggataggctgggcgcggccggcgctgcagacccgctgctgttgtccgggtctgtgcggtcccgagggccctccgtgccgccggcgccatgggcaattgccacacggtggggcccaacgaggcgctggtggtttcaggtgagggggcggcgaggaaggtgggagctgtggagggtgctcggggtgggtgcagggctggggagtgcacggggaagagctgggcctgagtccaccgcgcggcgcagggcgctggcccccgggccgcacctgaggccccttccaagagagatctcgtgctcacgctttccttgctgcgcaccctcgggcacccaccaggggctccccctcccgctgtgggttttcctgtgtttatttgcttctcctccccctccctaggcgggcctccccgccgctctactgtgaggttgggggtcccgaactgaagccgcggggttccaggagggagggaactggtggttccgggaacgcagaggtttggctggattccagcgcccgggatggggggcgggtcgcgcagccctggagggcaggtgcctgtatggggaggggccctgaaacagaggtcgtttctcggcacagtcagacccgttaattccaagcaggctggggcttgttggggattaccggcactgcccgcccaggagacgcggatgcggcctctacaggttgggaaacccggttctgggcagtgcagtttgggattgcaaaatgctgcaagttccagaatttctatctaggtggggcatggggactgcggtactggggaaaaggaactgctattgagattttatatttggggcgctttgagaagcggctgacaccttgcaagccaccgggttgtgcagctccttgctctcaggagctgggggacgggggtcctggtgcctgacagcttggaggcctggagctggaggaatttctcttctctatcttcccactatcagtgctgattttttcagcctgcgtgcagatttggtagaactggttactgaagagatagaaggggatagaagccctgagccaggcctcacagctgccaacccttggagaggggtgataaatccactgggaattttcattccaaaacatggcttcaggctcactttggatctcaaaatcaatctctccactgggacatccccagtgtgtgggagataagtaccctacccccctgaagaccagaaatagccttgaggacagaagggagactcccagagaacactaaatgcagacttgctcctccataagacctaaacctgtctcccagtccccacccttagagaaggcttttagagaccagaatctgcactgcactttgtttttcttgtggaatttccttcaggaagcccagactctgagctgagaagacaaaagctccagttccatccttgtggaaagtcttgggactgaggggcaagaagagccccagagatgggttgctctgtgccttccagttactgagaacctggtcttcagaacagaagtcaatgcactgttagcttcaacgctattttaggggtgggaagaggagatcttgctgagaactgaggatgctggagtcagggaagcagagaaggttggcgggggtgacagataatgcctggcacaatgataccttgggatttgagatgatcaagctgagatccagctccctcttgtgtgtggactcctgagagagcagagcaactgcccccacccctgcccccacctgtctgccttgctccttggacctgtgtctaagaccagaggcatctcacccagcccagtttcagaaggaggatgctaatacatctcatggtcatcttttccatcctttcttattatctaacttccctccttcagtttgtaacataaaaccttttttctctctacttttgaaaattttaaaggggaatccttttcatttggatggggttgggggatggggataaggggggagaaaagcataattttattttcactcaccctaactgaaatttagtgttttctgtgattatgaatgttggcaacaattcatgatagtattagcaaaaagtttcctactacactacagttatttctggtaccttgaaaatctattggccgggcacggtggctcatgcctgtaattccagcactttgggaggccgagatgggaggatcaactgaggtcaggagttggagaccgttctggctaacatggtgaaatcccgtttctgttaaaaatacaaaaaattagccgggcatagtgatgcacgcttgtaagcatctcaaaaaaaaaggaaataattcatctgtattttggcattaagctaataattagatttaccactagatcttactatttaatgtattaataaagaatgacatattactaatattgcacacttggttttaaattttgataactttcaata

SEQ ID NO: 2841 - DNA, 2802 bp, Homo sapiens
tgcgctggcgcagggcagaaaggtggggcttcggtcctccagacgaatgccagcgcggctgcgcgctggggggtactccctcaccgcggctgcgcgggagccaggccgccggctgtcactgcggttgcgcgcggcgagcgccgatcccggggcgcctgcgcgggtggctttgcgggcgctcgcggtaagtttgcgccaagtgcgcggcagccgggacgcagacggcggcggcggcgagaggcggagcccggggaccaccccccatcaccctccccccagtcacctcacgtaccacaacctcacgtaacctctcaccccccctccgatacccccagccccgggatggcagcgcccgccagccttcccggccggaccggctgtcgccagtgccggctttagcctgtgggactaggccccgccgaggcctgacccccggagccgggacccactgtgcagccagcagccgggccgggactgaggggccgctcccccctcgcggcccgtcgggaggacgctgtcgtcccggggactgggggccggggggtgggggggagccagggcgaggaagtcgggacccgtattgggaaaaaagcggggccggggtcaggagcgccccctcccctcacctcccccctccccccggggttgggggggccggagcagagagcacccagcccgggaggtggatgaatgtgggagaaaatggagaccaagacgatcgtgtacgacttggacacatcaggggggctgatggagcaaatccaagctctgctggctccccccaagacggacgaggcagaaaagcgcagtcggaagcctgagaaggagccccggagaagcggcagggccaccaaccacgacagctgcgatagctgcaaggaaggtggagatctcctgtgctgcgaccactgcccggctgccttccacctccagtgctgtaaccctccactgagtgaagaaatgttgcctcctggagagtggatgtgtcaccggtgcactgttcgccgaaagaaacgagagcagaaaaaggagctgggtcatgtcaatggactggtggacaaatctggcaaacggactacatcccccagcagtgacactgacttgttggacagatcggccagcaaaactgaactaaaggccattgcccatgcccggatcctggaaaggagagccagcaggcctggcacacccacatccagcgccagcacagagactcccacctctgagcagaatgatgtcgacgaagacatcattgacgtggatgaggaaccagtagcagcggagccagactatgtgcagccccagctgaggcggccctttgagctgctgattgctgccgccatggagcggaaccccacccaatttcagttgcccaatgaactgacttgtaccactgcactaccaggttctagcaagaggagaagaaaggaggaaaccacagggaaaaatgttaagaagacacagcatgaattagatcacaatggtctcgttcccttacccgtcaaagtctgcttcacgtgtaacaggagttgccgtgtggctcctctcatccagtgtgactattgccctctcctgtttcacatggattgcctcgagccgccgctcactgccatgcccctgggcagatggatgtgtccgaatcacatcgaacatgtggtgctgaaccagaagaatatgacactgagcaatcggtgccaggtgtttgatcgtttccaggacaccgtttcgcagcatgtcgtcaaagtggacttcctgaaccgaatccacaagaagcacccccctaaccggcgtgtgctccagtcggtcaaaagaagaagcttgaaggttcctgatgctataaaatctcagtaccagtttccaccccctctcattgcacccgcggccattcgggacggggagctgatctgcaatgggatccctgaggaatcacagatgcaccttttgaactctgagcacttagccacccaagcagagcagcaagagtggctctgtagtgttgttgcgctccagtgcagcatattgaaacatttatctgctaagcagatgccttcgcattgggactctgaacagacagagaaggctgatattaagcctgttattgtgactgacagctcagtcaccacctccctgcaaacagctgacaagacacctacaccttcccactaccccttgtcctgcccctcagggattagcacccagaattccctgagctgctctccaccccaccagtccccagccctagaggacatcggctgcagttcttgtgcggaaaaatccaagaaaaccccttgtgggactgccaatgggccagtgaacacagaggtgaaagctaatggcccacacctctacagcagccctactgattccacggacccccggcgacttccaggcgctaacaccccactaccaggcctctcacaccggcaaggctggccccggcccctcacgccaccagcggctgggggccttcagaaccacaccgtcggcatcattgtgaagacagagaatgccactggccccagctcttgcccccagaggagtttggttcctgtcccaagcctgcccccttccattcccagctcttgtgccagcatcgagaacaccagcactttgcaaagaaagactgtccaatcacagataggacctccgttgacagattcaaggccactgggctcacccccaaacgccacccgggtgctcactcccccgcaagcagcaggagatggtatcttggccacaacagccaaccaacgattcagctcaccagcgccatcgtcaggtgagtgctgctcagccttgggt

SEQ ID NO: 2842 - protein, 696 aa, Homo sapiens
MWEKMKTIVYDLDTSGGLMEQIQALLAPPKTDEAEKRSRKPEKEPRRSGRATNHDSCDSCKEGGDLLCCDHCPAAFHLQCCNPPLSEEMLPPGEWMCHRCTVRRKKREQKKELGHVNGLVDKSGKRTTSPSSDTDLLDRSASKTELKAIAHARIRRASRPGTPTSSASTETPTSEQNDVDEDIIDVDEEPVAAEPDYVQPQLRRPFELLIAAAMERNPTQFQLPNELTCTTALPGSSKRRRKEETTGKNVKKTQHELDHNGLVPLPVKVCFTCNRSCRVAPLIQCDYCPLLFHMDCLEPPLTAMPLGRWMCPNHIEHVVLNQKNMTLSNRCQVFDRFQDTVSQHVVKVDFLNRIHKKHPPNRRVLQSVKRRSLKVPDAIKSQYQFPPPLIAPAAIRDGELICNGIPEESQMHLLNSEHLATQAEQQEWLCSVVQCSILKHLSAKQMPSHWDSEQTEKADIKPVIVTDSSVTTSLQTADKTPTPSHYPLSCPSGISTQNSLSCSPPHQSPALEDIGCSSCAEKSKKTPCGTANGPVNTEVKANGPHKSPTDSTDPRRLPGANTPLPGLSHRQGWPRPLTPPAAGGLQNHTVGIIVKTENATGPSSCPQRSLVPVPSLPPSIPSSCASIENTSTLQRKTVQSQIGPPLTDSRPLGSPPNATRVLTPPQAAGDGILATTANQRFSSPAPSSGECCSALG

SEQ ID NO: 2843 - DNA, 4740 bp, Homo sapiens
atggatgaacagtccctagcttcctgcggctgcgccttgacccctacaagctttctcaagcgcctgcgcgagacctcaggtcccgcccttttgtctcagtgcgctggcgcagggcagaaaggtggggcttcggtcctccagacgaatgccagcgcggctgcgcgctggggggtactccctcaccgcggctgcgcgggagccaggccgccggctgtcactgcggttgcgcgcggcgagcgccgatcccggggcgcctgcgcgggtggctttgcgggcgctcgcggtaagtttgcgccaagtgcgcggcagccgggacgcagacggcggcggcggcgagaggcggagcccggggaccaccccccatcaccctccccccagtcacctcacgtaccacaacctcacgtaacctctcaccccccctccgatacccccagccccgggatggcagcgcccgccagccttcccggccggaccggctgtcgccagtgccggctttagcctgtgggactaggccccgccgaggcctgacccccggagccgggacccactgtgcagccagcagccgggccgggactgaggggccgctcccccctcgcggcccgtcgggaggacgctgtcgtcccggggactgggggccggggggtgggggggagccagggcgaggaagtcgggacccgtattgggaaaaaagcggggccggggtcaggagcgccccctcccctcacctcccccctccccccggggttgggggggccggagcagagagcacccagcccgggaggtggatgaatgtgggagaaaatggagaccaagacgatcgtgtacgacttggacacatcaggggggctgatggagcaaatccaagctctgctggctccccccaagacggacgaggcagaaaagcgcagtcggaagcctgagaaggagccccggagaagcggcagggccaccaaccacgacagctgcgatagctgcaaggaaggtggagatctcctgtgctgcgaccactgcccggctgccttccacctccagtgctgtaaccctccactgagtgaagaaatgttgcctcctggagagtggatgtgtcaccggtgcactgttcgccgaaagaaacgagagcagaaaaaggagctgggtcatgtcaatggactggtggacaaatctggcaaacggactacatcccccagcagtgacactgacttgttggacagatcggccagcaaaactgaactaaaggccattgcccatgcccggatcctggaaaggagagccagcaggcctggcacacccacatccagcgccagcacagagactcccacctctgagcagaatgatgtcgacgaagacatcattgacgtggatgaggaaccagtagcagcggagccagactatgtgcagccccagctgaggcggccctttgagctgctgattgctgccgccatggagcggaaccccacccaatttcagttgcccaatgaactgacttgtaccactgcactaccaggttctagcaagaggagaagaaaggaggaaaccacagggaaaaatgttaagaagacacagcatgaattagatcacaatggtctcgttcccttacccgtcaaagtctgcttcacgtgtaacaggagttgccgtgtggctcctctcatccagtgtgactattgccctctcctgtttcacatggattgcctcgagccgccgctcactgccatgcccctgggcagatggatgtgtccgaatcacatcgaacatgtggtgctgaaccagaagaatatgacactgagcaatcggtgccaggtgtttgatcgtttccaggacaccgtttcgcagcatgtcgtcaaagtggacttcctgaaccgaatccacaagaagcacccccctaaccggcgtgtgctccagtcggtcaaaagaagaagcttgaaggttcctgatgctataaaatctcagtaccagtttccaccccctctcattgcacccgcggccattcgggacggggagctgatctgcaatgggatccctgaggaatcacagatgcaccttttgaactctgagcacttagccacccaagcagagcagcaagagtggctctgtagtgttgttgcgctccagtgcagcatattgaaacatttatctgctaagcagatgccttcgcattgggactctgaacagacagagaaggctgatattaagcctgttattgtgactgacagctcagtcaccacctccctgcaaacagctgacaagacacctacaccttcccactaccccttgtcctgcccctcagggattagcacccagaattccctgagctgctctccaccccaccagtccccagccctagaggacatcggctgcagttcttgtgcggaaaaatccaagaaaaccccttgtgggactgccaatgggccagtgaacacagaggtgaaagctaatggcccacacctctacagcagccctactgattccacggacccccggcgacttccaggcgctaacaccccactaccaggcctctcacaccggcaaggctggccccggcccctcacgccaccagcggctgggggccttcagaaccacaccgtcggcatcattgtgaagacagagaatgccactggccccagctcttgcccccagaggagtttggttcctgtcccaagcctgcccccttccattcccagctcttgtgccagcatcgagaacaccagcactttgcaaagaaagactgtccaatcacagataggacctccgttgacagattcaaggccactgggctcacccccaaacgccacccgggtgctcactcccccgcaagcagcaggagatggtatcttggccacaacagccaaccaacgattcagctcaccagcgccatcgtcagatggcaaggtcagccccggcacgttatccataggaagcgctttaaccgtaccctctttcccagccaactctactgccatggtggacctcaccaactcacttcgagcatttatggatgtcaatggagaaatcgagataaatatgctggacgagaagctgatcaagtttctggccttgcagagaatacatcagcttttcccctcccgggtccaaccttcaccgggcagtgtcgggacacatcagctggcttctggagggcaccacatagaagtgcaaagaaaggaggtacaggcccgagctgtgttctaccccctcttagggttgggaggagctgtgaacatgtgctatcgaaccctctacatcgggacaggagctgacatggatgtgtgccttacaaactatggtcactgtaactacgtgtccgggaaacatgcctgcatattctacgatgagaataccaaacattatgagctgttaaactacagtgagcatgggacaacggtggacaatgtgctgtattcatgtgacttctcggagaagaccccgccaacccccccaagcagtattgttgccaaagtgcagagtgtcatcaggcgccgccggcaccagaaacaggacgaagagccaagtgaggaggcagccatgatgagttcccaggcccaggggccgcagcggagaccctgcaattgcaaagccagcagctcgagcttgattgggggcagtggggccggctgggagggcacagccttactgcaccatggcagctacatcaagctgggctgcctgcagtttgtcttcagcatcactgagtttgcgaccaaacagcccaaaggcgatgccagcctgctgcaggatggggtcttggccgagaagctctctctcaagccccaccagggccctgtgctgcgctccaactctgttccttaggactggcggctaccccgccactggcctgtacacccacccaagactcctgcaatgcaaaaatgtacacaaaccaagcccgggtgttttctatactctaccagaaacccttcaactacaatctttgcatgaaatgaagaaaaccttttgactgttttttaaaaatcctttttcttttctcaagttctagggggcatttgcacatatatttgtactcaacatttcatgggaaagcggcagacctgagctgaggaacagcgtgggcagggagggaaagacccagggtctggacacttcctccaacacaaaacccttccccacccacctcctgctccctccccctcgcccaccattgtaaaataatcagaaacttgttctattttgtggcagtgacaatagttttatattaaaagaaaaaatacagttttcatacagcaaaatctatacaatatcattgttttatttaatataaagatcgctacccaccttccttccatggttcccaccctccacgttattttccctttctgcagcggttgcactacaggtagctactgtgtattatggacaaatgagaaatgaattctttttctggctgtccatctattttatttcaaataaggaaaagtgtatttggattttgtgtaaatacatctagtgatgacattttttcaatgtttttaaaaaccgtgtacagtactacatgtggtagagcgttttctcaaattgtctattgtagcaaaaatgtttttgtcgtaaacctgttttgtctcctttttttgttctcttgccacttctctcctcttcctcctgcccctggttccctcctctcctcccacccccacaaccagtaccaatgtacatagtaattgtaatgttttagactttacagaaactttcctgtattctgtatataaaaaacaaaaatacttcaaattg

SEQ ID NO: 2844 - protein, 994 aa, Homo sapiens
MWEKMKTIVYDLDTSGGLMEQIQALLAPPKTDEAEKRSRKPEKEPRRSGRATNHDSCDSCKEGGDLLCCDHCPAAFHLQCCNPPLSEEMLPPGEWMCHRCTVRRKKREQKKELGHVNGLVDKSGKRTTSPSSDTDLLDRSASKTELKAIAHARIRRASRPGTPTSSASTETPTSEQNDVDEDIIDVDEEPVAAEPDYVQPQLRRPFELLIAAAMERNPTQFQLPNELTCTTALPGSSKRRRKEETTGKNVKKTQHELDHNGLVPLPVKVCFTCNRSCRVAPLIQCDYCPLLFHMDCLEPPLTAMPLGRWMCPNHIEHVVLNQKNMTLSNRCQVFDRFQDTVSQHVVKVDFLNRIHKKHPPNRRVLQSVKRRSLKVPDAIKSQYQFPPPLIAPAAIRDGELICNGIPEESQMHLLNSEHLATQAEQQEWLCSVVQCSILKHLSAKQMPSHWDSEQTEKADIKPVIVTDSSVTTSLQTADKTPTPSHYPLSCPSGISTQNSLSCSPPHQSPALEDIGCSSCAEKSKKTPCGTANGPVNTEVKANGPHKSPTDSTDPRRLPGANTPLPGLSHRQGWPRPLTPPAAGGLQNHTVGIIVKTENATGPSSCPQRSLVPVPSLPPSIPSSCASIENTSTLQRKTVQSQIGPPLTDSRPLGSPPNATRVLTPPQAAGDGILATTANQRFSSPAPSSDGKVSPGTLSIGSALTVPSFPANSTAMVDLTNSLRAFMDVNGEIEINMLDEKLIKFLALQRIHQLFPSRVQPSPGSVGTHQLASGGHHIEVQRKEVQARAVFYPLLGLGGAVNMCYRTLYIGTGADMDVCLTNYGHCNYVSGKHACIFYDENTKHYELLNYSEHGTTVDNVKCDFSEKTPPTPPSSIVAKVQSVIRRRRHQKQDEEPSEEAAMMSSQAQGPQRRPCNCKASSSSLIGGSGAGWEGTALLHHGSYIKLGCLQFVFSITEFATKQPKGDASLLQDGVLAEKLSLKPHQGPVLRSNSVP

SEQ ID NO: 2845 - DNA, 4641 bp, Homo sapiens
tgcgctggcgcagggcagaaaggtggggcttcggtcctccagacgaatgccagcgcggctgcgcgctggggggtactccctcaccgcggctgcgcgggagccaggccgccggctgtcactgcggttgcgcgcggcgagcgccgatcccggggcgcctgcgcgggtggctttgcgggcgctcgcggtaagtttgcgccaagtgcgcggcagccgggacgcagacggcggcggcggcgagaggcggagcccggggaccaccccccatcaccctccccccagtcacctcacgtaccacaacctcacgtaacctctcaccccccctccgatacccccagccccgggatggcagcgcccgccagccttcccggccggaccggctgtcgccagtgccggctttagcctgtgggactaggccccgccgaggcctgacccccggagccgggacccactgtgcagccagcagccgggccgggactgaggggccgctcccccctcgcggcccgtcgggaggacgctgtcgtcccggggactgggggccggggggtgggggggagccagggcgaggaagtcgggacccgtattgggaaaaaagcggggccggggtcaggagcgccccctcccctcacctcccccctccccccggggttgggggggccggagcagagagcacccagcccgggaggtggatgaatgtgggagaaaatggagaccaagacgatcgtgtacgacttggacacatcaggggggctgatggagcaaatccaagctctgctggctccccccaagacggacgaggcagaaaagcgcagtcggaagcctgagaaggagccccggagaagcggcagggccaccaaccacgacagctgcgatagctgcaaggaaggtggagatctcctgtgctgcgaccactgcccggctgccttccacctccagtgctgtaaccctccactgagtgaagaaatgttgcctcctggagagtggatgtgtcaccggtgcactgttcgccgaaagaaacgagagcagaaaaaggagctgggtcatgtcaatggactggtggacaaatctggcaaacggactacatcccccagcagtgacactgacttgttggacagatcggccagcaaaactgaactaaaggccattgcccatgcccggatcctggaaaggagagccagcaggcctggcacacccacatccagcgccagcacagagactcccacctctgagcagaatgatgtcgacgaagacatcattgacgtggatgaggaaccagtagcagcggagccagactatgtgcagccccagctgaggcggccctttgagctgctgattgctgccgccatggagcggaaccccacccaatttcagttgcccaatgaactgacttgtaccactgcactaccaggttctagcaagaggagaagaaaggaggaaaccacagggaaaaatgttaagaagacacagcatgaattagatcacaatggtctcgttcccttacccgtcaaagtctgcttcacgtgtaacaggagttgccgtgtggctcctctcatccagtgtgactattgccctctcctgtttcacatggattgcctcgagccgccgctcactgccatgcccctgggcagatggatgtgtccgaatcacatcgaacatgtggtgctgaaccagaagaatatgacactgagcaatcggtgccaggtgtttgatcgtttccaggacaccgtttcgcagcatgtcgtcaaagtggacttcctgaaccgaatccacaagaagcacccccctaaccggcgtgtgctccagtcggtcaaaagaagaagcttgaaggttcctgatgctataaaatctcagtaccagtttccaccccctctcattgcacccgcggccattcgggacggggagctgatctgcaatgggatccctgaggaatcacagatgcaccttttgaactctgagcacttagccacccaagcagagcagcaagagtggctctgtagtgttgttgcgctccagtgcagcatattgaaacatttatctgctaagcagatgccttcgcattgggactctgaacagacagagaaggctgatattaagcctgttattgtgactgacagctcagtcaccacctccctgcaaacagctgacaagacacctacaccttcccactaccccttgtcctgcccctcagggattagcacccagaattccctgagctgctctccaccccaccagtccccagccctagaggacatcggctgcagttcttgtgcggaaaaatccaagaaaaccccttgtgggactgccaatgggccagtgaacacagaggtgaaagctaatggcccacacctctacagcagccctactgattccacggacccccggcgacttccaggcgctaacaccccactaccaggcctctcacaccggcaaggctggccccggcccctcacgccaccagcggctgggggccttcagaaccacaccgtcggcatcattgtgaagacagagaatgccactggccccagctcttgcccccagaggagtttggttcctgtcccaagcctgcccccttccattcccagctcttgtgccagcatcgagaacaccagcactttgcaaagaaagactgtccaatcacagataggacctccgttgacagattcaaggccactgggctcacccccaaacgccacccgggtgctcactcccccgcaagcagcaggagatggtatcttggccacaacagccaaccaacgattcagctcaccagcgccatcgtcagatggcaaggtcagccccggcacgttatccataggaagcgctttaaccgtaccctctttcccagccaactctactgccatggtggacctcaccaactcacttcgagcatttatggatgtcaatggagaaatcgagataaatatgctggacgagaagctgatcaagtttctggccttgcagagaatacatcagcttttcccctcccgggtccaaccttcaccgggcagtgtcgggacacatcagctggcttctggagggcaccacatagaagtgcaaagaaaggaggtacaggcccgagctgtgttctaccccctcttagggttgggaggagctgtgaacatgtgctatcgaaccctctacatcgggacaggagctgacatggatgtgtgccttacaaactatggtcactgtaactacgtgtccgggaaacatgcctgcatattctacgatgagaataccaaacattatgagctgttaaactacagtgagcatgggacaacggtggacaatgtgctgtattcatgtgacttctcggagaagaccccgccaacccccccaagcagtattgttgccaaagtgcagagtgtcatcaggcgccgccggcaccagaaacaggacgaagagccaagtgaggaggcagccatgatgagttcccaggcccaggggccgcagcggagaccctgcaattgcaaagccagcagctcgagcttgattgggggcagtggggccggctgggagggcacagccttactgcaccatggcagctacatcaagctgggctgcctgcagtttgtcttcagcatcactgagtttgcgaccaaacagcccaaaggcgatgccagcctgctgcaggatggggtcttggccgagaagctctctctcaagccccaccagggccctgtgctgcgctccaactctgttccttaggactggcggctaccccgccactggcctgtacacccacccaagactcctgcaatgcaaaaatgtacacaaaccaagcccgggtgttttctatactctaccagaaacccttcaactacaatctttgcatgaaatgaagaaaaccttttgactgttttttaaaaatcctttttcttttctcaagttctagggggcatttgcacatatatttgtactcaacatttcatgggaaagcggcagacctgagctgaggaacagcgtgggcagggagggaaagacccagggtctggacacttcctccaacacaaaacccttccccacccacctcctgctccctccccctcgcccaccattgtaaaataatcagaaacttgttctattttgtggcagtgacaatagttttatattaaaagaaaaaatacagttttcatacagcaaaatctatacaatatcattgttttatttaatataaagatcgctacccaccttccttccatggttcccaccctccacgttattttccctttctgcagcggttgcactacaggtagctactgtgtattatggacaaatgagaaatgaattctttttctggctgtccatctattttatttcaaataaggaaaagtgtatttggattttgtgtaaatacatctagtgatgacattttttcaatgtttttaaaaaccgtgtacagtactacatgtggtagagcgttttctcaaattgtctattgtagcaaaaatgtttttgtcgtaaacctgttttgtctcctttttttgttctcttgccacttctctcctcttcctcctgcccctggttccctcctctcctcccacccccacaaccagtaccaatgtacatagtaattgtaatgttttagactttacagaaactttcctgtattctgtatataaaaaacaaaaatacttcaaattg

SEQ ID NO: 2846 - protein, 994 aa, Homo sapiens; identical to SEQ ID NO: 2844

SEQ ID NO: 2847 - DNA, 318699 bp, Mus musculus
  misc_feature (1)...(318699): n = A, C, G or T/U
tgcaaaggaaggggtggatggcacaaggcacggtggagcaggggctaggggcacagatggagcaaggaggagagacagtgaggcatgcagggagcgtgcacaggagaattcgaacgggaacgggcatcggacagagcaggggtatttgccctgggagatagagagggcatgagggtgcggttctgggaactaaaagcaaatatgtaaaattgaacccccccctcccccgtgtcctcttctgcctccacaggcaccaggcactcactcgcacagtgctcatgcatacgtacgtgtaggcaaaacacccatccatacaaaataaaactttttgttgtttagtttgaaaggatatgcgataaatcattgtcatctaagaatgatcctgttctgaagagaaagggatgcgtacaccagcagcaatgctagctcatgtttaagtagcatttgccacctgcctggaattatatggagcatcttatagatggcactttattttgtggttctaatgcactgagacagattgtatcatctgtttgttcaaaaatgaaagcattagggattctagaaatgagctaataagcccaggatcttataagtagtagatggcaaagctcagttgaaaccccaaatgaacattcctttatggtgtgtctctggtcacttccagtgggatctctgggatgctgctattaaagttcagaactttaagtcccatcctaaacttctagtagaggtgcctaatgcttgggttccaccttcctaaggatgaccagagtgctactctgggccaaatcctgatcaatgctagatatactagaaatactcaatcctacagaattagaaagggtgggaactgggagacagtgtctgtgacattagtgagagaagcgagatcagacagaaacactgaaaacgtggcttagggaaaagaaacagatgacagtgctaaacctgtaaacccggcacttggaaagtggaagcaagaagaataagagttcaaagtcatagttagctatagagcaaggtcaagaccagcctgggctactttagaccctgactcgaagaacaaatgaatggggagggggaggagggaatcagtgaagatggagccagaattttttggatagactctccaaaaggagtgtccacttaagagaagcaggctcttctggctctgaccttgactcctcaacttgattgttcctcacggccacctggtcttatcttgatgacatgtcagaccctaagaacaaatcaagctcatgaacacagatcagtgagtaacaagatcagcagattgggcagttgagggctggtttgtgtaggggcaggagtgatcatatggagcaatgatattcatagagcattttcatgtggagacatctgctgggcacaggggaagccttaaagacacaggtagctctagacagagttctggattatacaagggattcaggtcctggaggggatattgggttacaggacctctgaggtttcctgggttttcctgatccagcttttaaataattgaaatttttcccttgtctcatttctttagggttccgttgtcagaattcagatacaactatggtttgtattgtttctacctccagatagtgtgaataattggaactgaaaaatgtcagagccacacttcacgtaatatctcctttcatgatgtctgtgtgtgcatgcacatatgggtgcagttgcatgtgttcatgcaggtgcacatacacctgtgtgcatgtgtgtgttaaggacagatattgatgtcagggggtcttcctcaatcattctctgccattttttttttgagaaagaatctctcactgaatctaaggctcatctagaatatatggccaacaagcctagatatcctcctgtctatccccccctgagcagggattgcaggtgtgtgctactccactgacattttacatggatggaggggattgaactcaggtcctcttgcttgcatgcaagcactttaccagattaaccccttccccagtctcacttcatgatcttcactctaggaaccattttagctccctagttggaaaaaaaaaaaaaaaaacagattctagatgaaaatcagcaagaaaagaatctggggaagactaaatgtcactgtcttcctgaaacatcaattgtgaagctcttctgatgataataaaaggacccagactcagttcctcttattatacattcacatcatagacaacttctgatgacagatgcagctgcctctccactaccacagacaattctgcagcaatgggcaccaaatgggtgtttccctagtccaatcctagggaatgtctaacacttacctacttgtcagtagataagatagacttacccacaagtctgcctccactgagataccaatcagaaatcccaagcttcgttacctatacttccaaatgaatgctatcaaccagggtcacttcaatgcccttcttgggtttaatttgccagattataccatgtggtccctgaagcctacttgggtttccatagagagtttattgtacagaaatgattgaagcatggacaatcttgtagaaatatgattggacagaaggaacatgacctattgctaacagactgatagaaaaacccagcagggcctgaatgtccacattcttcttggcttttccatgcactactcttcggggtaggacccttctaagagggtacatgtcttagcatagactatcagatagcaagtcggaagatgtattctttactcctaaacagacaagtggaagataagagattctctgattcacttcaggagagaagaattctattttctttcaggagagacgaattctattttctatgccttggagagggagttaggagtcaggagacatgaacatcacaaaatatacatgtggccaaataataataatggcaaataaccacttaccattttgtaaaaaagagggagacagagagataatggatgcagagaccaagggttttcttccttccaaaaaaaacccaaacaaaccaaataacaaccaagccttctcctctaacctacactctgaagaaaggaaaaaagaaaggtgacagtttcagagtggagcaggaacagaggtcacccagagaagccttagcatgctgcttgtccttcaaggcctttaccttcctctcacatttttttctcttagacaacaacctcttattgggatgtctatgttgggtctctagaagaaactacccatgtagttcatacgtgaagtcccagtactcaggaggcagaggtaaaacaattcccatgtgtcccaggccaaccagggtaggaaagtgacagcctgattggaaaccaagaaagaaaataagaaaggaatccattggttctagattgcccaatcacaacatgcgttttcgccagatcccaagacagctcttacatgttttaaagctggagacatcttaccaaaagacactgtcaactcgtgaatggattgtaaaattctttttcctcccatactgtcagatctgctgggttctaggaatagatccaaaggccagaagagcttaatgattgcctgtctggaggcttagagaaaagccgttgtgatagaatacatgcacacaagtctatttgctaattaattaacttgataatgaatgtacctactgagcaccagacaaggtttgaggagcatgtccctttcctagggagcttagggaacatgcttagatagtctattccaaccccgtgtgataaagacctcagcagctaagaaaggtgtgggctggacagtgttgctcagtggtgcagaactctcctaacatatgcaaggcaggagatctggtccctaccatggtggggtacaggtcaggcggggggtggggtgggggggaggatatgttcctctggaactgggatgtttgtcttctgaagcatcacaagcagaaacagctctagaggcgattctaggttacgtccacatcctctatgtgattctgtcttgcctggggcctgatatctgtggttcctctgtgggtaagttgttgggacagtccctgtttggtgactcataggatcctgaagataattttgctacattcttcttccttctccggtgataaagacttgttgagtgagcttcctcttagctcaaggcttcctaatttggagtccacaaagagatcacctctaggggcagaagagaggaggcagtttatacaaaagcctctgtgtatgagtttaatgcacctcaggagacaaagttcccacgtttttagtaaagtgtggtgtcttagggtttcgattgctctgaagagacaccatgaccacagcaactcctatagaggaaaacatttaattggggctggcttacagtttagagatgtagtccattatcatcatggccagaagcatggaggcacccaggtagacctggtgctgaagaggttctacatcaggatcagcagacagcaagaagagagagcaataacgagcttggcttgagcttctgaaacctcaaagtcctcccccaggaacaagctttctccaacaaggccatacctactctaaaaggccgtacctcctaatagtgccactccctgtgtacctatggaggcaattttcatttaaaccaccatacataaaggtatgtaccactaagcccagcttcattttaaagtacttttttttttttttaactttctgggggagggcttacagcagtgatcccaccccccccccacacacacacatacacacatacaccattcatttttctttgatcccatagagagaatcaggatgtgggattgcaagaggagaaagaatctaagcatagacaaaagtcatcaatggcatcagagagaatgtatcttaattaggttttctattgccgtgatgaaacaccatgaccaaaagcaacttgggaagaaaggttttattttactcactccacataacagttcactaaaagcagtgagggcaggaactcaagcagggcaggaacctggaggcaggagctgatgcagaggccatggagggtgctgcttactgacttgctcatcatggcttgcttagcttgctttgttatagaacccaggcttaccagcccagggaatggcactacccacagttggatgcccccacccccaatcaatcactaatcaagaaattgccctacagctagatcttatagaggcattttttttttttctcaattgaggttccctcctgtctgttaactctagcttgtgtcaagtggacataaagctagccagtacagggtgtgttttactttaaaaatttaggcttcagaaaccagagataaagctgggtgtggtagctgtcttagtttgctttctattgctgtgataaaacaccacgatcatgaagcaactgcggaggaaagggttacaatttacacttcaccctaaagataaggcaggacaagaattcaaggcagcagtgtggaagcaggaacttacacagaaaccatgggggagtgccatttatggcttgttcctggtggcctgctcagcttgttttcttatacaacccaggactgcctgcccaggagtggcaccacccacagtgatctgggccctcccatgttaatcattagtcaaggaaatgctcacaggctcgcagtcaggccagtctcatgaggcatttttctcaactgaggtttcttttcccagatgaccctactttgtgtcaggttggcaaaatcctaaccagcacaataccataggcctataatcccagcactttggaggactgccaagctttaggacagcagggtaagcctggcctccatagtgagggtctgtttcaaaacaacaaacaacaaacaaacaaaactacctagagtatacatgctgcttttgatgaatcatttttagttcaaattgaggcctacccattagaaggaagacagtatgttcgaaatactttctgtgacagaacctaaatgatttctgcatgtcgacaaatatatatcatgaaattactttgcaatgtaaatttgccttgctgttccttactgtttcggctctataacaactcaggttcataaaataactataaaatgtcctttaaatgttcttcacaactgtcttttttctctctctctctccctctctctctctctctctctctccccttttctcttaccatcttattagatacatgctaggaaaaaaacaaacaaacaaacctgttttgctgggatgcagactccctggtaaagggagataaaaggagggcggaacaaactagaagcacgctaaaggaaccgaaagtgagcaaacagtcgaagcagatcacccagagttgattttcactgataaccccggcagcccctgtgttgtggctagtcattacagaaagtccgaccaggcctgcacactgggtattcacatggaccaaaagctgatgttctcaaactgtttttatcaagcagtttgagataccatatcttttattacaaaagactttaatatatgtctgctcatggtgagatactcccgtaggaagcctcagcacagtaactgaatttaggaatattaacatgggcactatacacgactgtctaacatgtagtcctttgcatctgttttcccaacagcatcctttacttttgcctggtttggaatcacacattgccttcagctgtgatgtcttttgggtcctcatccaggttttagcccgtaactggcccagtgccttggcatctttgtgcttcatacccttggcatttttgacgggtactgatcaacacttttgcaggctactctttgttctgggtttgctccacgtttcttcacaaacacatgtatttttcttagcaggtaagtggtattgtgtctttttcaggtgatcaatcaatcagaaagttcatactgtcagcacatcttactgttggtgatgtaaattcttatttgctaatacatcttaaaccagaacgcaacgtgcatagccaaatgtctctctctctctctctctctctctctctctctctctctctctctctctctctctgtgtgtgtgtgtgtgtttctctctctctctctgtgtttctctctctctctcttttgagacagggtttttctgtgtagccctggttgtcctggaactcactctgtagaccaggctggcctcgaactcagaaatccacctgcctctgcctcccaagtgctgggattaaaggcgtgtgccaccacgcccggctcaaatgtgtttcccttcttgttttgtcatgaaagagattcatagagagctaaactgctgtggcttagcctgcaggagcatagtcctcaacacttagctgcccacaccatctgggctttgtgtgagcattgatcaataaggttgcagctgggcactacaatgctggatagaaaactgtacaagtaataaattacttctgaacgcatgaatcagaattctctctatgtttgtacaacccaatgacatttaaaaaaatgacatcagaatctaaagggtgacctcaattaacagtggactttgctggatagctccaagttcatcagaagaaactcactggtctcgatgcctgactttattctaatctggatgtatacaagaatttacagaatatctttgcacagattgtacacatattccagacttgagcctcccatacatggcaatgactactataaagttctccaaatttagccatttggaaatcacaaatcaccctgctgtgcctcccattctctgatgttcttgtgatctgtagattttcatgtctcttttcttagtgcctagaattttgttctgattgtcaagacctcaggattcaggacacacacacacacacacacacacacacacacacacacacacacatatactaggcatacctacatatccatttaccgatagaacttggggtctgcttcctagggcacagactttgagacctacttctttccctttacaaactcagttctgcctacatggagatacactgatcagaagagtgtaggaatgcagaaccagtttatataagcgtcttcttagccaccagtctgctctcacaaatgacacaggcataggacagtcctatcttggaagtatctatcccagagttctttctctacaaacaatcaccatgaaatccaagaatcctcctcagaaagaaagctacacacaggagccaaactgcaggccaacctgctgtgccgtgccaaggatcagggtggctttctgaaggcagaggtgctgcaggaaagcgatcagggtgctgtcccctctcttggcaagtgtggcttgttggcagctaaaacatgccaaggtccttcagcctagtttactcatctcaaattcagccacagagctgaagtccagccagggcttggatgctcttgatttcctaatagattctgcacagaacatggtcctaacagacacaggcccaaatatgtgcaggtactagacaatgccccttacaatgtatatccatcaggaaaatatagtctatatttggaaaaaaagttttttaaaaaaaaatttatttatttattttatgtatgtgagtacactgtagctgtacagatggttgtgaaccttcatgtggttgttgggaattgaatttttaggacttctgctcgctccagtcaacactgctcactctggtaggcctcacttgctcagtccctgctctctccagcccaaagattcattcattattattcataagtacactatagctgatttcagatgcaccagaagagggtgtcagatctcattatgggtggttgtgagccaccacgttgttgctgggatttgaactcaggaccttgggaagagtagtcagtgctcttacccgctgagccatctcaccagcccctgaaagaaaagtttaaaaaaaaaatatttattcacctttattttatgtgactgtgtgagtccctgcatgtatatatgttcctgcctggtaccctcagaggtatgaagagggtgtctcatctccttgaactggagttacaggcaaagctattgttgtggatgctgggaaattaactctggtcctctgtaagaacagcaagtgcttttagccactgagccatctctccagcaacacccctccccccaacaaaaaccattttaagaacacccagtgtgtcttgaaattggagatcataactcattacaatctatggaactaatttcatggatttcttatttataatacaaactactactataagcttcttggaatgtgtagagagtggaggtgggggatataaaaaaaaagtttaggacatggtcctctatgctagaagctgcaatcatcccgaggagatgattcatacattttttaaaaaattactagtataaggtactagtctgatgacatgctcacatgagtggaaaaaaatggaccactggaaatgaagagtaagccatgtggctgaatgctggggttcgtaaatcagatgacctccacgaagtcgcagctcctccacttcctagcagtgtgacaagttacttaagtttgctaaagcacttagaacagctctaaacatttcggtgacctggaagtattctctaccattgccataactattcagccaccatttcaaggatggatggcacatgagcacagaagaatgtgagggaatcataatggataattcgcgccaaagccgctcaagttataagtttgtaaatttgtaagtttgttggcatctactaggcaggggttgaagaaggcaacaaggcctattctacccagagtcaggtccacacggctccccgccacgctagatgcccgtgcctgtctttagggggcgctgccgcttagccgccgcggctggcccagagcgcgtccccgccccacgcgtgcgcgccgcccatgtgaggaggcggctgggccggggttgggcgggctcatcggcggggcggagcccgagcggccggggcggggcggggcggggcccagcgggacccaggctagaggcgggaccagccgccgccgtctccgtctcgccaccacggcccccacacaacccgcagccaccgcgggaggagcggaagccgccggcctcgcccgttcagagccgcgccggctggagctctgaggagtggcggccgtctctctcgctctctctctctctccggcccgaccccgcccaaaggtgccgagcacccccgccccaacccgagcgctcccacctgagccggcgccatggcggagcaggagagccttgagttcggcaaggcggacttcgtgctgatggacaccgtctccatgcccgagttcatggccaaccttaggctcaggtgagcgcgtctcgacagccatgccggggtttcccgagagggggcgctgctgaggattcggggtgaccggggcgagcagctcccgcgagtgagtgcggcggggtgacagggggtccgcggcgctgggtggtcacgcctcccagagagaggactcttccttggtgcggccttgggactccagggtgtgatgaggtctaggactgcactttaggggtctggggtcgtccctgtgtggtgtcttgattaggggcatgctgggcttgaggtcgcttaggggtgcaccagcccgccctgagccaggtaaatgatgtgggcgggaccgggtgacttaatggaacaaaagtaagggaaaagaaaaacttaggagcggcgtgatggccctggcagccccaggaaaactggaaggttgttttaaaagagcctggcatctatctcctgctttcacgctcgattttcttttctcgtttctttccttcctcttcttcttcttcttttttttttctcttttctttctttctggcgtggttccatcctaccattcaggatgctatggagtgaaccctaagctgtctgttccgggacacgggctattttttagttactcattcgacgtaattagacccgtttccagacatcgaagagactgctgtacttgccagtgccaagataaactgtctgaatttgacaaggcgtccatggtttcagttttttcaaggagttatgtatggatggagcctttgtgttactgacatctttgagaatttagttacaacacaatgccccaaaatgggcttccaagaggaacttattttagaaagtcttctatacgtaattatttcattttcaaacagtaatatgtaatctgagtattaaagtgttttgactttaaaaaaaaactgaaacggagtttcagcttgaagcgtgtgcttacttgtttatttgtttgtttgtgttttcccggaagctttgctctgtctgttacttgtaaactttatagccaaatatcactttttaaacttaaacctgaaaatcataattaggtttggatatttacctcaattttactgtcaactacaattctgtaatttttaaaaaaacctgttttaatttttaaattaacaaaacaaataatttcatatgttctgttctgcaatatggctagggtgaacttgaacttttgctccacctacctttacttcctgctgggagtacaggtatgcactgctgcacttgatttctgtagtgctaggcatcaaacccagggcttggcgcattaggcaatcacgctatcaactaacaaacagggctgcatcatcagccctcatctgttctgcgtcaggcttccttgtgtctggagcaggaacactggcctgcaaactacacatgcctgccataaactggccttgtctgtggccctccgtttccaggagttttcagtgcttgtattctaggactccccgggtttcctagggtagtgctctcaagatacacagagtattcctaaatagaatgttgcggagttatatgtagtcccccagtgtccccagaaagtctatcccaagagtccccgtgaattctagaatctgaggatactcacctatcatcccacctacttctcagggtgtgtgtgcgtgtgtgtgatgccgggaaatgagtttgaggtcagtctggagagtttttcaaggctctcttttaaaaattacaatcagaggattcctgagttgtataaactgacatagcagaatactagccccttcatatatgtgggtcatggattccaagaaaccccctagtggataaactgtatatgctgtgtttttccctttaactacatacctggtgatgaaaaatgactcatataaaacagaactattatgacagtaagaaaagttagatggaatttcttgcagtttctctttgtgccatattcaccttcattgatacttcatctgaaattgcagagaatgaagttttggataagggagtcttatttgcatatagcctgtatacacataccatcatatatacatatgtatatatgtatatatagtccttctcagtcttggagactgaactcttgttcaatctttttgtgtgctctatcactgagctgcctctctagcccctcttgtgtatgttaaatcattgtattgtgttactaataatacccaatacagtgtaatgcgatgtaaagtgttgctgctattactaagagctaatgacaagaaaaagtctgaacctggtcagcattgataaaatgttttctctaaatcttttcaattctcagctgattgaatttgattgactctgagagtgtggcaccaacagttgcagagtcaactacagattgtatccaaagcattataacagcatgttgcacttttttgtttcattgttagttggttgttgattttattttatttatgtatttagtttttgttagtttccccagatatagcctcagaagtaaagcagtcctctttagattcctgagtcctgggattactaacatgtgacactgtggtttatatgttaattttaaaccaaagtttagatgcccaacttttatataaatgacctcaaatactgacctaatcaaaatgaagaagtttacagcggtagtcagtattaccgtggttcagaatcagtggctgagattcggattttaattttaacactttcctgctgtggcctatggatagcgtacttaaatatttctgtatctttatcatttttgaaaaaatagaattaaggttatcttgaggttaaattagttaatttacagaattcctaagattaccttctggcaaatacttattagtaatgctgttcaaagttttctcaagtgtacagtaagcagaaaaagaatatgtaaaataacaatttcacaaattaaacttgctcaaaattacttgagattctaccatacttccctcctgatggagctatgggctttgagaagcctcttttcaattaagctgctgtcaattactaatcatttcagattatcagacatcaagtccatttgccaagtatatactgcttacaagacacaatagtaacacttgaatatagtgtcttattttaacttccatatgtacattgtaatgtatcacggaactaatcatgtagactacatatgtattaatcatatgtactacacacatgacatgacattagctagaaccttgaggaattttccgagtttaaagttgaaggcttagagtcaagttaatttttaaaactttcttcttgccaaatattgtagtttactcaggaggttgagtctgcaagcttgcaaattcaactctagcatagtgagatactgtcttacaaccccacccttagccccaacagaaaagaaagggtaaaacaaagaataatccccccaccccatccctctgcaatagaattaaatggttgtggcttttaaaaattaatactgtcattattcttgccagtggaaagtgctctacaactgaatttgccctatggcttttttcttttttcttttttaaaaaaaagcattatttatttattttatgtatatgagtacactgtagctgtcttcaggcacaccagaagagggcatcagatcccattatagatagttgtgaaccactatgtgattgctgagaattgaacccaggacctctggaagagcagtcagtgctcttaactgccgagccatccctccagccctggctttcttctttttaagtaaattgaagtacaacatttagatttttttttaaaaggatttcacattcattagttaaaaattaaaatttcaaaggtttgaatgattagatctttagtgagaacctcgctcctatgtgcaaagaagagaatagtgtaattgaactttatttaaggtactagaggatgagatggatggatgcaaagagttatgagtaagctctgttccttatcttaaagaggtggcatgtcagtgaacacagggagaaaggtggcaatcgctattcatttagaaaatagaaaactagataagctttattgagctaagatggctatgtgccaagtaattctataaacttaattgttctggaagttcaaaagggggaaaatgccacaggttgagtcagaaacaccctgaagaggagttgagctaagtcccagaggatgagtagtgcttgtccgggtgaacctgtgggtggagaacattccaggtggatacagtggcgtgagtagggaaggtagcatgaaagctgactgtgtttgggagatagtcagtgagctctgttgtctgcagaggagttggtgttggggatctgtgggaggagtcatgagctctcattagcaggattcctgtctaatgctgagatttccagcccgcctttccctgccaattagaaccctggactgtctgatatctgtatgtgtttgctgatgttgtcacttttcgtggggggagggccagtcatctcactacatagccaaggctgacctcaagttcataatcctcctgcctctgcttccatgtgctgggattacaagcgtgtgactccatagccagtatttgtgtatgtaactctgggagttggctgtgctctcgttacatagctcagcaattgggcagttgttaattccctggagccttagagtgccagccactggtagcaccataccttcttttctagctgtacatctcaacccagatttaaaacagccctgtcctggcgcagaagcttcctgttacctcagtcttccctccatccctgagcctatttagctgtttctggacccttgctgctgctgggtcctttggccatccgtttcactttatttccaggcgaccaggaatccccactgcagaccatgtgctaagatgagacactttcaatggtcgtggtacaggactgcaccaggcatatgctttggcagtttgcaggtgaaatgggaggtgtctggttgagggatggatgcaggtatgcaaatgaaattcctgaaggcgttcctattactccggcccctccccatgctggttccagtctgtactctttattctgcaatgtctggtcttctgatttctgcccggatcttctgcacggattgcgtccttccttttgggtctgtaaccaacagtgaagaacccaaggctcagttacctcagggctctgtgccatcaagacctgatcttaattttctcaacagtggagaatttctgccactgtgctgggcacacaatacagtcctttgtggcaatagtttctgtattatagatagagaagaaaggaatttctaataaaacttttatggcactgggtgtggcggtgcacacttgtcaatcccagcacctaggaggccacgccaggaggattgtgggtgtaaggctggacttcaataaggtatcaatccaataaaggaataatcaaaaacctttcacatcattgtaggtttggaattgtcttttcagagctagtggtataattcagaggatgtgccacctagcatgtgcaaggccttgggtttaacccctagcactatctaaagagaaacaacaacaaaagaattggatgacagttttctgcttttccttcgttggaactacagcttgattatgaacatttacttcaatcagtgtcatttcgttctactcacactacctctctgtatgtgcattcccatgcctgtgcgtgttgtgagggccaacttcagggctggggctctcaatggcctggagctctctaagtaggctagggtggctagggagccccagggatctcctgtgactgcctttccagccctggggttacaagtgtcaccacattgggatttttcttacttgtgttcaggtaactcaggatttcataatagtaaggtaaacacttattgactgagttatctcctcagccccacctctaagagccagtgtgggtgagtgtgtgtatctggacagggtaatgttaaagagatggtgcaggctagcgggaggaagcgtatctaagaagattcaattcgtatttcttgcttctgtaacaaaatctaccagtgtcttcaggctctcttctcttcttcccagaagactcctgtgagaggaggaggcttgttctattatttctctttaatttttcagtggaggtggtaatgggaaagtccttactgtttctaaatgatccgtgcccaggactaagagtcctgtttgcttccttgttttatgattagaaacagttcctgcctgcatcttcagtgcccgctcgagaccctggcactcagatcgcattctgcttcccttacagccgcttgtttggggccaggagcccttgctgctgctgctgctgctgctgctgctgctgctgcttctagcctgaccttttcctgttcctgagtctttccagcatctccgccagcttcaaatcttctgtgcatatgagccctgcaggtgaacagccggccgagagaacacctcactctgcttgtcatccttcatgtaacatctgctgaaatacaagatgtagggtgctgttccggagcggacttgagctgaggacactatcccagagatgtggtttccagctgatacgacagtgctaggcttcctaccgtcatctgctgctcctatcttgaggctaaagcgcctgctcagcctcagttattttgcagtgcagggggttgaagccacaggtcccatgcataccaggcaagcgctttaccactgagctacactccagttctctttcttttaatctttgctgagagcatagtttgtcagtgaggctgttgacattttgagtggataaggctttgatatgagggctcttctatgccctgggggttctttagcaacatctaactactagatgcaagaattgtatctgggtaaaattgccttcagtagggaacctttggccaggctgttcttactctctggaatgttccttcctcctccctgccctcagtccctccctgctggtcacactctttcttactcatcttgagaccagtctgagaagtctttcccaatcttccaagacagggttaattatactctgtactcctaggttacaggcacacttattcataacagttatnnnnnnnnnnnnnnnnnnnntgtaagattgggtagagggcttaggggagaaggtgtgagtgactgagaagtagacgttttgtttcctgttatacctcagactattccttgatacctggtgagttcagcaaagcttgagtagtcaaacgttggataattggtcctcatccaggagaattctcgattctaagtgtgtcagagcttggtgttgcaggcctataatcccagctacttgggagactgaagcaggatgattgtaagcaaggtctagatgagctgcagagtgaggtcaaggacagacttgaaatttatggaggctgtgtctcaaattgcaaagaaagagggggagtgtggttaatcaggagctcagagtctggtgagtttgatgccagcctgggctgcatgggactgactctctttctctctaaaagcaaacactcaaacccaaaagagaaagctgggatgtagctcagtaaagtgcctgcctagcaggcagaggctccaatctctagtatcaccctcacttgcaaaagacaaagcatatctccttctcagcgttacccttaattatgtgctggggaaaggagaagttagggaacaaataggcagacagagcagccagggactcacatgttcccatagaactcttgtgcccacactcagagagccatttggtcattggaaactttggcgaacacagtttttccttccttactggaccctgggtggtcttcccacaccgggaccccaccataggttcagtgcttcagttcaggctcttccttcttagacttagaggagaggtgaatggcacactaaatccttttggcttccatataaaattctttggcaactgcttttggaaatggacagtttgctctgtgcctgttttgcacattggcttcagattggaacaaaaatgggaatttgggttttggagctgccatttggagtgaatcaccccaccgccttgtttcctctcctctgtgacagacttccaaggctatttttattcagggtcatttcttgaccctgtagacttctgctgagtttagctcccaaatagagccagatgtggatgggatcaagcgctcagaagtcactactggttacttccattgaaggcttttgaagggatcgactcttaggtttgcttgactttgaacaggactggtgagtttggtatggatggacacatttacttaatgatccgcctccatttctgcactgagctagccttatgtggagagctagctgctccatatacactggttgtcattgatgtctgagcccccattttctgataattccctaaagacaggattgggccattgtgttgttgcccagccattgttgacttcactgagagagaaatttctgtggtccttagaagtgtcagcccctatcatagcttctcccattcatgcaacctactgacatcactcaagatgtcgactctattcataggttggagtgagagggtaagcctcattctaattgtcgtttccatcccctgattgatttgacagttttatttcctgggggacacaggcttctttcatctaactgctctggaattgttggttagagctcttggagagacctatgtcttccatactttaggggcatttgtgtggaaagaggagaaggaaaagtgtgcttgccacagagcgggagagagagaacacacaggctttgaggcctgcctgatcggctcccaatctcagcttccctttgcctcctcctggcagtatgacttgggttccctaggcctcggggtatgtatatggacagcgatcagcctctagggttatggggatagcattgtcagtgtggaaagggtctggtcagggctcagtctacccacttaattcctgttgactcttccctgctccttcccatgctgcctgccctccctgcccttcctgcccctgtgagtgctggagtagctgtgttcttcctcccccagtaaaatagaggagtaatctggtttggttttaccttgggaggcaaggatgaaaaagatcctggaaggaattctggttaatttgtggaaagaaggtgtttttcatgttctacctggctcccttgagcctccctggtaggaatgatgggctattgtgaaactaaatgatagcatctgaaaacctcctaataggggccagaacatagcaggtcttcggtgaatgcttagccccctggtccagcctcctggattggacatttcctggccatgctcagtgcattgtgtaactgctgcctgaaacataaccgcttctacaggagtaccactgttcacgtcctgaaaatcatactaaacacctcccagcaagaacttctgctgtattttattctgcgtaccatgttctctgatctcactgaccctcgaatctaggcactgagagctatgtgatacatttctaagtagagggtctttaaaaataagacaactcttaaccagtttccttatttaactgtggattctatgtgattttcacatactctccagctttaagctggaaacgacttgacttttgctgagcactgtaccgagtactttgctaggctttcttttggaagtcactctttgagagagtctgttgggtaaaggatgcataaataaatgaatcaatgagaaatgaaatatggagcccaagtaaacagagcagataatttatcattttaagtattccctagacagaaggactcaacaccaaccatatttttaaaaagaactgctgacaacataagagctgtgtatatgtatagattacaggccagagaggattgggacttgagattggaaatggcttgggcatattctcccgatgaggcacaacctaagcggatccttgatggaaaagagctgtctcacatctggaaactgtctttccccactgccttcttgcctgaacttcccagatgagaggctctgtgtctccctactctcagtgtagatagccatgctactagccagcctccattgagtaaagtgctttcctctacaatgtctacaccttttcagtattctcttaagctgtcttccaattagagattaagttgaattgatacaaattctcttagaaagttgcatactgccaggcacagtgacttggatttataatcccagcccttgtgaacctgaggcagaaggatgaccctgagttaaaagcaactctgggccatgtggttgcaggcctctcctctcccactcttctggaaccatatatttctgaggcagcccaggcacattagtgtacattggcctaagtctggttacccgctattgcatgcctccccgtagccctccactggaatcagggactggagttttcatttctgagaagtgaatttgctttgtggtgctgatgagacagatctgggatggactgttaaatgctgttgtaaacggtgtgaatggcattgtagttcagtttactgcggaggcaagtccttgtgacaagggagaatcaccaaggaaaacttagcacaaatacggtttctggtcatctttgagtctaggacagggaacaggagatctccctttatcttatactcaattactgaacttctgaatctcggcacccagacagttgtgtactgtgatcatgacactgtgggcgggaaatgtttgagatagcctgtgagttagatcatggcttccaacatatcctgatgaaatagaatggtctacttgtggaaagcagggcagagaatcccagtaaggggcttggataattgggaaagtgtatgaaggccatcagctggctacttgtccatgctctgcccccatccagtccccccacgtcctagctcttctgtgaagatacactaccttatagtccccacatagctgcctcactgatgttgccattctgacgatctagaagtcctttcatctctcatgcagtctatgtaactcacaacatagcagtaggtcttactttagtgggactcaagcactaaaaagacttttactaaaaagtgctttactacaaagactgcttcctgctgagcaaaatttttcctagaggagccacaggctggtacaaagttgtaatatgttgtaatatgtccttctggaatggatggaaaggcatatggaggaacaaacatagctttcttttaatttatctttttcatatctctcccatgattatattactgtcttgagtttaaaaaaaaaaaacaatttaccatttacacagaagattcacacaagcaatagaagcgattgaattggttcaaaaaaaaaaaaaaaggttttacctaaaacaatgaagcaaacaccaagagaaactcaaacaatttttctttctgtgaccacaaagttagctttgaggacttagacaatggatgatcatctggagctgtctgaggctgctggcttatcgcagactgctgctttgtctgcggctcccattaggaaaaatgccggagccaatttaaaaaagggccaaacaccattgaaaacactttgacttgttttgattgaccctaccattggtcttgtttcagttctgacttacacagatatctgggctattttgagtttattatcagaacagtcctaaatattaggttgagttagctagttctgctatccttctctaaattcttatgattaataagagaaccttttaaacatataaacaaataaggcagcttataaattactactacagatttggagctttagcttcataaatacatgcacccagaaattagatacacacacacacacacacacacacacacacacacacacacacacacacacacgtacaaaacaaaacaaaaactcccaaccaaaagcaaaagctgtagtgcatataaaacatcaaaccaaggagacaggaagactccgtggctctccacagctgcagtgctcactgcttggttcctagagcttgtatggcctagcctttaaccttgaatgatccctgcagtacaaggctgtttccagatgagatgtgaagtctcgctctgtaaccctgaggtcctggaatgcctagttagatccacctgcctctgccttctgtgtgttgaggttaaaggtgtgcaccaccgtgcccaactagactgttcattcttgacatgcctcaggtgctcagatgtgaatgctctctctctctctctctctctctctctctctctctctcagttttgcttccttaagaaaaatataaagctatgattttactttttccatagtgaaagcatcatcctggccatacttttgaacagttgttttcaagtcattgttttatgtaatttctctccccacaccctgattgatgtatatggttaagtctccattatttgtttcattctgtccccctgtgactcttctctcccctcttactgtacaaatctaatctactgtggatttggcagtcagacaggcacattagaagggagtagagagagagaggagtggtgttctgatgagatagctcttatgtgacagttgtgagatatgagttttaagaagcccgtgtcttgtcttctctgagaaccctttttgattgctttgctaagttagttcaggaggctgagttctaggtaggtgcggtgccacttgaaacttattactgcccttggcatttggattatgtgtgtggctgaacaaaccaaacttaggagtggaattttccatgctatgagcattttgcttgctggctggcttttggcaagcagccgctgtgcttccatttgcatcccctacctcccaggctccggttttatctgaaaccttagatgaacaggaacttctttaacatggtctcagtttgtcctagacaggtgctgctcagagccagggctgtatcagaagtgcctagcttcagagagacgtctgagctccatctcctagagaccagttttcaactctcatggtgcccaggtgattcttgtgtacggtcaggacagcaaccacgatccaagcaagtgtgctggcatcccagggttgtgctttggtgaagcacaatggggcatggctgtcatatgagctgactggaatagtaacaaatgtaacaggcaagtaatcactgtttgccctttccttttactttagttgtttaatagtcatgtgctactcttcatcctcaagttgtgttttctcttctttcatcataagactaggcctctcccaccgcttttgccatgctgtgtgttgttttacgttctgtgtccagcttctcagccctggctgtcctgggactcacagtgtagaccaggatggcctcaaattcctgtctgtccctctggagtactaggattaaaggcatgcaccacacccagtctgtatccaggttcttaattttaaaaattacattttgtgtgtgcatgcacacgcacgcgcgcacacacacacacacactttggcggagggagatgactctgggtaaaatgcctgcctcacaagcagaaagagctgagtggatccccagtgatgtgtgtctgtaaacctaacacttgtgggacagggaaggaagaatgcagagacaggcagacctctggagctcactggctgcctagtctggtcaactgggtgagcttgactatctaaaaaaaaaaaaaaaattttttttttaaaaaagatttatttatttatttatttaatgtatatgagtatactgtagctgtactgatggttgtgagccatcatgtggttgctgggaatgtgaattcaggacctctgctcgctccagttggcctcactcgctctggtctaaagatttatttattattaaatctaagtactctgtagctatcttcagactcaacggaagagggcatcagatttcattatgtatggacggttgtgagccaccgtgtggttgctgggatttgaactcaggacctttggaaaagcagtcagtgctcctaaccactgagccatctctctagccccaaaatagaatattataaagaaagaaatatgacattgacctctcatttccacatgtatgagtacacatactgtatgtacatatatacacatgtatatctatatgtaccattcttgttaatactttgatacatttcctttgcaatttttttatacatatgtaagtacatttacctcagaatttggaatctttttaagagtatggcccctggcaggtcaacatacttagtggatggctccatgcccatgagtatattagcagtacaaattgcactcagtgggtgcatggttttttaaagagggaagatgcataattgggaagggctggggtggatctgggaggagttaagggagaagtaggggtgaatataatgaaaatacattgtatgcatgtatgacattctcaaagaattaataaaaatatttaaaatttggactctttctaattaatgtgtagttttgtaaactgctttcttatgtagcatagtgtgcttttctgtggcattaaggggcctttgaaagaatgatggccaccattggctttctctttctttctctctctctctttctctccctccctccctcttttcttccttccttccttccttccttccttccttacttacttccttccttaacttccgtacatccattgtcctcacggtgtgcaagtcgtttctgaataccgttttcccctggtctttttcttcctttaacgcccaaccttccacattcccctttgattgctactgccctcaccatcttcctcaaatcaccttccttgttttatatcccccacatcacccctattattttgagtgcctcgccttcttcttcaccccccctgcactcctcttccgtcactccattgccgaatcttccttttcccgaatccctctttttcatttcccatatcccctctggtcccccttttacctttttcattcttccttcccgcaaattttacaccaaaagagtttttttaattgtcttcatgtctttctgtctaattttcttttttctcacccctttttacccgtttttaacccattttttcttttttctccctttcctctttttttctacctcttttccccccttttgtccctttcttccccctttctatctcgtttccccctctccctaatcccacttttctcccttttttcccccttttttctcccggttttaccccctttttttccccttttgcaccatctttaccccttttccctcacttattcacacttctnnnnnnnnnnnnnnnnnnnntagagtgacctgggcagctctggtgcctgctcttatgcagtggatcaaccagcagaggaacacactacattggtcaacagtgagaagggtggaagggaaaacgcagagttgcctcaccgtggagctgaaacatatgtgcaggtataggagtgtgccacctccgccgcaggaaagtcacttttcagggaagctgactttaaatgaccttaaaaggatgaagagactgtgtatggtgtaggataggagggggcaaagaattagatgggcaaagggtccaggccaggcaaaattaatcacacgggaatagcaaagaaaaagaaatctctttagataagcagactctgtacatgttttcagaatcgatgtgtccagtgagactgggatctgggtgggaagaggcaagcaaagtggggagaggggacagtggcacactaagtcagaagcacactctgtgaaggccttgggaagtggtggtgcaggttttaagtacagtggagcaattgaggggtgggatacatcttgtaacaagaaggcagtattgggcgaaagtgtacatttatacaggcttgctttaattttattgccagccccacccctggaccccaagagcaggcagttgtccccagtgtttgttttagtcaagttcatgaattgagcccagagctggcagtactttctcaatgttttctttagtgtgacagtaaatcctcatacaggcctaacgtgtgctctgtagggcaacaaagctgcttgttgactccaagtaaatcttgataatacataataggctatataaactgacttgggaaacatttttctgcttcaagtaagagtggatttttgagccatgaattctctgaaaagactctgagccaaaatttaaccccagtttaccacttctacaagaacagtgacaattcatttttctgttctttttctgttctcttttcctatctcaatttgtaatcaagtagtaactcttcaatttcctttattactatttataagaaatggtccctttaaagatctgagcacctggaacagtgcaaaggaaatatgtgaatgaaaagtaaccactagttctttagtgactagtaacttaacaatacaaactaagtaaggtgacaagaggaggggctatgtaatctatacaatgtatcaatattgttcctagctttatccatggaaactggattgtaaattccactttatcacctcccacctctcctggaggaatgaatgagtagttcccactctttctgtgtgtcaagttgaatgctgttggctgcctctgaaaagaagccctgaccacagcagcttaaatcagaaggaaacacaagccgggcagtggtggcgcacacctttaatcccagaatttgggaggcagaggcaggcggagttctgagttccaggccagcctggtctacagagtgagttccttccagttcagccagggctacacagagaaaccctgtcttgaaaaacaaaacaaaacaaaacaaaaaaaccaaacaaagaaaaaaaaggaaacacaataaccaaacgaagccgtctggacacgggctctggccatgccctgagagcccagccctgactcccttggactctccttgtgctgcttccatcctcattcccgtgcagatcattgcagtaattctgtgcatcctacctgcacacagtcactgccaaaggaaggagaaggactacctgttgtcttgtatgctccctctttggtaatttgtcagtatttggttgcatgcccattataaaacccataaaaggtgagaggcgcatgattatcagctttacgaaggaattgtttggaactgggaataaagtttcctgctgctacacctggccacatagatgggagtctgcgtctgaacagccaggtacttttagaaaggaaaaaattgtatggctggaataggatgttgggaggtgaccaagagtgtctcctcagtatactttgaaaagctatgtggatagaacagagttcattcagaaaagaatgcttcctgtgaagagagacttgaaattaactcacttaaaagggtgactggagaaaataagatatagatcataaccaaaacaaacaaacaaacaaaaaaaccaaaacaaatctacaatatttgagtgggaattggttgtcctgttttgggagatcccaggagacagaatctgtacaggtaggtgaaatgaagagtgtcctcctaaagccgttaggtcagggcagagcaaggtaagtgtctgtgtcaagggtaggggccaccttagggtttagagcccaagctgaacgaagtggctccctgcctgagcatctggtatggagaagaacacttctgtgcaggcaggctcctggggacagcagccatcttacttctcagactgatgctgtcgcagtgcctgtgttcaagtagtcctcagtcctcagaatggtgtgtgattaagatttataaattgtttatttctggaattttccattcaatatttttagattataaactgagcactggtaattgcaagcacgggggaggaagcagcagatcaggaggaaggtactgtagttagggaaacaggaccagcttctaggaaagggaaagtagagagaattatttattgggacaattactatgtatctggaactgtatttaaaggtttttcattccttatctcttctaacctgctctgctgtgcacaatagcctttatataaatatgaaatctttggtgaattaagaggcagttggaatttgaaactaagttggcttgagttcaaagcccatgacctaacggcttcctaacatataagggctgtagaggcctgataatgtcttaagatactgaagaagtgtttctgagtactcaagttgacatggaggtgatcatggaactcacatatgagacaaagatggtcagaaacaagcaataaagtatgagcaaatggccagtggatgaaccttgagaaacatgtttttatttgcttgtgtgtgggttctactgagacatgtgtctgtatgcgtattctgaatggtggtagctaagatatattctctttaaagttccttaatactttggattggagtcaagtcatcaggcctgggtgactagtgcttttctgtgccttggttcaaggaacaaatatcttatacagggctgtccaatactaacgaccttaagaggtgccaagagaggagtacccagggaggttggaagaaagccagcaagtgtagtgatataggattcaagagaacagagtggttggcaaaggtagattccccagaaatgcctagggagagatacctaatgactacccatcagatatacaaggagagccagaggttggtttcagtgcatggtggaggtagagagcagtttgtagtggttgaacagtgagtggtgagaaggccttctagatccccgggcagggagagcaggacattgtcacaagaggttgaaaatgggattttggttttattttgtttttgttatattttaagcctaaagagttgagatgagttgataataacaacaaagagtaaggaaaagagagaaattgggagagtgagattaaaagagaagaagggtacaagatgggttgagatgaaggctctgcgacctctgcctaaattgttcattttctccaccatacagcagaaaccatgctgtgtaaaccagggtgctcactgaccatagtctagatgctctatgtgatcaactagaccattcccaaagctagaaagccaagacatgtctgtttgtatattctgcatggtggcagctacgatatattctctttaaagttgaccagttcaggactctcttcttagtgtaatctcatgagaaatgcccttgcacacggaagaggaggacaaagcattgagaacgaatacactgttagccagcagaagctcaccctgcagaccaaagaaagtgctgcaggccaggtcataaagaactctgccatgtttttcagggctgagtgtgttttgcaaaatgcattgcttactctctcatggctacttttcctgccatctagcttcgttttgaagaactgttttaatatgtatagataactaatctataaaggtgtgccagaaaaaaaatgtgatgtagtaaggagatggaagtattaagtctagcattacaatgcgataaagagtaagtcaaaacctgggaagaacacaagtccatcagcctgggacgagagagtgagttttagtattgctagagtaatacaacagtgaataagtttatagctacacacagcagcatgatgacgtcataccattgaacaaaggaagctgagcaccaagcaatacctactccacacctgcattgtcaagttcagaaacaagcagcacttactggaagtgttggagtttgagaggaaagagagaaagcaataagggcagaagctaagggaaggctcccgggtgctgcaaactgccattctccacacaggtggagtgtgctcctcaggtcgtgcacttgggatctctgcccctacttgttacagtagacttcaattccaatgtgctttacaagtgaaaggcaacaaggagccttccaggaagtggtgaggaaactataacatccagggagtgattgaaaattggtagaaggcctgtcactttatacaagttgccctccagccagtgaggattagcctatacgctgtcaatggtagttagaggtgtcatggctttagtggatttgcattgactggaataactaacagctgcggtggtggtggtggtggtggtggtggtaggtagttgttgttggttgttgttgtttgtggtggtggtgatgatggggtggtggtggctgtttgttgttgtggttgttgttggtggtgtgtgtccacaagcacccagaaatgtcggtatatttgtgtaacatatattggtgtttccataggaaccataccagcacactctctggattagtgtgcattcaagtagtgcactcatcccagggagttactcagctttaacctccaggtgatgtgtgttctattgccgtagttacaacctgtttagctttagcctgcttttattacttctccagtttctttccagtttcattttgaattaggtaccttttaagaattgcacacttatggggtgttcttcttcatgggctgtgttgaactcaatcagttggtctaaatacaggaagtagaacctatctggcattattaatagcttgaaaactcaaatgtcagttgccatcctgaataaagtgtttagtgtaccccaaggtgacgcaagaatcattttggattatttgccactggcttcattggtaattcctcttttcacccagcagatactgtgctgatttccatagatgtacaaacttcagatccagggttatttatttcaggtggggcttagctttctttggctggaggtgactcacttgtggagaattttgaatgcttaagtaaggaagagagctgtttttcagcgtttcataacttgtaactcgtcactactttgccaggatgcattttatgcctttataaacctcttgtaagttagagtttcctggtaattttgattaataaattcataagggctccaaagtgcatgtttgaaattaaaagtaacttttcctgagatgaaaggttttacttttctttgccttgtgctaattccggtatggtgaagttgttgacttgccagtcaagagaatagttgttatttttctgtttttagaaaacgaagctaatttttgcctaattttgagaccagtagctatgaaaggtggctttcaggcttttgctttagaagaaggaaaagaacattgtggggccgttttcagaaactacttgcacaccgttagcacagtggttctccccttcctaaatgctgcagtcctgtaatacagttcctcacgtggccatgatccccgaccataaagttgtttcattgctacttcataactctaattttgctactgtgatgaaccataatgtaaatacctgtgttttctgatggtcttaggggacccctgtgaaaaggtcattctacccccaaaaggatcacaacgtacaggtgaagaaccactgacttagcttgagcttgtaagccagatcattcatatgtacagtctctcagctgtatactaaggtaaaggcacaaagaagaacagacaaaaaagcaattgtagccacattgtggtggagtgaggacagcatgctgcaggaccttggaggaggacactgtgggaaggtagagtagggtttcccagaggagatatttgaactaagatatgagtaggaagttcacattggacattgaaaaaataagttcattaagtcccacattaagaacttcttattttgcaaggtgactggttgccattggagcatttttaaacaggggaataacttgacccaatctgcacattagaaaaatgactgcgttgttaatgagaggataattgtgtgccatttatgaaattaccatttaaatggttcagatggggtgtgggatattgtttgtggcttagtggttggttagcatatattatgccctgggtttgtttgatgttcagcaccaccttttaatccccttctcaccaaaaattttcagatgagactcgtgaggaaatgggaagagaaaaaaaacatagttttgtattcccgagatagacttaattgtccttgactcgcctactgacccaaagtagaaatctcaggaaggtagacctattgacaagagaaatctcaggaaggtagagatactgacaagagccaggaatgtaaaaggaatggaggtgtggaatatgaaagggcagggtagcagattaaagttgttatcatgttggatcctcccatggaactgaccagtgaccaggtgtcagtgaagttctgaagcagctagggaggaaagggtttatttggcttacacttccacactgtagtccatctcttactgaaggaatccaggacaggaactcagatagaacaggaccctggagggaggagctgatggagaagccgtgaaatgctgctgctcactgcctacttctcatgctttgctcagcctgccttcatagagaatccaggaccaggaccacctacttgcccaagggtggctccgcccacaacgggctgaccccccccccccatgtcaatcacttattaaggaaattcctcagaccaggcaatggtgcacaccttcaatcccagcactcagggggcagagacaggaagatctctgtgaatttgaggccagcttggtgtacagagtgaattccaggacagccagggctacatggaaaaaaccttgtctcaaaacaaaagaatacctcacagacttgcttatggaggcattttctcaattgaggcttctctgatgactgtaccttgtgtgtcaagtttacagagctatccaggacaataatctttttcttttccattttatgcacattgctcttttgcctacatgtatgtctgtgtgaaggtgtcaaatcctctggaactggagttacagacagttgtgagctgccatgtaggtgctgggaattgaacctggaccctctggaagagcagctgatgctcttagcagctgagccatctctctagctccaacaatcttatgttcttgaagtaacataatttggtaaaatgtgtgagtcattgggaaatacatccaatcatctttccacatagttgtatgaatatgtgctgccagtgatagatagccctaatattccatggttttatggaaggaaaagtctgttgaaccagaaaataatgatacaaagagaaagcaacaggtctgtgagagtttctggaatgaagcacgatgctgaagagaggtcacattaaagaaaaagtggatgaactcattaggttgggtgatgagaggagtcagcacaatggtaaggagttgacatggatagctcattccagatttctagttacggtgggcaagggggaaaagaattgatagaaagaccacagacttgatggaaggtacggtaatggtttttttagtgtagattttaagcacagttgtgagaataagagttgataacaagacagaagtgtggtgatgtggggtctggagctctgagtcctgactttttcctaggtagggcaaagagcagctaatgtgcaaggggttcagatgtagtatggatggaggagattggaggaatttctgaaagatttcattttgctttgtgacaaaagacaagaggttcccagtaaggaaaggtagaaacatcaatgtttgaggaacaagtaggtttaccttccgatgtgggtcactatcaagtatgtgcttcaccaagctttgttgaaggccttcctgaaaaccaaaactgtattgtagagcttccaacacgctaatctgggacatgttcccaccccccttccccaggacttagcagtccaagtgcaggggaaaagcaaggtaaccagccagtttgcatctgaagacaaggtgggttgtttgcttggctgtttttacgtatgaacttatctacccataaagagagttaagggagattggatggtctcgtaaatcccacaagcagactgagtcacctgatatactaggtgcttttctcatccccaacaaaagcagcctcttggctttcagtcggagggaagagttcatggtgggtggaggggagcaagaggcaggaccacactgtgtccgcacagctttcccccgtacccttttattccgtctgggaccccagcccagggaggctgctgcctacatccaggatgggcctcgcctctcaagaaacacctgaggtgcatattctaggtgatcccaaatttagtcagatcgactgcagtttaagcatcactcaatgcaagctggctactaagctctaaccaaggcttgcaaggactccccttctctaattcactgtgctgtagtaaagctttagaaacagttgtgtattgattgttacacagagcttaacctaacacagaaaacctaggtgtgtacagtgttgagtaggaaggaataaaagcagaatacttgttgtagaaaacatctcatctcacttgagagttgctgacccgcttttgatcattcagttgctggataaaagacacataacttttattattataataatccttcatcagcactggagctgggcagtaatctaccctccaagctattaaaatctacttccccatccatgaccccagttataacttgctaagttccatctgtgctgctcttaactctgattggccagtcctcgtggctgtgtgttcataactcacctacccctctctctcccttctcctcctaccctaagcctggaagcctcaaacccccgccatctcagtctgcccagctgtgggcatctctgttcaccgatcagaggtaacctgaagtggggtgagggggcacagggttatgtaggtcacttgggtctacgtgctgatttctctcattcctgattctcttgtccctgggagcaacgagaccttggggccagtatttagcattacaatacgtagcaaaagaccaagcctcagcaatttctagttatttctctataaaatgactatatgttgtgtgaagcacaaatgtttggtcagcggaagtgatggagagccagtggaggaggtggcaaatggtacactcagagtgccatctcatttttatgtaaagagtaaattttctttcgtttttttttgagacagggattcactgtgtagccttggctgccctgaaactcattctataagaccagactggcttcaaaatcacagagatctacctgtctctgtctcctgagtgcaccaccaccacactgcaaaatacaattttgtatcaaagtaaaatgcccgcattcttggatatgtgtaagtgggaaaagctctagagttgacgtaggcttggttggatggaggaagctagcttaacttacatcagtggattcattttaagagaaaagttcacatggcttggttctcttactgtgttgtaaagaagtcatattttctttatcgggcttcctctcattttgtccctgacagggcttgaagtgacgtcagtgtttcagggtacataaacaacatgcccgagaacagtaactattaggttgatctgaagccctcttaacaatgatgaaaaaaaaaaaaggagttatatttctcagaggactgctcaaagactgatgatttttatgccagtgaagggccagtttttaaccacaaaaatttccctgtaacctttcatgattgaaaacatattacttgctattcaaaaacacaggcaaattagtgaggagtgtttctaaaataagctccagggttagacatataatttgtggatgacaactcatgacacaaagtgtgtctccttctgtgttttgttttaaatggtaggagcacatgaaacccagcaatccaggcttcagataagttttcacagctgtcagatgagtgtgcttagtttttaagggacttctgttccaaattttccatgtcttactacatgttgatttctgacagtttgtgttctctcacagtgtatgcttatgtgactttgtatagtacactaggttgttaggggcttggcatggtcatccaggagcctctttattgtgggctctgttctcgtaaagtatatacttttaagaacaagtatgagacataggactgctgtgtgcagtgaaccagctccttgtcatgacaatgaggacatgacacagcctagactgtggtgagatggtgacagtcagtggttccagccgaagtcaccagctgatcccatgtgtgtgcttctgtgaggagtggtcagctctggagctagtgtagcactggggagctaatgaccacactgtgctagctcaggcacattcagatggcgttctctagatcgctctcaggtaagcacagaacttagccttttgagtgactgttttgatgtaagggaaaatctcatagaagttgcaagattcccttatattttcattttgtttgccatttgccttgtcattcccaccagtttttaagagaatgtcacagacattatacctccacagtccacatacttcagagggtgtttcctgagagcaagcatcgtctgaatgtgcccatagcccagttggataaagcagaccattctacactgcattgtgtgatagcatcgcatcactgtctttatcaagggtttgccaaatgcccctgataatgttaacttgaatagtgcacttttctgttccaagcttatttgcgccctcttaactctttaactcttcaatgcattaagtcttaggtgggatggagagggcctagttttcagagcaggcattgcttgcttgcactgcacatgtagccacagtagcattgtctctgaaacatcatgggcagacattttctgtagcaggtatcttatcatacttgtgctctgacccatcgttaagacaatgttgctgatgaattatttgctgttttatgctgaccacagtaggtagtaagccagattttggatatataatagctactacactttcattccatttggacgttcttctaagttcttgatgaaacagttccaaagtttcaaaacatgtcctgcagtatgactttaacaacatcaacaaaaaagtgccgggcagtggtggcctttaatcccatcacttgtgaggcagagacaggtggatttctgagttcaaggccatctttctgctgaaatgtagcattgcagtctcctctcactggccgtagttaccctcccaggtgggtgccagtagagcaggaaatgcttgtgagtgcatcactcctgactttcactatttgttctggtgaagaatcaacgtcagatcttggtactgaggtttctttctagcagtctggcagagttgccatcacacttctgaatcatccccaagtcagaaagagataataaacatagatttgattctaaaagcttgaggcctaagtggcatcaaataactgaattcagtacagttgtttaaggggctacattgttcaatgttgggagactacaaattctacaaaaatgaaaattatactctcctgaatctctctgttctatcgaaattctttatggctttcttgaatgcgtgattatacgtataattagctactgtgctccttaatatttacattgtcaatgtgcctccttaatatctaatgatttgaaagtttgtgataggtgtagcacataaaatacatagttttcttaatactatttactgttgaaagactagtttcacatggtcgaattttaacacacaaagtaccaagtttgtttttcttccaggagacacagggtgctcatgtgtggatacgctaaccataaatctcttggcgtactcttgctgttgggctgatgaagcatctctgtatggctggtagatatgcatgagctctcagtgtgccctaacatttgggcattcctcgggatgatgctcatgtaggtgctgttgtcttcagtctgtccttgcagaggctcaaactaaagccacacagccgtgtatctccaaaagccaactttccttcttgctttatcaagcccagactgcagcataggcctttcagaactcaaaggaaaaaaatccttgttcgtttagatggaagaagagggtaaagagattctaggcaggccacctacagagcacactgtccctactccagggtcttcatgtacccctcacccattgctcagtgttttctactttagcccacctttagtttcccctggagtatttcagaagtcatgttatatggaatgcattgaccatatatattttccttcctctgaggaaggcaaagcaaggctgtggaaaggcaccacatgagcggaaaatgctagtgagcgggaatcccactgcttctgttatgatggaaactttccttgtctggactacccagagtattcactgttggccacatgtggctactgagtccttgaaatgggactggtgcaattacagagtacagctgacttttagtaatttaactttgagtagttgcatgtggctagtggctgccacattggactgtgcaggctagtacaagaacttagcaatgtgagaccctaggcatgcctcttctcttttaagtcacaaaacatctctttaaagtgaggactacactgactcctcaccatcatagctttcagagtcaaagttggttgtgcatgcaaaatctttcttcatcaaaattatgactgacaccctgtgttttaccataacgaaactggaaatacattttgctgatagtgtcagctctggtatctctcttgttcaaatgctgagtgttttttttttttttaaaaagcaggtataaacccagagtcttttgagcagataaaggaaccaaacttgatcattattatggaggtattgtttagtcttataatgttctcaaaaaaggttctaagtagaagttgaaatggagttttaaaatagaaacctaataaataatacatggactttgtggggtttcggaaatgatgccaagatgggagtggtagtataagtgttaatgtcaccactgaggtggctgatgcaagagtccagcctgagttacataatgagaccttatttcagcaccccccccccccaccaagaaaacattcaaaatctggagcaaggcagaaagtgataaggaacattccggatcttcctacccagagtggttgccatcggggctttggtgcagcctttcaggggtttgttttactttgattttttgtttttcatttttgtctgtctataactataggccatgtatggtagcacccacctgtaatccaaggtgagagacaggaggattaagatgctgaggccagcttggatttgaaataagacttctgtctgaagcagccttacatacatacaaatataaaaatttgcaccttttgcttatatggttaaaatttaactgtattggcagtttatagtccttcatggaggaagccagggttggaactcaaggcaggaacctggaagcaggaactgaagcagctaccgtggaggaacactgtttactggcttgcttcttactgtacaatcagtttgcttttatatacacctcaagaccgccagcccaggctcccatcacccacaaggactaaatcccctcagatcagtcattaatggcaaaatactccctagacttgccgacaggccatctgatagagacagcttgttaagttgtatcaagctgacataaaactaaccagcacacaaatataactaaaatttgtacaaagcttagacataactataaaataatatatataaaattcaaagttatttttatgtgagctaaatcacattgtaaatactgtttctaaatttgcattttccacttggcatatgtttttatctatcttacatacctatatcacatattatttattacattccatatgctagaatatttagtctattggatgatgagctagttatagttatcttactaataaaattattttgaagggctgaagagatggctcagcagtcaagattgcttgctgttggggctagaggtagctcagtggttaggaacattcactggttttggagaatactggggatcatttcccatccctacatggtggctcacaaaccacatagaatcccagtagggggacccagtatcctcttctgacctccacaggctcatgaatacatgtggtattcaggcatacccatacacataaactattaaatattcttttttaaaaagatgtatttatgtaaataagcatgctatttgcatatatgctaaaagacagaagacagcatcagacagaagaagctatgagatcccactacagatggttgtgagccaccatatggttgctgggaactgaactcaagacctctggaagagcagacattgttcttaaccattggagttgatgcattcagcattctgttattaattgtgtgtgttactttatagcttttagattcattctgtatagatagattctccatttgctcattagccatagtgttggcttctatgttgacgtgcagtatgccctatgaactttagtgttaagatgggtagccctttgactgtctgttttgtgaagagtatttctaaggtacacacacacacacacacacacacacacacacacacacacactttggctgaaaagttgcatttggcaactttttttttaaaaaaaaaattaaggatctttctttggagcccagctggcctagaatctggggcagtctttatgcctcagccatccaagcgctgaggatgtaggtgtgagacatcccacagaacttgaaagaaaaacagaaatgaaatacttgacagtgtagtgacatgggattaaacacccaagattcttactataatttcaaagtgagcttctgaagtctggatgcagagaagagaagaggcaagatcactaggagtgaaagtggggaggaaagatataagacactaagagttggagtttgctttttgttgctgtataaaacactaccaaaccaacttggagatgaaatggtttatttcctcctacaggttccaatacatcactgaggaaaaccaggatggaaactgaactagaagccatggaggaacacacttattagcttacttcctctggtgtctccactgcctttcttacacagctcagacatactgcctatgaatgactccacccatagtgggctgtgttctcctaaatcaattagcaattaagaaaatgactcaaagacttggccacaggccaggctggtagaggcagctcctcagttgagattcccttcttcccagattgatctaggtttgtgtcaagttggcaaaaactcatcagtacatatatgtagctaaaaaaaaaaaatagcaatttcaagattcttattataatttcaaggtgagcttctgaagtctgggtgcagagaagaaaagagacaagatcactaggagtgaaagtgaggaggaaggatataagacactaggaatgggaattggggtcccagctacatctcagaaagggcatgcagcttggtgtggtggggatagatcacccgggcaggtagttcctgaaggaggaagaaaggggaggaggatatatacatatacatatacatatacatatacatatacatatacatatacatatacatatacatatacatatacatatacatatacatatacttgtgtgtgcgcgcgcgcacttgcgctttaagactgtgaagtgtaatagaaagatctcattaagcaaactaataccagtgtgcagttatctcttaagagaacccttgtccattgggccattgctgggatcagctgtctcaaacctcgtggttgttacccctgaacttcccactcctcacatatcctctcagatggcagatgtcctgttctcatactgcttccggtgtcgtccttctgacctggctgttgcccagtctcactgtatcccttcttatccttacactgtactgccccagcattcttcaagggggcttgtctctctggccagcgtccagccctggaactgtcaggctgctctttgaagtttgccttcgggattccagtatttgatcttttaggatttgctgggaaagatgctactctcaatacgtgtttagttgctaaccttaggcagaactgagtctgccctctccgtttggttttgtttggacagtatctttactagcttttttttttcttcgtttctataacagggcacacaatttaaaatgcagtgtaaccctgccttttggccttgattggtccagaggtgggcaacccaagctataccactcaatcaaagttcttcatcagaatttgatatctaaaatgaaatcatctttcttgttggcaaaaaattcagaatacatatatttagtaattgatgggaatcaagttctgaataagaattaatttagagggggaaagaagagtagggaaagagagagaaattgtagaaatgaattatagctgaaaggtcacagtaatgtttcctaatttcattggaagtagcaatttccactctttcaaatcatgacccatacaaagtggtttaaattttttccctgagggaaaagagtgaaacggtgcttccagctggtggatgcgcctgtaacctgagcacaggtgtgctctgggagaacacgtttgtaatgcgtgcttggctccagtttttcacctggtcccagtgtgggtcccatgagatgtccatcataacttcactctagatgtcagctcctccagctgttttcctgaactccccagctgatgctcctgtgtgctccactaacatccagcccctatcccataattatctaattatctgcctgtgcactcggtgcccgagagagcctcaggaggatagaaaatacatctgtcttttctttgtagctccactgcctccagtggtataaacatctcctgaaagaggaattatgctctctctgcccacataaaaagagtaacaagaaaactgtaattgaaacaagatcttgtgtgcgtgttctttccaaagaagatagctttgaaaaggagtcctggataagagagcacagacctgtgtctttttggcagcatctacctggtgatgttgtcagaccatcagatcttccagacttgaaggagatggctcagtactcctgttccaagataagactcaactcattttcagaggagcagatttcctgtgggaacaaatgcattaaaattcctgaggatcaatattgtctaacagaatgtagaacagccgcttccttttggcggtcttctgcccctatagtatagcttccctgctgcagcgcctaacctccctagggcagaagcttaaactatgtcttagtgaggccacaaagctgcccacctcctctggcccagttttaagtacttaaaatctctgcaagtatcttttggctcctcggccctgaggccctgccactgcagcttgttgttgtcacctaacactggtgccttttggaattctgcttcaagtgggttggttggctttttaaattaacttctcagattttttttttaaaggttttctttgttgggacccaggtagactggacttgactcccctcccctcccctcccctcccctctcctcttttctcttctctcctttccctttccctttcttttctcttctttttgtttttgttttttttttttgttttgttttttttgttttttggtgttttttttttgggttttgttttttgttttttttgagacaagatttctctgtgacctggcagtggctgtcctggaacttgatctgtagaccaggctgggcttgaattcatggagatctgcttgtctctgcctctggagtgctgggattaaaggtgtgctctgccacgcccagccagtagacttcctcttaatgattagtttgaaaagttgctggtggctttctgcaaggcctagcctgctttcttagctaacattcattcccttttgcctttgttccctcagttactgacatttcctagactgttcgttaggctatcaaaactctccatccttcttctcccgcttccggttttgttgttgttgttccactagtaactatatatcatcttataaagacatacatgtaagatgtgtcgtttctttagaaatagcatagcactaagcttcaaaaacctgaggagaaatgatatataatcaaattgtaattgtttatagattaaatatttaatgttattcaaataagtaagactgaggtgaaattagatatgcagaagagaatttgtctaagtagtaccagagttaatctgtaaaagcaagtggtggtagttgtagtaacttcctaggaaaatgcagaagagactcagtcgggccttgctcttcctcatgtgcctttgaacaggctatccctgacttccgttagtaaatcctttagtaaatcattcttcatctatggtccttctaaaatgcatatctgaacactctgctctctggttacaggatgtcctggcttgccctgccctcaggataaagtacagagtcatttttaaggtccgtacgatctacccagccccgcccttccagggctgaagcccttgccacactctgcttcacagtcctcctgctgcagccaggatgccagttctcaaactcttctggtacccttttctctttcacttacacatctttcaacatgccatttcttctggtaggccaggcatcacatccctagaaaactttttcctcattagctaagtccatccgggggttcctttgtgcactgccttcgtctcccacatgtctgtcatactgtggtgtttcagcctggttgcttgtctccatgctctcaccactagtctgtcatcatcataagaacagaagccaggaatacgtcttttaccaatcatctctcagagctaacatgatgcagatactcaacaaatactaatcaaatgaagtatggtggccatggtgatataaaaagcattaagatgatgatgtaaaaataggcattcatggaactaaaaggtcatcccaaagtaattgtgaaagctgaatacatgatataatatgcatcataaatgtaaagcagaaagaaatatgtattcgataagtattattaccaccattggtaactagtttgaatgaagaaaactagatgtgaatctactatagtactccaataaaagttgctaaggaaatgaaaggttaaatagaaaaccctagaagtcagagagcatgatcagggaaatatttatatttatagaagatacttataggaaatattctagggaggagcctttcttaagcttgtgtgtgaacacaggctcaccttcataaatcttttaaaagcacattagacctcagaaaataattgctgtaaatatagaagtacataagacacattaaatactatattaaaaagctcactgtcgtgactaaatgtgaaaactctgtaataaatgcacatatacacatgagcagaatatttgtcatagcaaacttgtaagtggctaatttcacttttactagatccagagaactaaatattaaagtagtgaagtactaggagtgtttttattattgtttttctcctcattagttagactgacaaagaagttttttcagtttttgggtttcttctttttcttctttttaaagtcagagttgtaaggacatggtgaccaggtgataaatgctttctcaggccttgttgggtactaatatcaacaggcaagattctttatgtggcagcctggcttggtctagatcagtatcatctaatcacacacttctgtgactacccatctgtgactctagatgaaagaaacaatataggatgagctttagatttgggtcatcaaaattttaaattatagaaaaaaagacagtctatatgtgtaattataggagaataattaagcagcagtagatgaatatacctaattcatgaaccatggtctgaaaaacgtgtgctggagcacgtgcgtgcatgtgtgtgtgtgtgtgtgtgtgtgtgtgtgtgtgtgttggacaaaagactgacagcagaacatacaaagaatcatcatcaaacagacacagcattggaaaataattcaagcactctgagataaagagaagtaaataatcttaccagaagaaagcccagtgttccttctatagtgatagaggagtctatgtgaacagtgatataatgttctcagtgccttgatagaaatatgcgagaacagaagaggaagttctgcagggaactggagagccccacagaggggtagcattttagtggagtattggaagatggattaatgtatattctccaagtagccaggcagggggtagcatgaggggaggatggagttgtgtttgatatacctgtcagagtacatttgggagcagtccatgctgttgacaaagttaaaggaaagttatagtgtctgctttggagaaggtaactccagtcccggtgtgctaagagaaatggagaagttcatttggtgagaggatgtagttaggagaatagtgtagttcttatgtggcagtcgatgaaggctggagactggaatgatgctactgttagagttggactcaagaagctggcaaatcggttgcttggttgaggaaaaataattggtgataattcacaggatgctgccttgaaggacaggctctcctgatcttggccttacctatggccaccatgtgatcttggtggggcatggggacaggaagtaggacacgctcacttgatgagtaccgcccagaactattttcctagtgacaggagtaatatatgattagacagtctgccatctctccaagttccctgataatataatagcaatttttggacttctgtctattgtgaatactattgaaatactattaatattatactataatactataatattaactataaatcagcatagtatcaaatgttaaagttttgagaaatccattcatttgtttattcagcaaacatttatcagccctgtgccaggctggagcattgggactaaggaaagggatgtatcctggtagcatcgggactaaggaaagggatgtatcctggtatcagaggaactgaaaggaaggtttgatgttctccatgctggggagtcagagcctgggagtaacgtgatgtggcttatgtgtcagtgaaatccctctggctactgtttgacagtaaactgaaggggaggtaggggaactgtaggaagctacacatcatcaaagtgaaggactggggagatggctcatgaagtgcttgtcatgaaagcttgaggacctgagttcagatcccagtacccatataaaataaagctgggtgcagcagcctagtcctctaatcctagcatggggagacagagaccacaagatccttgggttcatggccttgtagtctagttagtcactgagtccaggttagtcagagactgtcttaaaacatgaagtggatcgatgattgagaaaagacacctaacagcagcacctgacctccacatatacttacacccataggtacgtgtacccgcatgcatgcatatcgtacatgtgaacatgtacttaccacaaacacatacacaccaaataatccaaatgaggtgatggtagaagaggtggtaagaaatctggttctggaaatattgtgaagataatcatgttggcaaaagcagagctggagagtagaggtcaaaaatagttaagccaatggtggtggcacacgccttcattctcagcacgctggaggcagaagcacacagatccctacaccctggtctacagagcaagttccaggacagccagggctacacagaggaacacaatgaaaacttttgggacaagattgggaactcagtttgagtgctaagggagtagctgggtttatgactgtgaggttcaagatgaaagtccgtgctggaaagacaaacttagttttgagtgaacacattacttttatgtggtttatgacttaaacacccaaggctctgggggctctcataaaatacaccactttacactcacgtaatgatcccatggggaaaattgtggattgtgttttgtaggcacagaaacactttatagattgtataaattaagctgctaatatgaaaccaagagttatgtgcgttttaaaggattcctgagttgtgtacagtgtgagttcttttcatttgagttttacttttagtttaagaataaagcacacgtctttctcgcttcagtaaaaatggtgaatttcatttttttaattaggtatttatttcatttacatttccaatgctatcccaaaagtcccccacacgctcccccacccactcactcccacttcttggccctggcatataaagtttgcacgaccaatgggcctctctttccactgatggccgactaggccatcttctgacacatatgcagctagagacatgagctccggggggtactggttagttcatgttgttccacctatagggttgcagatcccccccagctccttgggtactttctctagctcctccattgggggccctgtgatccatccaatagctgactgtgagcatccacttctgtgtttgctaggccccggcatagtctcacaagagacagctacatctgcgtcctttcaataaaatcttgctagtgtatgcaatggtgtcagcgtttggaagctgattatgggatggattcccggatatggcagtctctagatggtccatcctttcgtctcagctccaaactttgtctctgtaacttcttccatgggtattttgttcccaattctaaaaggggcaaagtgtccacactttggtcttcattcttcttgagtttcatgtgtttagcaaattgtatcttatatcttgggtattctaagtttctgggctaatatccacttatcagtgagtacatattgtgtgagttcttttgtgattgggttacctcactcaggatgatgccctccaggtccatccatttgcctaggaatttcataaattcattctttttaatagcagagtagtactccattgtgtaaatgtaccacattttctgtatccattcctctgttgaggggcatctgggttatttccagcttctagctattataaataaggctgctatgaacatagtggaacatgtgtccttcttaccagttggggcatcttctggatgtatgcccaggagaggtattgctggatcctccaatagtactatgtccaattttctgtggaaccgccagactgatttccagagtggttgtataagcttgcaatcccaccaacaatggaggagtgttcctctttctccacatcctcgccagcatctgctgtcacctgaatttttgatctttgccgttttgactggtgtgaggtggaatctcaaggttgttttgatttgtatttccctgatgattaaggatgctgaacatttttcaggtgcttctcatccatttggtattcctcagttgagaattctttgtttagctctgagccccattttttaatggggttatttgattttctggagtccacctcttgagttctttatatattggatattagtcccctatctgatttaggataggtaaagatccattcccaacctgttggtggcctttttgtcttattgacggtgtcttttgccttacagaagctttacaattttatgaggtcccatttgttgattctcgatcttacagcacaagccattgctgttctattcaggaatttttcccctgtgcccatatcttcgaggcttttcgatgctcacagtcagctattggatagatcacagggcccctaatggaggagctagagaaagtacccaaggagctggggggatctgcaaccctataggtggaacaacaacatgaactaaccagtacccccaagagctcgtgtctctagctgcatatgtgtcagaagatggcctagtcggccatcagtggaaagagaggcccattggtcgtgcaaactttatatgcctcagtacaggggaacgccagggccaagaagttgggtgggtgggggagcgtgtgggggacttttgggatagcattggaaatgtaaatgaaataaatacctaattaagaaaaaactattattctagaaccaaattagtgacagctacacaaccacattcctttttgaatatacttgaattggattagaaagtccctggagctgccttcttctccagcagctttagtgctaacagtgttcagtagctacgaacaaactgagtgaaggctgtctgggaggaccgtccaggtggcaggagagggaactgtggagagctttcctccaggaagaactcagcatgccgtagcccagtagaaagaagactgtttctacaggtaaacataatatccttcaaattattattctcttcctcagcagaattttaaaagtattttctgattagtaccctcatcaggttgttgcttactaatatgctgagttttattttctttttaatttgacccattttcatatgttaaccgaatacacaagccgctaatctatttataaaaacgtcctatttccttactgtatgagttatcttgttgccataacagattagccaacaaaagcagcataaggaggagagtttatttcttttctcagttcaggatgcagctcatcctgatgggcgccacagggcaggagcttgaggcagctggtcatgctgcgtcctcagttagcaagcagagagtgcgggctggagagatgactccaggccttaagcgctggatgctcttctagaagacccaggttcaactctcagcgcccaagtagcagctcataactgtcactcccagttctagagatttgacaccctcttctggctaccgcaggcaccaggcacacatgtggtacacaagcatccatgcaggcaaaacaatatacataaaataatgagtattttattttttttccatttttattaggtatttagctcatttacatttccaatgctataccaaaagtcccccatacccacccacccccactcccctacccacccactctccctttttggccctggcgttcccctgtactggggcatataaagtttgcaagtccaatgggcctctctttccagtgatggccgactagaccatcttttgaaacatatgcagctagagtcaagagctccggggtactggttagttcataatgttgttccacctatagggttgcagatccctttagctccttggctactttctctagctcctccattgggagccctgtgatccatccattagctgactgtgagcatccacttctgtgtttgctaggccccggcatagtctcacaagagacagctacatctgggtcctttcaataaaatcttgctagtgtatgcaatggtgtcagcgtttggatgctgattatggggtggatccctggatatggcagtctctacatggtccatcctttcatctcagctccaaactttgtctctgtaactccttcccatgggggttttgttcccaattctaaggaggggcatagtgtccacacttcagtcttcattcttcttgagtttcatgtgtttagcaaattgtatcttatatcttgggtatcctaggtttggggctaatatccacttatcagtgagtacatattgtgtgagttcctttgtgaatgtgttacctcactcaggatgatgccctccaggtccatccatttgcctaggaatttcataaattcattctttttaatagctgagtagtactccattgtgtagatgtaccacattttctgtatccattcctctgttgaggggcatctgggatctttccagcttctggctattataaataaggttgctatgaacatagtggagcatgtgtccttcttaccagttggggcatcttctggatatatgcccaggagaggtattgctggatcctccaatagtactatgtccaattttctgaggaaccgccagactgatttccagagtggttgtacaagcctgcaatcccaccaacaatggaggagtgttcctctttctccacatccacaccagcatctgctgtcacctgaatttttgatcttagccattctgactggtgtgaggtggaatctcagggttgttttgatttgcatttccctgatgattaaggatgttgaacattttttcaggtgcttctctgccattcggtattcctcaggtgagaattctttgttcagttctgagccccattttttaatggggttatttgattttctgaagtccaccttcttgagttctttatatatgttggatattagacccctatctgatttaggataggtaaagatcctttcccaatctgttggtggtctttttgtcttattgacggtgtcttttgccttgcagaaactttggagtttcattaggtcccatttgtcaattctcgatcttacagtacaagccattgctgttctgttcaggaatttttcccctgtgcccatatcttcaaggcttttccccactttctcctctataagtttcagtgtctctggttttatgtgaagttccttgatccacttagatttgaccttagtacaaggagataagtatggatcgattcgctttcttctacacgataacaaccagttgtgccagcaccaattgttgaaaatgctgtctttcttccactggatggttttagctcccttgttgaagatcaagtgaccataggtgtgtgggttcatttctcggtcttcaattctattccattggtctacttgtctgtctctataccagtaccatgcagtttttatcacaattgctctgtagtacagctttaggtcaggcatggtgattccaccagaggttcttttatccttgagaagagtttttgctatcctaggttttttgttattccagatgaatttgcaaattgctccttctaattccttgaagaattgagttggaattttgatggggattgcattgaatctgtagattgcttttggcaagatagccatttttacaatgttgatcctgccaatccatgagcatgggagatctttccatcttctgagatcttctttaatttctttcttcagagatttgaagtttttatcaataatgagcattttaaaaaagagatgaatgcttgtgctcagtttgctttctcctttactttacttttatttttgttgtgtgtgtgtatgctcaaaagtacatgcatgcatactgatgttaagatcagaaatcaaaggccctgcttttttttttttttcagtccaggacgctagcccatgaaatacagcctatatttaggatggatcttcccacctcagttaacctaatctagataatttttcagagatagcccagagattatctccatcatgactacatcccatcaaattccactcaagattagccaccactttctccatcccatattgtatggtatcttttgaaacctgctggaaaaacaaccagaaaattagtatccaaaaaaaaggaggaggaagaaagaaagaaaaagaaaaaatatttcatttgatgataacaaaggatgtgatatatggacagacagatgagcagactgagcaactgacctttgaagcgtctgctctctccagtcaaccccgctcactccagtcggtcccgctctctcagcccctgcttgctctggcccaaagatttatttattattatatctaagtccactgtagctgacttcagacacaccagaagagggcatcggatctcattgcgggtgtttgtgagccaccttgtgattgctgggatttgaactcaggaccttcggaagagcagtcagtgctcttacctgctgagctatctctccagccccacctgtgtctttaaaaaatgcttttcccccctttttgtagtgctaggatttgaacctggccctcacatgtcatagtaggtgagtgctctgtcactgagctttggcttcttactttttattttgagacagtctcagtaagcgtcccagctgacttcaaacttgctctgaggccagataggccttgagttttttgatcttcctgccttagttgcccaagtggctgggcgggcagagctgggcttcttttgctgcgtctttaacacttttcttgcgtgtcagcatagttttcatgagcatcatgccctgctgtgtctctgagacatagttctgctgaccctgctcacagccacccttcaggaagcccagtgcccgcagctggggcactgtatgcccatacagtttaagtgttttcttgtacttaaatcacagcttgattaaagttatttcctgaatcctgcatattctcactggatgatggagatcttagtttaatttcactgctttctccacttatctccattattcagagcacagttgtgtgaaattaagtgaaatttgtttcaggaaagctaaaatagatactaataattttcttcattcataggagactaacttaagttttctaacttattttggtgatatactaataaaaataactctaaactccttgaatcaagtcttttctttttgagatgatttgatcagtgctgtttgttttaagacaaaaaacctcaatctatagcccaagctggctttgtacttgagatcctcttgcctcggcctgccaagtgctagattcctgggagtgcccacctgtaaccggcctgtcagatgggttctgctgtgtagacattccaccaggtgtgcgttccattgtgggggcctctcctatgttgagagaacaggagaatctgatcccatgtcctggatggcaacagcaccaaggcataggcttcttgactgcacagcctccatttctaggagtctcacaaagctctgtgaagattactcagagtggaagaaatggcttttgacttgaacccaccgttttttacatccgtttgtagatgaagtatctgttgctctaaatctatcaaaaagagggtgggggaggagttatggaagcagcagacttggacagtgatggccttttgcagtctagttccctgctccgacgtgcctgcccagcccctccctgttaggctactggtttttgctactatttcaagatctcatcaaaaaagtaaatgttttgtagtttgttttggcacactctggagcatattttctttccatcgtttccatttctgttcccaacttattttctcctgtgtgtgtgcttttgtggtggtgcagccccgtgactaagtctttagcataggaatcagacccaagttttgcctccagactgtcatttactaatagtgtggttttaggagaacttacccaactgtgtgtgcctcagtttccatagcagcaaaataggaatgcaataatacagaaccagcaaaacatattaggtctcagaaacccagggtcaatggctaactgaggtgcctattaacatattatctaagtgaacacacaggccagctctcccagaatcactcagtacctgtggcttcccctaacacttctcaccccaccacgctcttccctaaacctccccctcccagggctgggcttctgcttcccttccccagcctgatccctatataacccagccatttcaactatgctgatctcttggcctcttggcccaggccacatcttagttggcagttgctctctcactctctctcccccatctcttctcatgcatggtccagtttagtctgccagccatgttcagtcaggactctttcctctgcctgctttctcaggcagggttatttcacccttgtatctacactaaaactccatgctataggagtagccatgtcctccttttccttcatttctcactaacctagaaagcagagtaaatgagaaaatgcccatcgtcatcttgcctccgagcacagagcaatactcagagcagcttagcttttcactccttagactcctccatgtaaatgaggttgattagaactgctgtccctcctcctctctcacatgccatctttcccatccttccttcatgagaacacagaactaaagagaatggaacatgcctcagcactgccaagtgccccctcggtcactgcttggtgtgtccctacctgttaacccagagaaaaaggagaatctaatagacacactcaaacaactacctcttacctagagcctttttggaaaatgttgcctgctatagcttgccgatcctcacgctgatccttgctcagacatcgagtagttttcatcttgcttcgagcacctcccagactcagtggcttgctctttgctccatagttagtgctttgtggccccatgcttttgctacatagttagtactttgtggccaccatgcttttgctggcactatggctctaattcagtaaaactttacttttctttggtcagatattgcctttttttaaaaaattttatttcacatagaaattagagacaaagaccacaatgctgttaataccttccacctgttactcaacagacagcccaaccctgttaaggaaaaaaatcagaacacagaaagtactgccatgcaggtggaactgggaacaacaaaacccagacagaaacacaaggtgcaacatctctgcatactgatgtaagcctggccacgacctagaaggaaagcagtcatggtctagtcattgttgatgctgccaaccaagggcactggactcagctgtttccactggccgtggctctgggctctacggtaggagctggagctgcttgtttggaagttggatgcatcacaatgttatccttttatctttagtaaaaatacaattgctataagaacagacatttttcatgtaagtcagtttttccagaaagatatgtcttagaagaaaggttttttttttcctttaaatttcttttttgagattttattttatgtgtatgaatacttccctgaatgtatgtctatgcaccatgtatgtgtgtgcaaggtctgtagaggaaagaagcgagtattggatcccctgggactggagttactgacagttgtagggttgctctctcgccccaaaagtagttttcttaagttccctttccatatcaatttggcataaaagattatttcttctttacaaagtcacagataatctgtcttaagaactgaaaattcaactttgtctttaaatttagtaagtttctttcttttccagcatggtctcatgtagcccaggctggcctgaaacgtactgtgtagacaaggatgaccttgaatttctgattctcttgtttctacatcctgaattccatggttacatgtgtacaaaccatcatcatactgggtttatgtggtgctaagaatcaggacttcatgtgtgccaagcaggctctgagccacatctctaccctcccctttctttcctatgctgaaagcttcaagatatagttgttgggttttttttttaattaaattaatcccttttaagagaaaaaaattgactcttgggggagtatttcaaaaattaaaatataattacataatttcctctttccccttaccaccttcaactcctcccagcccccaactccctatcaaattcctggcccctttccctttagttatcattgttacatacatacatagaacataaatgtatacttaattatgtttataaatgtgcatctgctgagtctgttttaagaaatgaaatttttagccaggcagtggcggcacacgcctttaatcccagcacttgggaggcagaggcaggtggatttctgagttcaaggccagcctggtctacaaagtgagttccaggacagccaggactatacagagaaaccctgcctcaaaaaaccaaaaaaaaaaaaaaaaaaaaagtgctataaattatacataacaaaatgtgacacagagtatactatagcttagtacgtagcagtacttagtgctttcccacttttgtgtagccgtaaccactatctgtctcccacgcttgtcatcagaagctgcatgcctgtccgcaacgctccacacccttcctccttgcctcaagcccctggtaaccacccttctttctatccctatgaacttgaccattctaggtacttcgtataaatggaggaatgcaatttatgtgcttttgtgcccagcttgtttcacttagcataatgttttcagagttcattcatgttatagcctgtttcaggattatactcatgatggctatggaatataccattatatgtatatatcactgtttctccgttcatctctcttggactgtatgagttatctccatctttggatgttgtaagtaatgctgctgtgaatgttgatgtgcaaatatctatccatatccatgccttcagttcttttgggaatgtagttataattaccacctactggctcatatgctaattttatatttctaatttgaggcactgccatactatcttccacagcagaccatgccaccttatacttccagggttctaagaaatttgcagggggaaagcatttaaatatatgtacttgttcaaatacgggtatatcagaataaaaaaatggagtagcatgagaaatgcacgcagaagtactgtctttactgtgctgtgccaaggtatttgtcaggctagtttacaattcgtactcgctgatttatgttcaaatagaagtcttctgtagcctcagtacagtgagatggggaagttaccagttcaaggccaaccagggttacacagtgagaccctgtcccaaaaaagaaaaaaaattatattgtcatgaaaatgttgacaatctactatgtgctgggtaatttacttggtgttgagttttactaaataacaaactactgaaaggacgcacatttttaacagaatttatcaagctaagagaggctggattgagactcagtcttaaagctctgctcttcctaaggtggtagctggctgctgcggtaagttgtgtattcctctacatttcgccacatgtcttataagcatttattcatttgtgtcaacaaatctctattggcttcctgccctggctctgtgcggagcagagatggggatgctgactgcagacaagtgagacgggcaggtcccataaatctgactaaagttctgtggaaaagagaccttggagtagatgggagggggcaagctctccaggtttgctgcaaacaaagtctgtctaaaagtaaacactagaaaggaggccctaaagtccctcagaattctccctcagtgaccagcgacaggagagagataatgaccgacatgcccgtagctcttgaacaccacctctcctctgcaaatgagtactgtagtaagcaagcaccaattaccctttcaagcatgcctaggcaattaacaatgtcagtgacttaaaaactctgtgcacatgaccccgcgatcttaatttaagaagcttcatcctgaatcaggaaatactgagagtaattattatattagggaattttgtttttgcttgaatagtagttaatttgggtccgaaatttttctgtataaaagggaacaagttcaatactgttttgataccatagttttctttctctttaggctcacagagacaaagacacacagagagaatgtgtgtgtgtgtgtgtgtgtgtgtgtgagtctgggtgtggtttgtgtatatgagtacaggtgcctacagaggccggaagaggaagtcagatttcttggggctgccattacaagtgattgtgagtcacctgatgtgggtgctgggaaccaaactcaagttctctgggagagcagcaggagcgctgaatggaacaacctccatatttattgagacggtttctatgtgtagtcctggcggtcctggaactcaccctgtaggccaggctggtctggaattcagatgtctgccttctgaaggctgggattgaaggagtgcaccagctgttgctctttagatgaaacattttagttaaaacattttccttttaattttgatgtattttcttacctttattttcataattataaagaaatacatgccagcaacaaacaaaaatgatgtaaaagatgaaatatgttccctcccttttcatccctaactctgctccccctagaatcagcactgaaaatgtggtgtctgacttcccagagcacgcagccataatatggtccacatgtatgtgtgggaaggaaaagaaggtgaaggagaaagagctaaaaggagaggagataagcaatcatgccaaataatgtcctgaagtgtggtttctttttccatttaatataatatagcccttcctttcatgtgcatacccagtttggtctcatctttccagtagctctttgtttttttcagtttgaatgaaattgttttcctattcactaatattgctaatgtctatgataatttgttgttatacgctacattgaatggccttgtatgtgtgtttttgcatatgtggtaagtattcctgtaggatggctgcctacagcgtggtagtggagccttgtcttattgtggctctttgacactgagtaccaaattgctctctgaggggcttggactggatagtctcccttaatcactatgtagacgcatagccttaccacctcagctacttacccttatcctctcaaacctagagcaggctattgtaagcattagtctaatctagaagatgcataatccaatgccattattttattgtgcattcctgggttgttacccctttccaacatgcattagctattttctcttcttaaccattttattagaggacttgttatattcttgtcaatttctgataaccttttataagcaatccctactgtacaagtaggaatttattttcatttctctcttcgaattttatatgcagtgattttttgccaaatataaatttacattttttaaatagacaagtctatcaacttcctctttatgggtttttggcttggcatcatgattataaaagagcctctgtagtcaaggttatgaaaatgtttacctaaaaacatttttcttctattatttccataggcttgtttgtcactttaaattgataataatgaagtatccatactttggtcttcgttcttgattttcttgtgttttgcaaattgtatcttgggtattctaagtttctgggctaatatccacttatcagtgagtgcatatcaagtgacttcttttgtgattgggttacctcactaaggatgatatcctccagatacatccatttgcccaagaatttcataaattcattgtttttaatagctgagtagtactccattgtgtaaatgtaccacattttctgaatccattcctctgttgagggacatctgggttttttccagcttctggctattataaataaggctgctatgaacatagtggagcatgtgtccttattaccagttggaacatcttctggttatatgcccaggagaggtattgctggatcttcaggtagtacttatttgtaaaacacaagaaaatcaagaagaacgaagaccaaaatgtggatacttcatttctccttagaacagggaacagaacacccatggaaggagttacagagacaaagtttggagctaagacgaaaggatggaccatccagagactagcccacccggggacccatcccataatcagccaccaagcccagacactattgcatatgccagcaagattttgctgaagggaccctgatatagctgtctcaagtgaagctatgccagtacctggctaatacagaagtggatgctcacagtcatctatagggtggaacacagggcccccaatggaggagctagagaaagtacccaaggagctgaaggggtctgcaaccctataggtggaacaaaaatatgaactaaccagtacaccccggagctcatgtctctagctgcatatgtagcagaagatggcctagtcggccatcattgggaagagtggccccaagatcttgcaaactttatatgtgtcagtacaggggaacaccagggccaagaagtgggagtgggtgggtaggggagcagggcagggggagggtatagggaactttcaggatagcatttgaaatgtaaataaagaaaatatctaataaaaaataaattgataataatacatttttgtgcagcccgtgatgataaagatttaattttagtggaacaggccacactttaggcactgcttgtaagtgtggtcttcatcccctgcttcccatgtgagtgagtctctacattgcttgtcttgcttcattgtaatttatgtgataagatacactttagtgtgttgagttacaccagggtgctggctctgaagagaggtcctgggtccaacctgagccatctcttgccagatgtttggcttcagacagtgatgtagttttgagtcccaggtctcgtgtaggaaggagcagatgcaggacttcacagtgagaatcaaatggagcagtgtgcgtgtccggagtaccagggaacacctgcagtcacctggcagacagtaagctgttagcgttactttaggcaacaatatgtgttgacccataatgccatgctttccagaaaagtcccccacccaaaatctatttttgtcttcaagaattgaactttaaatacaactttttaagctccaaaatgaaagttcattggtattttgaatacaatggctttaaatgtctaagtctacttctgaggaaattgatgtcaacttgcagagttgctgtgtctgaattaagctctcatacccagtgagtaatttttactctgctaaaagtttgatgtgcttttaataactttatgatcgtttactgacttgacagatacatttcctcttagctctgtcttagtttatgtgacttttccccccggctgcctctgaagtcattttacatttgtttaatttgttctttgctttatgcttttcttatcatttgagatgcgcagttggtttgagatgctttcctcttgtaagttgcctttatagttacagctttatgccccttctcttcctttctcacccaggctttggtaactaggttactattactagtcttccggttatattgtgttaggtatttgtgggatagaagcagcaccagtggcttaaccaaatggaggcttattcttcccacaaaatgatcagaacagagctcgacagttgggctggttctctagctacacagtgtcattagtgtcctcatcttaaggtcccctctcagaagctattcttggtttgtgacttttgtgttcctacttacctcataatcatggggtgattgccccatatccaactgctcatctgtgttctagacaggaaagaggaaaaagaggaaaaggaaaacaggtgcctttattggaaaagcaaaacgtttttagaaaccctagctcctagatcattgagcaggacggccacagacagtatttaccttagtcaccgatgtgggcctgacttccgcctgccttacttatgaattgtgcagttttaacatgtccaccttccctcattctcactgactcctctcccttctcttctctctctctctttctctccttgtccctccctctttccttaatttttaacaatattcctattctctcaagaaaagggagtttttcctaatgggctattattgtgggttttggattgtggaaacaaggtccccagctggtgtttgaaattagatctgcctgtgatgatttagttctgggagccacaggggagcccagacaggagtctgtgtgcacatgtgcctgtgcatgtgtacatgtatgtgggaggatgggggtgacttggtcttgctcctcttcagcagaaagtggcacttttgtggttccttgagaaaatatatttcaaatatgtttctttatatttctctaccatcttgtttctctaccatttgtttctcttgtgattcttcaaacagtttttatattttaaaaaaaaacttttattttatgtgtgaatatatacatccatttatgaatttaagttgctcatattggaatagttctagaatccatacactggaagttgtggctgtactagacttgttattgttcttgctcactggctatagccttttcttccagttttattgagacacagaaattgacaaaaataccattcttaaaattatgcatgttatggtttgatgttcatatactgtgaaaagatcgccattgtcaagctaattagcatattcatcacttcactaaccattgtgtatagtgagaattcttaagatttactcttaggaaatttcaaatgtataatgcattattattaaatgttacagccatgtcatacgttaggtctccagaacatcatgtagaactgaaagtaagtgcccttaatcagaacctttccttcccccatccgagagctctcatggccaccatcctcctacgtccatgagctggacttacagacttcactttgtaagtgagagcatccagaatttgatttctgtggctatttcacttagctattggcctccagattcagccacattgttgtaacagagagggttttatgtgtgtgtgtatgtgtgtgtgtgtgtgtgtgtgtgtgtgtgtgtgtgatattattttcaatctacacaggcacctggattgtcttcactgttggttattgacataatgaacgtgggagtgcagatgttttttctgaatagtgatttaatttccttaagctatatacccagaagtgggactgccagataatacaatggaacaatttttagtattttaaggaaattccagactgttttccatgatggccatacattcgcacaaacagtatatgcacgggctccctccttcctgtctacacttttaaagagggactgagactactttactctcctgctcagcaatgggtacagtctgattcacctgctcccctgacctcccagcctcccgcccatggcggagaggacttgattctagggtagccagccgacgggcacagccgacgggcacagccgatgggcacagccgccgccagtgcagaggttcacacggtcctttgaagcactaagagtatgtctagcttcagccacttagtttgtcattacgagcagattactcagaagccactgtacctcggtttagttccctataaattattagagtctatataatgttcatttaaaaataaaggcagtgcagttaatccacaccaagtgctcagagcagcgtgtggctcgcagtcgaagctcgcaagtgctcagagcagcgtgcggctcacagtcgaagctccctccgtgtgttatggtttctctgctagaaatctgcacttagaaactggacagctgctagcgttgctagtcagagttaacaacagaactcagccttggaacagcgactgcacgtggctgcacacaggcaagcagcttctgaggcagttcaagcgtagtttggtggggaaagacttttgtttttaagaaaaaatccttttgtctttttctaaaatattaagaagtaagataaacatttaaaatactcacttcatagatttctttagcttacatgtccagatcatatgacccagcatatgcttcagaattccaaataaataacaataataaaaaacaatatatcccttccttttggggtcattggattcttgacaaatctaaaaagagcatggccattcccttcagaaaagccagtaagttcacacaaatacatggcaatccaggttgattatgctctatttagagaacaatgggaagtcagaactgcctgccattccaataaatgaagaggcagaaaccaccatcaaagcagaggggctttttataaggggacaatagaattaggagagagaaatggaaagaaaccacagccctacctgtcacttctaggtctggcagtttctcccccgcattcctgagagatcctgtgagtctcttcacaggcaacgctctaagtcagcatagcctcctgctcagcaaacaaactagcctgaaaaaagatggaactgacttctgtgtgatgaagaattattgctgtgtcacgtcaaaccacttttagctaacattgcagcaaacgttttcagaatgaagtaaataaccagctgccgttactgttcggctcctgctgactttcttttatgtaggtggagtagtctccaggcatgccctttaaaaaaacaaaaccaaacagtccagtttaaggaaaaagcaaggaagaggtgacatcaacttttctggtagaattttgtttgggttacttttaaaaaggtttggaactgaaaatgagacagaacttcctaaaattttagctggaaagaatttgaagtgtttttagtgcactactctcagcatagggagctgacctccaggcctgtgttgcgcactcttattcagtggtcataggaggcttctgtgtaggctaccctcactcccagttactgtgttacccaggagctaagatgcagccatgctggagcagaacgagatcccggatctcctggctgcacagcgcgtgtcaaaatgcttctttggactctgactctatcttatcttctttgtcttctgactctattttaccttcgttgcctttcttttagcacccactttaaaaagaaggctagaaactcaggtctcacattttgatctttgaactggatgaggtcgtccttggtgatgtaatctcacctgagatgtcttcccactgagctggtgttgctggtggtactgacttagccaaccctccttccttgaagaggcattgtgtggagccccaacttggtggtgctgagaagaggacgaggggctgctggacagtggagctgtagatgagaacgttaggagaattctctcttgcttgcagagggtctgcaggacaaggtgaggggcaggataagaactctggctctagaaatagacaggggagtctcagcccttcctctctgatacttgaaggacttaggaaagtacccacacctgttgaaaccagtccttaaactctgatgttggagatgttttatttataagttggtagtgaggattcaggtgataacagatggaaggaacttagcacaggccctgacatggtaccactgtgtaagtgctggctgctactgtagtacttgaacaccgttttgaagaaaagctacaaggagtgacaacacccctaataaaattctttcattttagttattttttttacaagatttcaaattgaaaataagttgtcatttgccagttctcatagctaagattatttttcttggatatatgagctgttctgtttagctgacaaaccagttcttaaacttgagtcattttctcagtataaaatagtagtttcagtgaataaaatggaggatcatcttttttttattattattagatattttctttatttacatttcaaatgctatcccaaaagttccctataccctccccctgccctgctcccctacccacccactcccacttcttggccctgtactggcacatataaagtttgcaagaccaaggggccactcttcccagtgatggccgactaggctatcttctgctacatatgcagctagagacatgagctctgggggtactggttagttcatattgttgttccattccacctatagggttgcagaccccttcagctccttgggtactttctctagctcctccattgggggccctgtgttccaccctatagatgactgtgagcatccacctctgtatttgccaagcactggcatagcctcacaagagacagctatatcagggtcccttcagcaaaatcttgctggcatatgcaataatgtctgggtttggtggctgattatgggatgggtccctgggtgggctagtctctggatggtccatcctttcgtcttagctccaagctttgtctctgtaactccttccatgggtattttgttccctattctaaggaggaatgaagtatccacactttggtcttccttcttcttgattttcttgtgttttgcaaattgtatcttgggtattctaagtttctgggctaatagccacttatcagtgagtatgtatctagtaacttcttttgtgattgggttacctcactaaggatgatatcctccagatacatcaatttgcccaagaatttcataaattcattgtttttaatagctgagtagtactccattgtgtaaatgtaccatattttttgtatccattcctctgctgaggggcatctgggttctttccagcttctggctattataaataaagctgctatgaacatagtggagcatgtgtccttattaccagttggaacatcttctgggtatatgcccaggagaggtattgctggatcttccagtagtactatgtccaattttctgaggaaccgccagactgacttccagagtggttgtacaagcttgcaatcccaccagcaatggaggagtgttcctctttctccacatcctcaccagcatctgttgtcacccgcatttttgatcttagccattctgactggtgtgaggtggactctcagggttgttttgatttgcatttccctggtgattaaggatgctgaacattttttcaggtgcttctcatccatttggtattcctcagttgagaattctttgtttagctctgtactccattttttaatagggttatttgaatttctggaatccagcttcttgagttctttgtatatattggatattagttccctaccagatttaggattgcgcccaaatctaaacataataaaagcaatatacagcaaaccagtagccaacatcaaactaaatggagagaaactcaaagcaatcccactaaaatcagggactagacaaggctgcccactttctccctatctattcaacatagtacttgaagtcctagccagagcaattcgacaacaaaaggagatcaaggggatacaaattggaaaggaagaattcaaaatatcactatttgcagatgatatggtagtatatataagtgaccttagaaattccaccagagaactcctaaacctgataaacagcttcagtgcagaagctggatataaaattaactcaaacaaagtgaggatcatcttttgagtgtagtggagagggaccctagattgccctctgttgagccattagatgatgtggccgtagtttacctgtgccctagcagaattgccaagatcagtccgcagatcccttagcataaaaaaattacagatttttaaaaatgtaatcttttactgtaaaagagctagcagataaaggcctagttttgctgaccatagttcccttagtacctcactaagtagaaaagagtcatagctgcttgcttatggtacacagatggattgtcacaattttacctaacaaaaagttttatgatatgtgtgcctattctttctttttttagttgtccttctctttagttagaaatacaaattctgaattatttgcaaaaaaattttaagagaatagtgttatacttgaaggaaaaagacaaaaattctactttttgtgatgaaaatgaattaggattttgaattttaccctcctaattgatgttatatccaggaatcatctgtaatgtctgcaatgaaagcattcattgatggattttgactgtttcaatataaatgccatgtaattcattgtccactaattataaatgcatagtttagtattttgaaataaaaattttattaatatttttcacacagtagcattttttaaatgttttctgttgctaataacagtaccacagcttggccgggctataaagaaaagggatttttgctcacagttttggttcaaggttaatgatcttgaaccaaaagtcctgaagtggctcagagactgctgtatacatgcctctggcctctggggtttattattattattattattattattattaggtatcttcctcatttacatttccaatgctatcccaaaagtcccccataccctcccccccccactcccctacctaccctctcccactttttggccctggcgttcccctgtactggggcattttttttttaatttgtttactgtattgaacccaggtttttttctgagcatgctaggtacacttgaataaattttaaaatctcagccgggtgtggtggcgcacgcctttaatcccagcacttgggaggcagaggcaggcggatttctgagtccgaggccagcctggtctacaaagtgagttccaggacagccagggctacacagagaaaccctgtctcgaaaaaaaaaaaatttaaatctctgtgtatgcatgtgtgttcttgttcatgtgtatgccatggtacatcagaggtcaacctcaggtgttgtccgaagcttccatcttgtctaagacagggtcccatgttacagggttccatgttcatctctgtgtacaggaagctagctggctggtgagcttgaaggattcttctgtctccacccccacccccatcccattgtaggagagttggattacagaaatcaggtcttcacacttacacattgaagactttacttcctgagtcaccggccctgaccctctcataaaatcatcaggcttcaaccacaggtatctgccttgatgacctaatcaaaagccctaaaccgcatacccagactaagtttctaccctctcagtacctcacaacggaaattaaataccagcatggattttagggtggacatatcacagtattcaaaggtaatatgtaagaattgtagtctgccgcagtttgttcaaatttgcttttaattgccctacagaaatcaggtgtggagaaaccaaaagaattatttaaatgatttcaaagttgaagggctagagtaagtattaatactgaatttttcagttcttaccactgaagcctgtattatccccttggtcaggaacattcttagcttcctgcttctctgtctaatcccaccttatctgggttctgcttttgtgtctatgaaaccttccctatactgtttaggtattgtgtttaatcctgtcagcaatctgctctgtcatatatcttgccctgagttttactgtttgtacaaagagactgctaaccaaattaccaaagcatgtttcctgtccttccttcctgtacatatctccttgcagctgtatgtgtcatgagactgatcgtttatgtctgatttccccattccctggccccttctgctgactgtacattgatacctagaggagcctgaaggcatgtgttggatgtggcagagtttttgtcagacagatcactaaatggttgcatgatgcaaagacccaatattttgtcccagaagcgtttatattggaatactttggggttgtgaataaacttcttatgttaagccagtgtaaaattagggtcaggcaaactttatatgccccagtacaggggaacgcaagggccaaaaaatgggaatgggtgggtaggggagtgggggacttttgggatagcattggtaatgtaattgaggaaaatatgtaataaaacaaaaaaacaaaaaacaaaaaacaaaacaaaacaaaaaaccaaaacaaaacaaaacaaaaaaacaattagggttataccaaggcaacttttattaggtaatacagcaaatccaaaagtatttaattttaagagcgattcattatgtcttaatttgtaatgcatcccacttgaaaaaagaatggcttcatttaaactagtctgctaattcttagtcttgccttcattattccaaataccttggctcttttaacagcccagtagtagttactctgattaagtaggtcctggaattatcctcctcccacccacatcattttataaggtcacatttttgtatttacaaatccagagagcatttgctgttatttataaatgcagaaggaataaaggagaagtaaaatttaaatgtcagtcccagagcattgtttatacagctgccttggattgtggcaatcactaaaaggtgttgctgtttcaagaaatttaccagcctacctaatccaagtcagaaatgcagtcattctttgcctatctctccacagtatcttgactcccagtcagccagatgaactcatctcatcctaaactcacagagctctaaatctgatcacacagggctacagttttagtcttagtgaagtcccatgggtgcaactgtctctcaacaagtctcactggctgcagactcaatactttcatgctgaagctagaattagctttccaaagtgctgaacccaaaatccttccatgtctggaccttgctcttagaataaaacttacttatttagcagtgcaagaattaatgctagtatgtagctggtctttcctactttgtgggttcttctcctttttcacccttccacccccatccctgatttcatccactattcactagatagggaacaaagaaagatgaacaggagagagatagaaatccttgaatcgactttctgtctgtcttcttttttctttctttctgtctgtctgtctgtctcttccttccttcctttttggttgtttcttctttgaatatgagtactaacaaactgtaactaacccccccccccccccaacgaccatcaaccaccaaccttacttctcagggcatttatattccctctgaaaagttcccagaattccaaatgtcacacagttgcagaaactatctgcagctggcaaaaccatgcttctgctaggcgtgaggcaatcacagtcagctgctgcgaagcagctccatagctgcacacttgggattaaaacaaaaacatattcttataatatttctgtttttttttaagaaaccaaaatttcatattctcactataccagggccttgcatgtgctaggcaacctttgacctaagccctcaccccaaagctgtgttgtcaccagccccaccctgcacctcactagctagacttagatgtgttgtatagctgaggatgaccttgaactcctgatcctcctaccgctgctgccccagtccaccaaacactagacctatactgtcaatggaacttggaagacctgtgtccgcccttctgctctcctaccttgtcctgtgctaccttcccttcccttcctctgctgtgttttcttcatactgtgttccagccttactgaacctttgtctatcctttaaacaccttctcaaatcctcctgcctctgccctgctgtgatctgtgttgagctctgttcctcctaccgctcctaccccacccctttggtaactcccatccatcctttcttctcagcttagatgttatctctggaattgccttttcagagctttgatatctggataaaagaccatccctttgtggcccgacatcaccttgtgttttctctattcccacacttctttctctttgttttctttttgctagtctcttccctctcctaggctgtctggatggtgacagctatgagtgtattgatcactattacatctaacatctggcacattgcctaacactataaatatttgttacacaaatgagtaataggatctgtgagaacccaggcctgtacagacttatctactgggagggtgatactggaagatacactaaaggagagtcagtgcttgaatatctttccaagtattgggaaatccccagtgctaataaccgtttacaggagtagctgttgactgctcaatgtgttttgaaagttggactaataaggatgtactgcaggagtagatgatgggtttgaatgacttcacatttgttccatttgctaaatgaaactgttcatgatgagaggatgtcgcagttatggcagaggttacttactttgaggatttaatgacataatacacatgaagctactacccaatcttgtatttgacattttgtaggcacttggtaaatattaattctttttaatagctaatatgtacctttgagaacactgaaaaggaatttccccttgtcttcactcaatagaatcacaagcaagagaactggaattccaactcgtagcttctttagagaaggtctgtgcttccatggttgaagacactattctatagctgggcaatgtggggcagatgaacaggatcaaagtactagaaaaaggaggaaggttaatggagtatggatagagatcatgtagtgtcggctacactgctcaaaacatttcataactggaggaaaaaagatccaagaatgatgtaaaatagagtcacagaagctggtggtattatcaaatgtcaagtcagactgggtgtgaggcaggggcagagaggagaggaatgagaggcccagctgctatcttggggtatggcagacataggaaagaagagccgcctttggcttcctagccctgattgtccaggtggacagtcatagacagtaagaagatgatcaagtcattttagtctgcaagggttagttgaggagtcttgtgaggcatcccagtgggactgttccacagacactggaagtgtgcgtttcagaatgctgtttccctgagttcagagttgctgcttcctcccctttcgcatggcttctgatgctactctagtctccccctcaaccttcctatttcttcactgcttctcatggttgtagcctctcccttctcttctcaaagggtgcaaccctttggtgaagccagcattatgttatttagttgatctactttgtaaaaagcctataaatcattaaattataagaacaacttctaaaccaaagtagttttcaccagtaaacccaaggaacagtgataaatagacacattatctaaaaacattgtatgtcacagatctctcttatagccatctttacctaaaggtgcaggaataggctacacgaactcaagagtaaacagcagggcaaagctagagtgttgatatacaggagggtacaagagccatcagcaggaagcagctgacagagtaacacagctggaaggtgcattcagctctaagaaatgtggaaggatgagaagtgacctaacccaggaacctgtgacaatgggttgtggatgcagctatggagaagagtgcccagacagccaaaaacactaagggaggaaggaagggtgggaagcagttggcaggagaaacaggaggccaaccgagcacagttctaagagagagcctgaagtcaaactgaggagggatgtagatgttggaaggcccacatcaagatacactggccagtttctcatggatgtaaagtttaaactgattgaaaatgaatactcctgattgctttatggttatagttttggggaactataaatactagaagttgtggagtaagactcttctgccctgccccctaatgtacctagtgacatactactaaaggtatagaggtctttttgtaacaaaggcaattttctcactcccctgtggtctcctgtggatctgggtgcctccccgtctgtgaccaagcatgcacattgcagctcaatcttgtggctgactctgcatctcaaacacagcttccttagtcaccaaagcatatgcactcctgcttctctgtaccttggcccaggtctctgggttccacagtggcctattagctggaaatgatgcatgaccctgcctatttgcaagaggtgagaagaaaggaagaatccagtcatctttgccatagtgtttaagggatagtaattgaaaagaacagcacagagatgcaattatatgatctatatcttgtattcctacttatacaatgaaacatgttatatggtatgtattatataatgtgtcttttaaaactaattatataagatataggcatatgacatttctgaaatggtatatgaggctttattaaccaattaatttaaatagtagtattcttattgatatttaagcaatttgaataatgttaattctaatagtagaattatattaatttctggagctttctcccatctgacatgaactggctataaagtcttccataagagccaggtggtggtgacttttgcctttaatcacagcatttgggaggcagaggcaggaggatcttcatgagttaaggccaggctggtctatagagcaagttccaggacagccagggttacagagaaaacctttcttgaaaaaagaaaaaaaaatcttccatgaaagaaattcaaaatcaaaacttaaatttgataagtttaagttttatgtctattaattgtcctcaattgaaattaatctataatcttgctatatgagtatgtatgtacatacagagcagggagcactataaaacccacacatatttatcctccctcatgttagctaacacctgtaggttgccagttttataaaataggaaatggcagtcaccatttactctggaccactcctttcctgaatacattgaaaccaaagagcaggcaaagaaataagtaatccattcatagtgagcaggtaagggttgccatggaaagccaaacacccttggctctgtgaacatacagtaacagatgatgtaatctttgctctcaagaacagtattttttaaatatattaatctcgtgggcctgaagtgatggctaggaggtaaaatgcttgctatacaaacataaggacctgagttcagaccccagcacccatgtaaaagctaggtgaggcatttggttgagtggacagaaacaggcagaccccagaggcttactggctagccaggctggctgtaacagggaatgccactctcaaaaagaaggtgggggagctggggaaatggcttagtggataaaggcactgctctgcaagcttgacaacttggttggagtctcagaacccacatacaaagtggggcacagtggcatgcatctcttctcccagcacaactacagtgaggtgaaagatggagacagaattgcccagaattctaaggaggatgcaacacagaaacaggaacaagggagaccctgcctcagccatgtagaaggcaagatccagctccaggaagttgtcctctgatgtcctcatgcacattgtggtgcatgtgtgcctgcgtacatatctctctctctctctctctctctctctctctctctctctctctctctccaacataatgccccaaattgggtggagttttttggtttttgtttgtttgtttgtttgtttgttttcgaggcagggtttctctgtatagccctggctgtcctggaactcactttgtagaccaggctggcctcgaactcagaaatccacctgcctctgcctcccgagtgctgggactaaaagcgtgtaccaccatgcccggctaaattgggtgttttatagacaactaaaatttaccctgaaggactctggaagctagaaagtttaggatcaagaccaagatctagatcaagtaggctcagtatctctttaagacctgcccccttgaagaagctgacctcttgctgtgtcttcacatgggcctcacttcctcagggctcttttcccattcccaggggaacactcatagcctactcacttccccaggtgaaatacctttgcactgcaggttgtgttttcctgtttgaatccaggggtatacattcagtgcaggcatctaacttagctaataatattacagtaatatgcagagacactgattaacagtgactataagcataacaaacaatcattgcaaatagaatgcttatgatgtctgatatgtatgtttttgagccagagttgccactgtacccttaaatattattctttgtaacctggtgctactgtacacggctaattactaggtctacaccacttcctcatgcagtctcagcctgtgtgtgagagaatcctaactgatctgtactttgttgaacaatgtaagtccactaaatctcacccttggctatcattgcaatgttaaattgtgtacagttctgtaaacattgtcctttcgcttcacagaccaagtgacagcttcagacacaacacctgaagtaatgctgttttaatagcaattgcagaacgtactgtaaacaaatgtagaaacactagcttaaaagagcagtggaagaactttgtgagacacttaattggcagataagctagaggcagtaattgtcctgaaaggccagtggaggagggaaatgacttaaggccaacagaaccaagaaaacccttatggaaaagactttaaagtgttacaaaaacactttttaaaagtgtttaaaaatataagttgaatcaattgtattagtaactgtatttttgagtaaacagtagtcgtagtagctagtacgcaatgtataaatgcaagtattgctacacgaatctgatagtcggccttggaatgcaaagccttgtcttctttttaaagatttattttcatcataattgtgtttctgtgtattgggctgtggtgggtgggtatgtgcacttgagagtccaggatcccctggactgaatctctgggaagccatgggacctagcgtaagtgctgggaactgaactcaagtcctcttcagaagcacaaagtcctcttaactgctgaaccatctctccagtgccttgttttcttatctttaaaacaaacaaacaaacaaaaaaaaccccagacccaaaagtctttgttcttttgaaccattacaaacttcttagtaattactttgaaacagattctttataagcaggaatcgcctggaaggttcctttaagagctctgttttgcagatgttgttttgctgtgtgaactccatcagtcacagcagcagagtgtcgtcatcgctgttgcatcacttcctttgcaggagaattgactcaggatccttggggcagggtcattttctcattgttttgcacactgtgtatcacctatttacgcgtggaactcagatgagtcacagccacgaattaaatggggactgttattacacctgttagctgtggtgtgctggcctgtatgcaagctggccttctttcccttaagccagctttctattatttaaacttcagtttcagtttcagaccaaataatatccctttaaaagatacatgctttcagcttctctttaaaaaatcagaatttctggcacaactcatgtgttttagaataagagccatctgccagtaaaccttgctgcttccttcctgcagggaacatgctggtccaggtctccaccatgccccacatgacatacttcctgtctctcacttacctgtctgactctcccaggtatctctgcttgataattagattaacatgtaataatatgatatacccaacaattaaaaagcaagcaaaaccaaaacatttggggtttgcaatacctgttatcttttgtaactagaactatgcatcatttgaagaataccatgatatataaattctattgttgaagtcaattagtctatttttgcaatatattataatgatttttatttgtgcttatatggatgtgtacacaaatatgtgatagcagtgttcatgaaaacacaatgggcagaatcatcagagtgaagaatacttgggaatttatttcttaaagtttttcttacaggttttaagtttgagattttataaatgtgaaagttgttttttttttaaactcaaagctaactcctgacacagattatcaacaatgagaaagacttttcttctctaaatgatctttttatattttaaacagaatttgaggaaaggaacaataccagactacttgattaccgtgtttttcccccaggaaaaagtattttccaataccttatactaagaataaagtttagggatagtcaggaaaaccagaggacagaggagaggaatggagaagggaccacaaacctgcaatgcaggtggctgttaggacctaggaaaggcaggatggatgttatcatgcagccttgataagtagcgcaggcactgctaacacttggttttgaacttttgaccccagcattgtaagaatagagaattgcgttgctcatttaaaactttgagaaatatttttctgtgcacaacaactgaaaccatttgtgtctgcctccagttattagtacaccgttctagtacacagcggaagaaggaccttattagcaaagtctgtatgggagggatgcagaggtacccacatattagatgtttaacaagtgaccagactgtccacaggacagaagctgtttctttacatatgatgaccagcattgcctgttcactgctgtttagtcttactcccttataatcagtgcttgtgtgtgtcctttaaggttactcagcataaagtctatagaccatactcacaagactgagaacaaaaattaatagagctatggatgggtgtagcttagtggaaataaggacctgagtggtaggtgtgattgtccttggcatgttactacccttaggctcctcatcaaacagaactggagaatgggcagggtgtattcatgcatggtcagctttctttgtctgtgggtagattcaaccaactgcaaatggaaaatatttgaaaaataagatggctcagaaagcgccaaaatacaaaacttgagtttatagtgtatcataccgaacctatgcaaatgaagtggttgttggcattatattagttattataagtaatataaagatgacttaaggtatatggaaacatattcattggctatgcattacatataccattttgtataagaatgtgagcatctttgaattcggatatccagtgtttttggaggtcctctgaatatcatgagatcatgagatgtttgtctacattaaacatctagtagcatctcacatttcattccagtatcatatgaattctttactctcccatgtctgtaattttcttctgcagtatggagtaacaaagcctggcttccattatcctcaacattttctttactcagtcttcctttatgtaactaatttccccagcatgcatacagaccacagcctagaccctgggcctgctggacaccccagtgcagtgatggaatcctcactctggcctcgccacatacgcagtgagccagccgaattctcagcctggctctgccagatacactggccaaacccttgactttttaaacttagaggaattatataagcaaaaacttaagacagactatttcctgagctttaaaaataaggatgctaaaacttttagtcattcagtcgttgtctagttttaattgttattcacagaggctggtaggacttgtttaaagatttgaaactaatgctatttatatgtagtcctgcactctccctttgtgtaatgtcgtgttaataggcattaaagatgccggccatggctttggtgagcaaggttgagttttcctcttagctcagaaagctcctgtacaagggcactgcaacaaaaagctaacgctgtatagtatttgtcttcagctggctgctgacccacctacagaaatcccttcctcaatttaacctaacaataaaaaagatttgatttcctctagaagaactaagaaaaagtgggagaaattatttgttttttccatttcctggtctatttgatctgtttttagtttgactcttttctttgccaccacattcttgctctcttagtttgcttcctgatgtctgctcttcccgagtatagaaaactcttggttgttttcataagtagagatgggacagctggtaaagccaaggactagatggtccaaatcatgtttgcctctgtgttgatttcagcagtctgaatagaggcccatttactatgtcaaggtagtcatgaatctctccatggcttcaggtctctgctctgtgggtccctggctctcaatgcaggcactaggaaaagtaagtacaacagcctatctggctctcccctgctctaaggaaacttagttctgatataggagcaaagctgtgtaacttacctcaaatatcatttaaagatggaaactctttgcacagtagtgatggtaatgtcttttatcttttatatattctttaatcctctgcgaatttagctctcttctctttacctgcaaaactttattcccaaatgctcagtcattatgcagaggccccaaggaacagctattaatatttcagccgggggtactacctagcattctgatttcctaagggctgctgacatcaaaggaattgcactggcatacagtgagcactgtgaggttccatgtatcccatggacatacccggcacggaaacactgtatatgcttcagcctgacctccctccttcaactaaagctatatccacagcccagaagcaaaaatctcttcaatgacagccagccagcactgcgggtgacctggaactctgttgttgttgttgctttttttattctttgcatgtatacatataatgaattttagtccccttcatcccatcaccctgccttactctccccactggagcctttcttcccagcaaggcccctcctactttcatgtcttttgtgcatgtgacccactgagtttaattagggcttccagcaggagcaggagcgagagcttcttcacttatcagtgactataccaccaaagtgacacccattctccagccacctttaactgtcagtagtcagaagtatagccttacgagctcttctcccttctattaaaagatgttaagaagactgcttctgtgcagatctcatgtaaattactgccgctgcagagagttcatgcatgcatcagctatgtcctatccagaagacacagctttcacattcttccttcctttacagtgttctctgaaccttgggtgatgggtaatatagatctcctatttaaggtggaacattccacagttgcttattctatgaacttttaagcagtttcactttgttgttttaagacagttcttgctgattggctaggcaggctgtctagctagccagtgaaacttctgtcccaagttctgggattacaggcagacagtcagtcccttataccaaagcagagatgatccatcacagacttctgctccagatccatccctaggcccctcagatggctttaaggcctcatatatgtcagtccctcctttcccagcatcctcttcctgcccagcccctcctttctcagcatcctgccctattttctcttttgggacatggtcatcacctgtcctgctctggatccctcagaaacttggtccctccctccacgagggcagtgcacattcgggtgcctcttctagagccctgtttggtgtctattctccttcttacttgcagtaaggcaaaaatgggtcagttctttattactcatggcccagaaagcttggagcatgagtgctgaccaagattaattggatgaaaaaacatgagtacaaacaaaagcgaagacagcaataagaacatttaaaagacttacaggaacgctactgataaaagtagtaattagtataattatgctcttagtttgcaccaatagtgtgctgaggatgtcatgtggaacatctcatttgttataaggatattgtgaggtgattacatgctgtagtttggatggtgttttgttattggttttttttttttagacaggtctcactgtacccagcaggattatccttgtacttgctttttgtaggccaggctgatctcaaactcttgatccttctgcttcagccacctgtgtgctggggttacatctaatacagtcatgccacacaatacatagtagtaaaatgtccaccagaggcccttgtagtaaaactagggtccctcccttatcagaaggaggtagaagctttaagagctaggatgtaacaagtgatctttaggctactgggagtatgcccttgagattatggaacccccagatctgtttttatcatcttttgctccctggcccttgaaatgagagttttgttcggccgcacactgccaccgttgtgtgctgcttaccaacggcctgaagcaataagggctacccagtcataggctgaaagctccaaagtttaaagccaagataagctttttctttatttatgtgtcatgactacatttgtgagcaacaatagagacctgataaccacactactattattgttctactgttcagatgaaattatgaggctcagagctagttagtgctaggccatggccaccctgcagaggggactttgtcagtactgcttttctatgccatcagtggcccaggaacactcgtgggctatacaggtatgatacacctagcaagggttctcatacatgccagtcgcaggcttctgtgtcaatagaggataaagataaaccatccaggtcaaagtgattttaagataattgaaatcaagaagtgcctgtgtggccaactatattacaaataactcagatgccagatagcatgattatgaggaacttcgttgaaccccacttttaaatctgggctaggtttccttctctaagctgtggcattctttctgtctctattattgcctcaaataatttctgaaaacatgtgattgaggacatgtggaggggagagtagaacaaaagattagtttctaaaatagctaaattttaaacccaattattgtgcttcctatgtggcactgtcggttttacataaagtgtggaacagtgtagcataggttttattttctcccaactcaagctctgccttgagtgccaggctcctgggtacttactgactattcaggtatatatgaatgcacacagtcagtgattaggattcaaggccagggccccaggccctgaggctgtgacttgaataccccttctctttccaatatgtagcccttgcccatagtcctacgaagttatcaactaagtgactctgatgtgcgaatccatgactttgacagaggaagtagaaaaaaaagatgcttttgcctttgggagaagtattcatctacgaaggtgatgaattggaaggtgaactgagcctcactaaagttgccagtcgccccagtaaactctgtatgagcaggcgaacccaagttctgtgtaagaacagcaagctgtctctccagctcctacaagtagcatttaacccagcatttttcattgtagaagtgtgttatacaggtacacaagcatatatgctcacagtaaaagaaataccacttatttatactttgtccacagtaacaagtgttggtaaacaatgtgaatgtccaagggatgaactcaatactgttcagtcctttaaaactgagacttttatctatctgcttatatgaggcttttgccatgataaatgttttaattaggggaaacgtgtttatgtttaaaaaaacaaaacaaaacaaaaccaaaaaagcattaccgggtggtgagctagcgcaacagctaaaagcatttggagcctgcagttcaagcctgacacctgaggttaatccccagaacgtaagagcaggaaagagctggggatgtgctgctgtggcatgcgttcacccacacacatcacacactcacacacaaactgataatgctttaagaccccccataaagttgtgtgtgcataaacgattgcagagaagctcacaggagtgctgcagcaccggttacctctaacaaggaaagctgtaggaatgtgcgagagaaatactttcccctgtctatcttttctatcatttcagtctttgactagtttatatcaccgtgtcacaactatagatatttcaatttgcaaaacaaagaggcttagaatttagatttgtaattctcatcctttaatttcagatttatggaaagtatagtataaaaaacaaatacctttaatccctcaccagtttgattttgtattttcctcagtgtctaagcttctctttttatatttttatgtatgcatataattattattttttattattgaagagcatattggagagattatgatcgaggcgtgtttcctaaaaacaagaatgttctcttcaccacggtgcagtgatggaaatcaggaaaatgatttgtcacaagtcagtgtctaactcttagctgatgttcatattttatccgtcattccagtaatgtcctaacagcaatttccccgtactctgattcaaactggaggtgtgtcctgcattgacttctcacgctcccttaaggctccattctccagaatgccatccagccctgtgggtttctcaagcaggccctctgcagttagtttttgtaaacctctagtgtcagccttcatcgctctggatgaggttcaggttgaggggctgctgcgcccactgctgtgccttcttccctgtatgtgagcagggagccctgctcgcctctgagtcctcggccttggggactgctcaggagtctccttaggccaggtgcacagcccttcagcccagctgggatctctgagctcgctcactctctcactgccttgcccagcaacgtgtggcacattttctggatttctaaaactgttcaggagtgccatgcacatgcacatacccatacacgcccagctgctgcttcttataaacggctgacaaagagtgtgccatggccttgctgtgcgcatcttgtcgccagtctgtgaactctgtctttaccatctgtagcagagccttcaatcagattagaggacctgttgtagaaacttcacagcagctcagaaaactctcacattttaaaaacttctttcagaactgttcttgtttcccaagtatgaattaacttaggttctctggtgagagagaaccaatcagatgtgaaaggtatatgtgagagaaactgagactgagagagatttactggaaggtatccatttgtgcattacagaggctgggaagtctgtggtctgcagctagcagacaggagacctaggaaagataggaacacagttttcagcctgagactgaaggcctgagaaccaagagagctgatggtatcacgtccagtctaaacccaaaggcagaaatctggtgtcccagctcagaggcaagagggaaaaaatggttttatgttgttttgagtagtgtcttattctcttcagatcttcaacaggctggggaaggaaagtgctttaaatcagccactgatgattagaaggctagcttcatctggaaatgcccatacacacacacccaagatgccattttagctaaaccttcgggtaccctgtggcccagtccaagttgataatggaattaaccatcacaatcacataccattttttctagtattggtgattctaatttttaataacttgtcttaagtgtttataaacttcctctgctattgagttttcatctttccctttgtaattaagaattaatctgaagggagttactctgaggctctgtaagtaccctgtcctttgtcatactgtaactgctggtttcagcatccactgatctaacattgtaccctctacatgtatgctttgacattgtcctgtaaggagtcgcatctcctgccttgttcatgtctttagttgtcggtcaggtgtttactgtgttcagtgaattaaactctgtcatgggcatcatttcttgtcatggcagtttctcaggtggtcccaggcaggggccagtaaaactgtcattctttgtgcacttccctacccgtggctctacaagatgctctggattctgtggttcttttagtctacgaagacttcagctcattttcatggggccttgcagcctattaggtaagaatagtattcgcatgcctacatctgggtattattccttcttggtatcccgatggactgttaggaagtgcacatgatactgttttcttcctctcccctccacagtacatagttcctccaatttcagttctaacctgcttgttttttctctgtgtctcatgtttatttcataatccaaataaaatctacttttaaaattccccaaatctttaaaaatccaagttctttaaaagctacaagtctctcaatccccccctttttcttcctacatcctgattccagtttcccctccctcctcttctcctgcacccgcccccatctactcctccatttctcttcagaaaggggcaggtctcccatggatataaaccagtgtgacatatcaagttgcagtaaaaccaagcacctcccctcacactgagactggacaaggcaaaccagtgggaggaaagggtccctaaagtaggtaaaagaataagagacagcccctgctcccactgttaggagtgccacaagatgaccaaactacaaaactgtaatgtgtaggcagagggcctaggtcagtcctatacaggctccctggttgttagttccacctctgtgagtacctgtgagcccaggttgtttgattctgtgggttttcttgtagtgttcttaaccctctggctcctacagtccttcctcccctcttttgcaggattccccgagctccacttcctgtttggctatgagtttctgcatctgtttctatcagttgctaggtgaagcctctggtgacaactgagctaggcaccaatctctgagtttaacagaatacctttagaaatcatttcttattctaggtctctgagctatccagcctctgggttctggccctccaggcagtgtcaagggtgaactacctcttgtggtatgtgtctcaagctggacccgtcattggtagccacacccacaatgtcttcactaccttgacctcagcacatcttgaaggcaggacaaattgtagattaaaggttttgtggctgagttggtgtcccagtccctccactggaagtcttgcctgattacagaagatgaccagtttaggctttgaatctgtcctcgaatgctaacagtcttagctaggctcacccttgtagattcctgggagtttccataaaagtcacaagtctcttagtggtaagctcatataaatattcattcaagtattgtggcaccaagtagagatttttattccaaaagagaaaagacacggccatagcaataaacagtcacaccaaagcaaaatcaaacccagcaagtataacacccagtccttgctctggccagagcttaaactgcattcttctgggcttctaagatctttggcagaaaagtccttttaggaatgtttaatcctttaatgtcccttaacataaatatcatgatataggtttaccaatacataacctctaatatgatctcaatcagtgttacataaaaaccttctatttacagtgataaaaagaaaaagactgcacatttctatttagtgtatgaacaagaatattgttaataggacaaaaacattcatgactattatactgttactgatcacatgatcataagctggcattataacttctttcttctactacccgtctgtatttcctctgctctcggcaagcatgtcagtgagtcttggtcctttatctggaggagtggcctttacttacatttctaaagggtctgggctattgatcacccagcctggattgggttgtagtttcttattgacctagtcacaggtcctggtaacacttgcaggtgtactgaaagatctgcatttcagatggtgcagttcccctttgttagtctgcatcactcatgcctccatctgtcacactcagtgggtgtggcttctcactgaaatgattgaagactagacacttgtagccactgtatattttcaggtcacgcttggtggaatgtggagagtagatgaggagtgagagtagtcacaagcgtgcctgtgggagggatcggccacgcccaggacttcaaggtcttgtaacaccatttgctgccaagtcacttgatgataggagaagtatatcttactgacatgattgaattttttctaagaaagcttaaagatacatcttcatggaattcattttgataaaaccgtaattctcgggttgctatggattttattgttcacggtcccaagacaagaagttcaaaaaatcaaggtttgagcagaaccaagctctctctaacatagcagcctcttaggggctcgtctagcttcttgagggggtagatggaattcgtttccttgacctgtgctgcctcacatggctgtatgtgtccacatgtgacatttccccttctttaaggttttgtgttagagtgcatcctaatgagctcatcttgattacatctgcagaagccctgtttcccaataaggctgcatcacaagaaggttaggacttcctactatgctgtttggggaacacagttcaagcagttcaattccccacactgatgccttgtgctttttggttttcccaagctgctatctatttttctaccaggtattgcccttttttttttccattttcaaatgcacagtttattgttcacatatgaaaatgcgggagagaactcacagaaaatgaatctaataactaaacggtccagctctaagtgatgccaccaatgtccagaggcgggaattcactcacagacagtgggtaggagggtcttgagccactgcatccacatcctggtgggggaaagacagcgagtgagtgtcagctctgtagcagatgcccggagacggacagaggctaacaggtcacaccacaatcatacttagccagcttaaccaaggttctggtcattgagcagtcaccagagtcagagccagccagaggcattctggtgggagatgtggtcactggaagggtcccttgttactagagttcataattcatgcattttgtgtgcagtagacaccagcgtctgcagttactgatttttgttgctgttgcgtattcattgttttcaagcattaccattaccaggtggttaagctgtctggggcaccaacaagtgatcgattggcagttcttattccagttctgagttttctttatcatactttaattctatctttttccatctcactctatctaaaacattttcccccctatccttgtctatttgcctggtattcattctcccttttatttatttttataaagacgttttccttgatttggtaatttcatatatgtatataatgaattccagccatttcatctcccattacctgttctcattccttttgtctttaaaaaagctacatatctactttatttctatagaaaaatatctgtacaaaatttttgcccattttattctcctttgcttataccattcaaataaaaacatttttattcttatactcatttatttcctccttttagaagtatgtaattaattaatgggactaattttgttctgaagccacctgcatactgtgaccctgccattcttagtaagagattgttttgtttagctgtttaggaactattgcctacttttggagcacgttctcccagggctgagacagcaggggaaggcaccagtctctatcagcatcctcttaggctaggtctgttctcagaacattcgattttcttttttcctttttctttttttcctttttttttttttttaaagaagggaacacagtctatctacccctggctggtctgaaactcattatatagataagactggcaatcatcctgcctcgccacccccccctccccccccagttctagaattacagggctatgtcaccatttctggcacccacagcctttctatgcagtggctcagagtcatggctttatttcatggttgataatactttctcttgtggttttgtctgttcttattgatgatttcagagagccaaggtattcttctattgtcatccttagataggcgttccttggttggtgtttgaggttggtcctaaactcaaacccagagaacttgaatgtctcgagataaatagaaaaagaaaaggcagcaaaggaaactgaaaaagaaaaccagaaaaataggaagaaaccccagcaaatgtgagctcacagaagccaagaaaagatagtgttaaggcagtagtaggacaccgtggcaaatgctgccgagagagaaactgtgatgtcagagccctaacagtaagttgagttcatgaggaatcactgcaggaagttggacgtgcaccgatgtcccagagtggacccagactggagctggcagaggggacagggatgaagaaaagaggcatgcctggtcatagatagatggggcactcccctgagaacatttgcattggaaagggaagaagacaggccaagtcagttatgattaggcaccattattccagaatgcctttattcctcataaaacaaatgaaaagtgcccatgaataaagatttttattaaatacacacagagaattttccttctgattatagatgattccaagattatagatgattcaccggtgaattgttagtgagtgaatctgacttagaagccacaggagtacctgtgaaatacaatccaaagccagttgtggtggctccgtttgtaaagccagccctcaggaaactatggcagaagattgagccttcctgggttacgagtgcgttctaggctggcttgggctgtagagtaagtctgtgaaaagtcaagaaagcagcaagggagtcagggaggatctgatcagaaataactccagttttgtcttatactcaacttaaaattaaataaaatttcatctctaatatttggtaagttttcatattctattctgtttccccttaaagtatttaagatgtttccatccttaatttctattgcccacccttcattaggatcttattgctctctttaactacaacctactgtgtgtccagacacatccagtttacgcttactccaccaggcttgcagagactatcatgcagccgcgtctactccgtgaacacagggcatggcttcctgctctgctcagctcagccaccttcctcctctgcacacactcacactcctgtgcacacgccttgtctgtaggctgtgtacgtggtctgctgagactggtctgaaggagctgttgcatcttgactgactgctaccgatggtcctagatacaagtgatgtgatgagttggactagaatacttttaaccacgtgtctcagagcccatgggtattgtacatttgtcttccaacagcattgtctttaatatcttctccattgctacatgttaatttaaaatgttttagaacttttgtttcatttagaagccaatgaaaatatctagttatttcaataaatattttctgaagttctagagactatgacagttaagctatctttggttgattgcttttggcttttgagttacagtttcatgtaacccaggctgtcctcaaactcactatgacccggaactcctgatcctcctgtctccaattcccaagacctaggattgcaagagggtgccatgtctagctaattttaatttaatttaaaggtacacacatatataaatatgtatttgaaaaactggttcttagactttggaagaacaagggggaatctccccagtgtagggtgagaaggcaaccagagtgaagggaaacagtgacaagaccatggagacaaaggccgagagaggtgaggggacagagaggtgctcatgcccggaggtggcattgcttgttaggagtcaagtaaaggggcaggaccttgtgtggctgaaacagtttgtccatgattttaggattcctcacttgaaggagtttttgcagcaatatttgctactgtaacacatggttttatggcctttccccttattctctgttgttaacaatttatcttcagtattatcttattcttttcccattttgatatctagggttacaccctttctagtacacatagacagtttattataacaggtttgcacacatagatcatagaaaatgctttcattgttcctttggaacagggtgtctcttattcactttctcgtgtaattactgcagatcctccccaaaggaagccctgaaaggaccgactgcattacttttctgttcccctgtacctctgaaattgcacatgatattacagtggatagtggcaccatctagtggtagttttgagacctaaccaagttcaaagtcatttgataaccagtttagaatttcaaacataactttctatccgttttgcaaattgctgaagcatttatttaatgtcatatcttgttgagccctgaaatgccttcaagtcaacagataacaccgctattatgattcataaataacgtggtttctaaacaaatggcttatacattgtataccttcttgaaacaaggtctcaccatgtagtctaggctgctcttgatctcctgcctctgcctcccaagagcaaagattgttgacataagctaccacaccgtgatcaccctgctattgtgcgtgtgttttgattatattttgaaaaaaaatgatgcttaggaatgtagttaaacaaaatatttacttgaactaataccagaatttcagaaatgatcccattcgtggctgtaagaactatccagcaagagagtgccttatgatgcttctacgtcagagtaaggagctcatgagatgactttcccactaagaccctggtgcttgtttttctttttcctttttcctacttggggtgttttgacaacccctgcccttgcttggtccgttgatgatagctgctgagcctgtgtttgcagatccaatcagagagactggagtagtcaatcttacttcttatttctttgtggattttaaaaaatatgtatgttcttgaggggagagtttgcgcagctggggagctaaaggagggtattggagcccatgaactgagaattatagtcacttgtgagtcacgtggcatgggtgctgaaaactgaactctggtcctttgtaggagctgtacacaatcctaaccactgagccatctctccagcttcacagttatgggtccctaaatgtaagctgtatagatagagatcttgttggtaacttgcagttgattgatagctgtgacaacgaatgacatattgacgtttagtccattcttgtggctatcggggctattggggaggggtagtgttaataaaaaataaaaacatttggtaaagaatcaacatcttcctgcaatcccagaactcttcagatagaggcaggaatatcacagattgaagaccaaccttggcttcatacttcaaggccaacctgggctgccagaaaccctgtctcaaaacaagcaaataaccatcgctttcatggataacataatagagcaataaaattaattgccatttttgaaaagggggaaaaccatttattcagtgccagaggaaccgagggatataattattaccattgtacagctggagaggctgaaacacaaggaggtcaagtcacttttacaaggtctcgctgctgttagtaatgtgagcactcaggcccagagaaggaccccaaagcaagtgttttgactgtcagtgggaaaaccacaataaaaaaagcagacaggaaacctcactggttgataactcttatttaaatacatgctaacttcttgataaaaatctttgttctaatttattgttcacaatgactatatttgtttgtttcctgtcttaattatagctgacaactttccatcttaagagaagtttaaaatttttgcctatcagtcccaaatgcttaattatttctccttgcccattggttataaatagacagactacccgaggaccagcattttgcctgtgtgagcactcttcactcagctcctggaagtgagatgcaatcttccctccattcccacagatgttgtatcctcacatccatgcaactgcagattaaaaatctaacagctatttagatagcacataaattacatgaagaattgttatagcctacagattatatgaaatatggagaagtatgtacaaaagtgtttctcagatctaggacattttatgtaaggtacttaaacatccaaggattttgttatttgtgagggcttatagacccaggcttcaatggatgctgaaaactgactgtatttgccggtgcctctcggcaggcattggtaacaatcacttgagagaaacagttaagctctggtttgtacatgcttataggtgtgggttactgtgtaaatagtttgtgtgctgtttttactttgttcctatggcatcttctcaccagactcctcattccccattcatactaccccactgtattatagaaggataaatacatcatgttttctatggtatcttgccatgtgtacacctactcttatcaaatgtatacagatatagacacacatgtaaatatgatcccatacaaaaatgggatcatattatataccttaaaaatatagacactttcaatcagttgtcccattcctgtgagtccttcccgctggtttgtaagctacgtgtccagggtgttttctgcagtgttgctctagtccaaggagggaaggaagatcactgaaaaaaatcatgctgtatctacaccatgggattctaagcagtcactacaaaaaccagtgtgatttataccagaagtgtctcctgtgtagtcctctgctgtggagtgtactctgactatttccttgctgacaatttggtcaggcttctagagggagaagaaataaatgtgaacaggccttgtttaattgaaaatccagtagagtaaatttcaatacctgatttaacttccatttcttttcctcctagaactgtgagtgtttctctcttaattcaccttctgtatttgggaagggaaaactcacagccttcaaaatgttaagttccttcttttgcctggcttttcagccctactggacctttttcattagtggcatctgaagggcatcggagaaggtctctgctgttagttgttttttatgagctgcattatgtaccccaggctggcctccaactcacagtaatcctcctgcctcatccttacaagagttgaatataaacataagctactatgactgacccaaacatagtctgcgtttttgtttgtgttgtgtttgtgtttatgtttaagagtctcactctgtatgtagttcaagctgacctggaactcattggctttgactcgaagcagtcctcctgtctcatcctcttaagggatgggattatagccaggtgtggtggcgcatgcctttaatcccagcacttgggaggcagaggcaggtggatttctgagttcgaggccagcctggtctacagagtgagttccaggacagccagggctacacagagaaaccctgtctcgaaaacccaaaggggagggggagggagggaaggagggagagagatgggattatagatacaagtcaccatcctaaactgtaacatggtctttaaaagtaaattgagggctgataaattgtcagttcagaaacagttactaggacatttgggcacatttggtaataaactaagaggaaataatccacacatctgtgtaaccacagcaaccttttgttcttgcttctgtgcagatttgagaaaggacgcatctacacattcatcggagaagtggttgtttctgtgaatccatacaaggtgctgaacatctatgggagggacactgtcgagcagtataaaggtcgtgagctttatgagagacctcctcatctctttgctattgctgacgctgcttacaaggccatgaagaggcgatcaaaagacacctgtattatgatatcaggtatatggagggggctgtgattccaaagctgcaaggtatttaaaaaaaaaaaattgtactcaagaattcacacaatcgatgagttccttattatattttttttaagcttagaaacctaaaaaattttatagggcccagaaaagtaatgaacactaaataccaaattatttctaccatgtttgatcatcctttagtctttgttctgaaggctgaggcaggaggattgcatgaactctcaagagttcaagtcaagcccaagcagcataataaggcctcatcagataaaaagagtccacattatacttgcatgccttttgttacttgtagaatatgattcctcctatctgaagcacctaaaaagtgtcaaataaaacataaccagagtagctcagatgttaagagaatgaaacaaactaaatagtgcactcctgtgcctcagagtcggacaggtttctgtgggatggtgctgtgctgcagacagacacagggaggagaaatgggcttcctgagcttcagacctaagctctgacactcagggagcagagggtgaggagctgcatctcacatgcacagaatgggagcctagccacccacaaggtgctgagccttttgcagcatcttgcctagacaaatgagggcaaggaaagtaactttttcccgggcccaggatggcctctcaaactgtgggaatctctgtccatgctaataatacctcccatttactttagtggctttgtgcttttcaaaatatttttatgatcattattttattttggttatcaaaacaactttaagtggtatgttgcatagttatttttctactttacagataagaaagttaagggtcaaaagattaaatagcttagtgttggaattagagaattatagcctaggaatatgctgttttgttttgttttttaaatgttgaaaacatttaaaaagttgaccagttaaacaaatttatgaacaaaaataaagaacttctttacttgttattttcatatatttttattctttgagaattttatgtagacagtatactttttaaaaattttttattaggtattttcctcgtttacatttccaatgctaacccaaaagtcccccataccctccccccaactccccaacgcacccactcccacttcttggccctggcgttcccctgtactgaggcatataaagtttgcacaaacaatgggcctctctttccactgatggccgactaggccatcttctgatacatatgcagctagaggcacgggctctgggggtgggggggtggtactggttagttcatattgttgttccacctagagggttgcagacccctttagctccttgggtactttctctagctcctccattggggggccctgtgatccatctaatagctgactgtgagcatccacttctgtgtttgctaggccccagcttagcctcacaagagacagctatatcagggtcctttcagcaaaatcttctagtgtatgcatggtgtcagcgtttgaaggctgattgttggatggatccccggatatggcagtctctagatagtctatcctttcgtctcagatccaaactatgtccctgtaactccttccataggtgttttgatcccaattctaagaaggggcagagtgtccacactttgctcttccttcttcttgagtttcctgtgtttttcacattgtatcttgaatcttgggtattctaagtttctgggctaatatccacttatcaatgagtatatattatgtgagttcttttgtgattgggttacctcactcaggatgatgccctccaggtccatccatttgcctaggaatttcataaattcattctttttaatagctaagtagtactctattgtgtatatgtaccacattttctgtatccattcctctgttgaggggcatctgggttctttccagcttctggctattataaataaggctgctatgaacatagtggagcatatgtccttattaccagttggaacatcttctggatatatgcccaggagaggtattgcgggatcctccggtagtactatgtccaattttctgaggaaccgccagactgatttccagagtggttgtacaagcttgcaatcccaccaacaatggaggagtgttcctctttctccacatcctcgacagcatatgctgtcacctgaatttctgatcttagccattctgactggtgtgaggtggaatctcaaggttgttttgatttgcatttccctgatgattaaggatgctgaacattttttcaggtgcttctcagccattcggtattcctcaggtgagaattctttgtttagctctgagcccatttttaatggggttatttgattttctggagtccactttcttgagttctttatatatattggatattagtcccctacctgatttaggataggtaaagatcctttcccaatctgttggtggcctttttgtcttattgatggtatcttttgccttacagaagatttgcaattttatgaggtcccatttgtcgattctcaatcttacagcacaagccattgctgttctattcaggatttttttcccctatgcccatatcttctaggcttttccccattttctcctctataagtttcactgtctctggttttatgtggagttccttgatctacttagatttgatcttagtacaaggagataggaatggatcaattcacattcttctacatgataaccaccagttgtgccaacatcatttgttgaaaaatgctgtcttttttccactgaatggttttagctcccttctcaaagatcaagtgaccataggtgtgtgggttcatttctgggtcttcaattctattccattggtctacttgtctgtcgctataccagtaccatgccgtttttatcacagttgctctgtagtacagctttaggtcaggcatggtgattccaccagaggttcttttatccttgagaagagtttttgctatcctaggttttttgttattccagatgaatttgcagattgccctttctaagtcgttgaagaattgagttggaattttgatggggattgcattgaatctgtagattgcttttggcaagatagccatttttactatattgatcctgccaatccatgagtatgggagatctttccatcttctgagatcttctttaatttctttcttcagagacttgaagttcttatcatacagatctttcacatccttggttagagtcatgccaaggtattttatattttttgtgactcttgtgaagggtgttgtttccctaatttctttctcagcctgtttatcctttgtgtagagaaaggccatttcttgtttgagttaattttatattcagctacttcaccgaagctgtttatcaggtttaggagttctctggtggaatttttagggtcacttatatatgctatcatatcatctgcaaaatgtgatattttgacttcttcctttccaatttgtatccccttgatctccttttgttgtcgaattgctctggctaggacttcaaatactatgttgaacaggtagggagaaagtgggcagccctgtctagtccctgattttagtgggattgcttccagcttctcaccatttactttgatgttggctactggtttgctgtagattgctttgatcatgtttaggtatgggcctcgaattcctgatctttcgaagacttttatcatgaatgggtgttggattttgtcaaatgctttctccgaacctaaggaaatgatcttgtggtttttgtctttgagtttgtgtatatagtggattacgttgatgaatttccgtatattaaaccatccctggaatgaaacctacttggtctggatggatgattgttttgatgtgttcttggatttggttagcgaggattttattgagtatttttgcatcaatattcataagggaaattggtctgaagtcctttatctttgctgggtctttctgtggtttaggtatcagagtaattgtggcttcatagaatgagttgggtagagtaccttctgcttctattttgtggaatagtttgtgcagaactggaattagatcttctttgaaggtctgatagaactctgcactaaacccatctggtcctgggcttgttttggttgggagactactaatgactgcttctatttctttagggaatataggactgtttagatcattaacctgatcctgatttaactttggtacctggtatctgtctagaaatttgtccatttcatccaggttttccagttttgttgagtatagccttttgtagaaggatctgatggtgttttggatttcttcaggatctgttgttatgtctcccttttaattgctgattttttaaattaggatgctgtccctgtgccctctagtgagtctggctaagggtttatctatcttcttgatttttctcaaagaaccagctcctcgtttggttgattctttgaatagttcttcttgtttccacttggttgatttcacccctgagtttgattatttcctgccatctactcctcttgggtgaatttgcttccttttgttctagagcttttaggtgtgttggcaagctgctagtgtgtgctctctctagtttctttttggaggcactcagagctatgagtttccctcttagaaatgctttcattgtgtcccataagtgtgggtttgttgtggcttcattttcattaaactctaaaaagcctttaatttctttctttattccttccttgaccaaggtatcattgagaagagtgttgttcagtttccatgtgaatgttggctttctattacttatgttgttattgaagatcagccttagtccatggtgatctgctaggatgcatgggacaatttcaataattttgtatctgttgaggcctgttttgtgaccaattatatggtcagttttggagaaggtatcatgaggtgctgagaagaaggtatatccttttgttttaggataaaatgttctgtagatatctgttaaatccatttgtttcataacttctgttagtttcactgtgtccctgtttagtttctgtttccaagatctgtccattgatgaaagtggtgtgttgaagtctcccactattattgggtgagatacaatgtgtgctttgtgctttactaaagtttctttaatgaatgtggctgcccttgcatttggagcatagatattcagaattgagagttcctcttggaagattttacctttgatgaatatgaagtgcccctgcttgtcttttttgatgactttgggttgtaagtcgattttatttgatattagaatggctacttcagcttgtttcttcagaccattttcttggaaaattattttaataatttaataaaattatttcaatctgtggtagtgtctgtctttttccctgagatgggtttcctgtaagcagcaaaatgttggttcctgtttgtgtagccagtctgttagtctatgtctttttattggggaattgagtccattgatattaagagatattaaggccttaaatccaatcagatagtaattggtcaccccctaacattcatactattattgtagctcacagagttcatagctaagtaaatgttgaagaacactaaatatcagcagcctacatagcaccttcagggtacaatgagagcaaagccagcagaaagaaagcttgcaggcctgttccagcttgatctctacgtgtctagtacaaagtgtacagcatcttcagtcgtgtgtcgtagtgtcaagtcatggtgaacaaccatgagtagtggcaggagctgtggtttttttgcaggggaggatcctctgggacccttctgatggggggggtgagtcgtgtcccccaacattccagaagcagcaaattgttagtgtgtgcccaagtacatagtcacacatgcataaataaacaaaaatacataattataagcatatatctgctattacaaagttagtttttccattcagcaatgtatagtggacatatttttcattaaggtttccataaaactagcccattctctttagcaattccactgtgtaagtgtttttatctaattctttattaatctattcgcccaattttagccataacataatttattaaaaaatagttttaaagccttgggagatttatactgtttggttaaactacttttaagaatattcccttgggagaatgaatgctcagcgagtgaagttttggtgtttaagctcacagaaggaacttctaactgatccctccgctcccaccacgggcaccggttacatccttccctgtggtgccttgtgtctcaagcttggtgttttccttctttactaaaactgctgtaatttggtttaagactcttggttttctttctttccttttttttcctaagaggctggatctgactggtatcagaaggcatgatctctttctcagctttctgagtagctgggcctgcgagcacccgactctgatctttgtaactaattactttattaccaataaattttaagaaaactttcctagactggagagatgccttagtggttaaaagcactgactgctcttccaaaggccctgcattcaatttccatcaaccacatggcgtctcacaaccctctgtaatgggatccagtgccctcttctccagccccccctcaccccaccccgatatatttttacttaactaaatattgatttgaaatgtataaatttgcttctgtcatttttaaagacatgtttttatctattagaagcagcccaggacaaaataacttaataagaaagtggggagggggacaggagggagggagggaggcaggttggctgtattgtgcaagcctctgcaggttttgctctgtgtttgtttgtttgttcgtttgttttttcttttttgttttttccaaacagggtttnnnnnnnnnnnnnnnnnnnngggagggcaaagccccgggaagcggaaaaggagagggggggggagagaaggggggaaagaaaggggggggaggcaaagggaggaaaaggggaaaagagggggaagggggaagaagggggggagggaagggagggggcaagcaaaaacaaggggaagaagatgggaggtgggggagaagactcaccccccccatcagaagggtcccagaggatcctcccctgcaaaaaaaccgcagctcctgcaggcagggaggaggagggtggcagagaaagtaacacagagttttaaatgaataaacatcaggggtttaagttgcttggttgacagtgagcttacccctgcccattcttccctctaggggaaagtggagctggtaaaacagaggccagtaagtacatcatgcagtatatcgccgccatcaccaaccccagccagagagcagagatagaaaggtaaggcgcctcaggggcacggcttggctgggtatggcctcatccagtaagcacacctggccaggcttcagctggccggcagcaagcattttttttttttttgatgtgtaaattgctttgattctcacattgcacattatatctctgcttttacttctattactttattaatttccatttttatcaagtttttttttttaaattaaaaccactttgcaatagttgaaggtgtcctggttctagctagtttccatcctcagcagagctcttagaatttgcacagcttggctgtattgtgcaagcctctgcaggttttgctctgtgtttgtttgtttgtttgtttgttttttcttttttgttttttccagacagggtttctctgtgtagccccggctgtcctggaactcactctgtagaccaggctaacctcgaactcaggaaatccgcctgcctctgcctaccaagtgctgggattaaaagcatgcgccaccacgcccggcaactctgtgttttttttttttttttttcaaaattatactctgagaggaacgggctctgggagacagacccatggcccccatcattgtcacaactgtaacctgctggtgctgatgcttgtttctactgaagcagcatgaccggcataggctttcttatggtgcagccagtgcagccgggcctgagagggagaaggcactttccttcaactctgatgatggacattagtttactgaggagtcgcaactcaccagtctgtcacaggcagctcgacagacagaatccaggctgctggctgatgtaaaggaaaagactttagatttgataatacttgtgtggattttgtattttcatcgtaactggattacccagtcaaaagaggcctcctaaaataaaatataaaatgtggcctattcccacttctggtttttgaacatttgatcaaatttttgtaatttcttttgaatctcaggagagtagctagctgagaactaaattactttcatttttacatagcagataaggcttatgcaaatttactgtcattcctgagcatgttgggctctgtcgtctcatggggaccttggtaagcaagcagttcctacacatatgcctttgtaaagcacacagtcatttgtgtgcagaagtttgaagggtccgttgcaggattaggggacgatggtccactaatcaggttgtgtcggaggccaggttctttcccccagtgtgactgtgagaggaatcttgtcagtgaactagaaacacagacataagggctaggatgacagtaagatcatccagttttctaagtgtcttcttatctgaattttttataatgactttgatgtattttcattaaagagtgaagaatatgttgctgaagtcaaactgcgttttggaagcttttggaaatgccaaaaccaatcgtaatgacaattccagcaggtttgggaaatacatggatatcaactttgacttcaagggagaccccattgggggacatattaataactacttgctggaaaaggtatgtgtgctagacttctagggtgatgcttgtgagagctcagtgtctaaaaacaatatttgtgaaattgcgtttattgctttaaaggactatttaatcctattacctgtctccacgtctgccttccgtggtaaggtactcacctcccgtgtcctcacatgaacacttagtgcatcgagtcaggcattgtcaggcagatttggggtgtgcatgggacagaagaatgtgtgacaacttttgggtaagatctaatccaaaccagtcaaatctcttctctcttcctccctcccttcccctatgtagccaaggctaacctatacttccaaaccagtcaaatctcctctctctcccttcctcccttctcctatatagccaaggctagcctgtacctctaaaccagtcaaatctcctctctctccctccccgcttcccctatgtagccaaggctagcctgtacctccaaaccagtcatatttcctctccctcccttcccctatgtagccaaggctagcctgtacctccaaaccagtcatatttcctctccctccctcccttcccctatgtagccaaggctagcctgtacctccaaaccagtcaaatctcctctctctccctccctcccttcccctatgtagccaaggctagcctgtacctccaaaccagtcatatttcctctccctccctccctcccttcccctatgtagccaaggctagcctgtacctccaagccagtcatatctcctctctctccctccctctctccccctttatagccaaggcaggcctgaacctcaccatcatcatggtccagcttctaagagctcaggttgcaggagtgcacagtgatgcccagcttcagacctagactctttttatgttaccatcctccatccagtttacttttactaaattgaatttttccttctagtttctgcttactgtctgcagcaagacacacattcattccctcaatcccattaagccaaaccatacagtcacctcttccttgaattgtgcttcagtcagatgcttctcagttaagggttttccatcccggcgacaccagagcatcctatagccctgcaatttctatgtttatgtgtcatatcaaggctagactactaaggaaataagtgctttttcagagtcagttggaaaggaacaggaaacactaagtattacccatttttcttccataatgtttcatgattccactgtgtatacatattcaatcaaaaagactactttgagtgcacatacatgttgagcagtctttttagagtgtctaagcagagtccctagggcctgatcatgttgagtgagtttattataggatatgaggcattgctttttgaaacgccagcagactctggacaagggaatgttgagaatgttcctcccagcattccttcccacccgccccacgcagatccttaccacttgcacatactgccttgagactgaaggttaaaaagcaaacaacaagaacaacaaaaaaacatggcttcacttttcatgaatattaaggaaccattttaaacaacataaaaaattatcaaaatattgtcagggaaaccatagaggacactcatctctgataagctttttccacagtttggttttttttgtttgtttggttggttggttttgtttgtttggttggtttggttggattttttacccccacccacttcccctgagctgaggaccaaacccagggccttgtgctgacgaggcaagggctctaccactgagctagacctgatccgctagccacagagttttttttaatgcacagtgaatacaagattctctaagaaagatgcttccttttcatttatacctttaattccagattaacaattttttaaaaaaaatttttttctcagtctcgtgtgattgtgcagcagcctggagaacggagcttccattctttctatcaggttagtaatcaattccttatgcagagaattgtttggctagtcatgcagagaatctttcttgtgtcctgttatctgtcctacacctccctggctttcctggtctccaccacgaattccatgtgtgcacaggctttcacatcctgagaggctgtgagtgtgggcacggagagctggtaggggaccagccagccagccgcccaggctgagcatcactcacagtggaggtaacagtgtaatgactgtgacagctgtcaacaccagctacaaatgttgatttcagtctcttttgaattgagttgcttctcttgtgcttgagagttccagagatggaaatgtaaatttgatttgcaatgttctcgataggtgtaaggcaatatgattactttaaaaacaaagtaaggatttataaatccaagggagaattatcctctatgctgtcaacactcagaaaaaataaataggtctttagggaatgttatttagagtttgaaacaaacccttaaataaccctcctttggcacatctgcgactcacaaagcaagtgtgatattaatatgattttcaaatctcaaaccaagtgatacaaaccaagatcttttaaaaatgctgctgacctaattaagtaacatttgggggtttaaagaattaaaacctccatagggttggagatatttccattggtaaattacttactgacctgagttcagtccccagaacctgtgtttaaaaagttgtaggcttggaggtgtccatgtacagtcccagtgctaggtaggcaatgacagtcctggggattgctggctccaatcagagtgactggaacctagggaatgacacaacccaaaagctggcctttccacacacacccataggagcacacatgcagacacatatttaaaactttgagttaaaaagactgatttctgtgtagctgtctttgaaggtgattaatggtgacaatacaatcatatacactgtttgattaagtaattatcttgatcaatgccattcaaattttggtagttttggttaaaaaaaatcattttttaaggtcttttaactgtacatttgaagtaaaccagagcttcctgttgaatgaagaacctttatgtcaaggcctcttgaaggcatgctttacaaacaaaagggtaacaactttgtgtttctgttaacaatttgctagattttagataaacaatttctctataaaatataagaactgtttatttcaagaagttacagctttctgtgagtatctttcccagttgggaaaagttactaagatatcttcggtctgagagccccagctggcaatcacattgctttctggatgtgacagttgaggcaaagctgtggagcacacaggactccatgagactgtcagctgatgcctcttccccacaatgttgacttttctggactcagcagtctgacactgctaagctgcaagcacctcagggcagggatcctgcctgtcagatgatggtattcggggcaagaaccttttagaccgatcttgttgtgaatgtgaattttaagtgctattcctcatggctgtgtaacattctgcctgtctcactagatagaagctatttacctataagtaagaacaacaagacaaaataaaatccagaaatgtcctcaaagcatgaccaggaggacatagctgtgtaaagtctagaaaaagagtgaagaactaggtcacttctacaacaggccatttgacacttgggggtcagcatcagccttgacagttgcattggccagtaggaaccctagagggacagagccaaatgagtatttacgaaaacagtatttattagattgccttacacagtactgtcttcagagaactggagaagctgaaaacccaataacagctcaacccatgaagcaggtgcctcagtagttccagtccagtgctgaaggcctggaaatacctggagctgttgatcttccttgggaccgtgaagaaactgagttcttccgtcagcaagagaatgtagtagcagtggttggggctccagcagcaacagagtagatgcgctgactggcaagatacaaaaacaaacagccaggcttttcccatagacctccttttatctagactgcctacatttagggagggtcttctcagttcaaatagcctgaccaaggacatctctcacaggaacacctagcagcttttagttgattccaaacgcagtcaagctgacaaccaagattatctatcacagcaatttcatttcaattaaatatttttcagctcctccagggaggttctgagcagatgctgcactctcttcacctgcagaagtcactctcatcctacaactacatccgtgtgggggcacagctgaaggtgagtttcttctctgagaaccaagaggaggcagagggagcacaggctgctcaccccggccctctgctgcccccacgcagaggaatgcttcctctgctctgcttttaaaaatctcaggccaagatttattccaccaccggactgaaaccctggctaactaaccttgcatggctatactgtcctcatctcacagaaaagttcctctctgtgtgctcagggttttctcttaacatcttttaatatttgatctgactccatttatctgaaaccataaaaaccactgagcactagcaagccttcctcataagagtttgtgtgatttagcaaaaggtatggtgttatgacaaaatgaagttttaaagcactttgattctctctctctctctctctctctctctctccccctctctccctctctccctctctccctctctccctctctctccctctctccctctctctcccgctcgctctcactcgctctcgctctctttctctctctctctctttctctctttattttgtctttcaagacaggtagccctggctgtcctaaagctcatgctatagactaggctggccttgaactcagagatccacctgcctgtgcctcccacgtgctgggattaaaggcgtgtgccaccactgcccagcctccactattttaaaatattggttatgattatcctagaaacggttttgtggtccttaggttgttcctttgtgtaatctttcaaaaggactcaagatttcccttcccttgcgtgcaatctcttgcatacacatctgcaggcctggttagctctttatttgaattagttttcctctagtcatctcatagccagtttaacaatgtgttggttgaggagagtgtataaaaggtaaatgtgtgtcgtggttcactggagggggagaatagaaacgcagagagtgctatgggaggcttggatcacagttacttccaggagggtaagatgtgcatattagggccctgcatttctgtatttttaacttttctgtaataagaagtacattgccagcagagtacggtagcacacgtgggtgaccgtagtaccaaagagggcgggcgagacagaaagatgatgactgcacctggctcacacagccagactggctcacaccagagaaggcactggtgattttagttggatgaagaataaaaagatctctgacaggaaaggatgtgagaagtgtttttttatttaaattattatttcacttatgctagtgataccatcattactggcttagcaatatttttattgctgttcaaagaagtaattaattttctcttccttggcatttaggtttgccacccttttacacttttctaagagcagaaatgcttggctgaaaatgaattgaaaattaaacagaaaaaggcaatactccaactttctctgcgttgctagaaatacttaaatatgtatagagtattctgaaatgaacacttacagctagcgactgggctattcctctgcaataagaccatcttattaccaaaatattttgtgtcaggtcatgtagcctaatactaagtattaagttaacatttgaacttctttataaataaaattcatcttttgtactgtctttatttgttttctatttggatttttccctttctttctgacaaattatttgctcatagtcaaaatctaagctagggctggagagatggctcagcagcaaggagcagggactgctcttgcagagaaccctcatttgattcccagcacctacatggtggctcacaaccgtctgtaagttcagcaccagaggatctgctagtctcttctggtctccatggtatcaggcacatgtgtggtacacatcatataacacaggtaaaaaacccatacacttaattttaaaaaagaaaatagcctaagacatatgcttaagtcctattatgcagattatagttagtaatgatttgtatgtatattcattcataaaaatcatacaacaaaccctgctcaaacctacatttattatatacaatataattctcccatacaaacataaatgattttagtacccataaagtatgacatgtattttagttaatagtatgtaagactcatgtgaaattaagatatcttgggtcacaggtaagagaaaatctaggtaaagtttcccaaaacagtgatgaattcgctggccctgtatgacagcaagggatggtcatttataatggcaatatctgatatttgagtattttttggtgtggtaaggaccagacaacaacctgtaagaagtgtattaatctctccatgttattcatgaagagattaaggctcaataaggttaagcatccatctcatagtgagaaaacactggcagatgtaggagcttgcctggtggtgtctacaacacaaagaaacatgtactcttcaggcagaggaggtttgttttgtatatccttcctcggtacgtgagcatcaggccagggccccatccaggcataatgagcagtttgttgagaaaaggcttagtccagaactactttagagaaacgtgtagtataagcagttgtcattttttactgtaaaatctggtggcacactgggatatcccaacccaatgtccgtgtctcctagggctccacatccatcatttagctcctgtgctccagttcaaagctatgacttcttatcacttatcacatgagagaaatgatggggtgtatagctctggactacctaacagcctgctaagtgacttcagctggtggctttgctctggatgctgctctgggtgctgctggtggccttgctctgggtgctgcttttcctctgctgggaactaagcctgatgatacagtgtgagagctgctgccagcctgcacagagggcctggaagagagagttgcacaaatctcacacacaaataggcctcatatatctaaacattttcaaaacaaaataatgtttttaacatttgtcttctttaaaatgatttactacaaaggcatcaagactttggctaagcactttggttttgtagttaatgctcaggtgaaatgtttgtgacttacagttttctgttcatgtctagtcttccatcaatgacgctgctgagttcaaagttgtagctgatgccatgaaagtaattggattcaaacctgaggagattcaaactgtgtataaaattttggctgttattcttcacttggtgagtagggactcttgaagtgtattgtctccttgtagaaatagggcagtcttgaagattttgttctctgttgaaagtcatttcctttgtgaaaatttcacctgtggctttgaaaagtgtatcctgattttctttgttattttatcttataatgggttttccaagccactgtaggttgggagacattgcccagtgcactgtgctgtgatttccttaggccttgaactcagcaccaagcctaacggtgacggcatttgagagatgactgcaagtggcctccaaggcacagacagctcatccgaggccagtgccatagaccagatggcaaagctagccatgaccttgactccataacaatatagacctgtcagaggtgtacactaagatgaaaggatagacaggtgtagagaagagggagggaagtgtgaggcgaggcttgcatcgtgtggacatgcaacgtgtggacatacagctttaggaagatgtgtacaaatacgctcacctgaacctgggatgtgtctgaaactcattggaaatgctgtcttttgttttttgtctttgacatagggaaatttaaaatttatagtagatggtgacacgccgcttattgagaatggcaaggttgtgtctgtcatagcagaattgctgtctactaaggcagacatggtggagaaagccctgctttaccggacggtggccacaggccgtgacatcatcgacaaacagcacacggaacaggaggccagctacggcagagacgcctttgccaaggtgaggctagacttgaaccatgagttgcagcataactgaaattctctaaggatgtgttcagacatgcctgacagtgggctaagggctttaggaaaccatgagactctctggccatcactgtctcagtgaatgtcctggtttatcactgctaaataaaacaaactagaccaactaagggaatgagtgagttgaaactactacctcagcagagcgtggcactagcgtacctcccctgcctcctgagttctcctgtctgcttccagccacaggacctatgcccatgccacgtctctgcttgagctgctcctctccatagtgccctgtttagtcatgcctccgacccagcccgggtgtctcttcttcagggaagccttccctggattgcctgaaaacagaataaatgagagtcatttcaggaggggctggggagatggctcaacaattaagctcacttactgttcttgcataggacccaagttcatttcccaccacccatctgagcagcttaaactcgctgtaattccagtaccaggaaaaccaacacctctaagggcacctatactcactcacatacagacacacagaataatttttaaaagtcacctcagacactgtgtatatattccttcaccctattcactacatgccttggagattctgactttctgtgtacttagtgctgtatttccaacaaactatagatctgagtgcctagcaaatgtttagtgaataaatgaataactttctaatcatctaagtccatttactattagctcagagtaggaacagtttcagaggtgagaagtacagatgtaccaatgatgtagtaaggtgtagacacatgcctagagaatagtcctaaaatacaaatggtagccaataactgtgtttaaaaattccttcagtttggcatacaccatgtagctatctgggaataggtgatgtgcattctaatcattctacttaggcaataactaacacatgtgctggacagtcaggagaaggcggatggaattgaagacatcccaagtccaaacagagagactcgttcccaaacaggcaaggatttatgatattctctctctcaggcaatatatgagcgcctcttttgttggattgttactcgcatcaatgacatcatcgaggtcaagaactatgacaccacgatacatgggaaaaacacggttattggtgtcttggatatctatggctttgaaatctttgacaacaacaggtaaactggataggatattgaaaatcctactgcttgggttttgtttgtttgtttgtttgtttatcctaacattttctgtctcctgtagctttgagcagttctgcattaactactgcaacgagaaactgcagcagctcttcattcagctggtgctgaagcaggagcaagaggagtaccagcgggagggcatcccttggaaacacgtgagtgccgtcctggggagcaactccctgtgctgcccaccttagcagaccttctgacctctgcggcttcctcattgatgtttatctatcagagggtagcatcgctcaaagttcactctcttggcttcagttagatgaacttatttcccgactcagttgttcctgttcctcctctggagaggagtcattccctcctctcctctgggatctaagtggtggtgaaccgccctcggctgctgctgctcccattctctgaagcctgtggttggggcgctgggacattgtattcctgttcagttccacattctcccttttgctgtcacctctctcctcatggctctttgtggatgtttgtaactgtcagaggcaaactctgccaatgagatggagacaggaagtgatactggtcggaggttcacagctgagagactggctctccaggcttccttgttctctcctgctcctaacaggagtgagccctgtgtgcgtgtcactattctcactcctttatattttaaaacagttttggcagtagactttttaaaaccctctgacttttgcttatagttatttgtttctgttttgtgaaattttgtcaggctcctttgtttcttaggggacagtctgatgttttcccagaacccttgaatcctactatgaagccaaggatggcctgcgctcctcactcaagctgcacctcccaagtgctggggttataggctcttgctgccatgcctggttgctgagtttataaaactccactctcaccacacaataaaaatcaagccagtattttttctctgatagccaatatagtattgacatttcaattcaaaagctatttgaagtgtcatatttaaattatttttatattcataccttcccattttctattctacttatttattttaaaaagagagtggtataataaatagcacttctgcctcaaattgcatttttgccttccatcatgtgttaaatattagaatgccaaaaacgtcattgaagtatatgaacataaaataaacctgagttgtcaattttattataaaagaactgcctattgtttgacttaaacagtgatctctcatagctatttaaaatacaattcaattaagtttataggaggtttcctaagaataaatcttttctttaatatacaatataactgaagttgaggctttttttaaagcatgaatcttataaaacctgttatccaggtgtgatttggaggtaactaatccaaaatatcctttgaagctcgttgtggtggcacatacatgtaatctcagcactccagaggctgaggcaagagaatcacaagtttgaggccaaccaaggctatacaataaaaccctacctcaaaaaaaaaaaaaaaaaaaaaaaaaaaaaaaaagccaaaaactcctccaacaatcagaatatcaagtccgtgggcttcgttcccagcaggaggcctaacagcggcagtagcggcatccagacacctcagacaagctcggcaaccctgaaacagaccactaaggcagcagagcccaactcccaggcgacagaaacagcatggtgtgtgccagcatcatagcctctgtttgccttagagccccaaacttctaagcactgtgctttctctcaccattatagaacattcaagcgttctctggagtaagaaggaaacatgaactctgcaccatccacctcctcatgccacggagccttcctcacacgtccagactacctggattactcagccatgacagtccttcacctgtcattttccacatccctctgagacaaatcatcacagaaactgtaaccacagctctgtgaccccatcccaaaaatgaatagcagttcctttagtttcatttcctacttcttacgttgctgtgttgctgttgatggtgacagtttgcttgattagatccttatgagtagagtgattgattaattgattgattgactgactgattgatgattgattgatcgattgaaaggtttctcacataggtctgcctcctgtgctccctcccttcttccctcactccttctcttcccatccctttcttttttcccttgtaatcttttgttgaaaagagtgagcactttttctgtaatgagcatttttgtctgtaaggtttcccagcccagattttgctaatccaattcctgaagtgtcattaacacacttttgtgtacctgtgtgttgtgtgtattcgtgatgagatctagtgtcttgaccggtttcagaattagattttcttcagagcctattttatggcctgtacgtggatgcctaccaggagttcataaaaatctgattatccctctgattcatttgcgtctaaaagcaaataatgcttttggtttttaaatttctatttttccttctgtgtgcatgcatgcctgtctgtatgtgcacagcatgcttacgggttctatggaggccagaagagggcactggaaaccttggagctgtagttacagggattgtgagccacctgatatgtgtgctaagaactgaatcaggtatctctctccacaagagcagtaagagctcttaagcactgcaccatctctggagcccctacaaatcattttaactattgagaacttcatactctagtgaactcccataaagttaaaattcaattttcaattacattgtttgcctgaagctttctaagaatatattgtatacattgtatgttttatatagacatagctggattttagattttagttataaagcttgttattcagattccatagtcgtaggaagaaagttgctgttaaaagtgtttgcatttggagtgagggtatgacacgggacctctgtatccataagtcaccttgcacatctctcccagctcatgggcattcaggtcatcagaagcgcctgacttttaaaagcatctttaagcagtgcttaaagcaccattaaacttaaaaacaagagtcgttagaatcttcagccaacatcagtggcttctaggaatacagttgaaattttaaggtaattcttatacccgggacagaagactttactttcatagtcctaatatttgaaatgtttgccagtaacagatttccttcctttttttgtattttaggacatttttctaaaggtgtaaataactttattcataactgaaaatatagtactgaacatataaacatgaaaacacgggtaattcttgcagtggggctgtcctgcattgaacggtttaacagcatcctgaccttcacccactcagaacctgtaacattcctcttaccatgagaatcaaaactgtctgcttacattttattacatgtccccaaagcaaagttaatctcaattgaaagagtgggattggatgtaggatggggaggcaggaaggacaaagacaagaattaatcactcttgccttagtccagtcatcactgatgttcccttcatagcacaagagtgaaggcattaggtcggagacctccgttaacatgtgtgcttgactgtctgcccagttgacactgaggtgaaggaaggggacacctatgtgcttgcttgttgaggttcctgttctcctgggcattgctttcctgcttgtcctgcagattgattacttcaacaaccagatcattgtggacctcgtggagcagcagcacaaaggcatcattgcaatcctggatgacgcgtgtatgaatgttggcaaagtcactgacggaatgttccttgaggcccttaacagtaaattgggcaaacatggtcatttttccagccgaaaggtaataagaccttcctcttatcttgagctataagacttttgcttattgtttggcagggcaacgttgctttataataggttaaaagaatgtacagtcaaataaaggggaaaggcctgattaataatgtatctctctgtgagttctgcttctctgatacagtggtgaggttgacagaattatagtatccaggagagggagctacagactaaggcatttgctagatgcaggaaaaatgaacaggattctttaaaagcatgatgtcatttgtagccaatagatgctgagtacttgtccatgtgctagaattttatgcctgcatctgatagctctgcataagaaattgcttttgtccttgactttccaccacagtcctcagtgacaaaatatggagtgtgttctgactgcattcttcagaccctgggacctgcttaaaaatgagagattttagctgcagtcatggttgttatggagaaatgcattcttttagtatattgagtaaacttccaagtctccattttttacaatctaaaaatgtcacaaataaaccacatttgtacaataattggtaggagttgtggttcacagactcttgtgcgagaccttatatatgcagtatgctcatcaattgtgtttgtttagaagtctgtgttggggagggacacctcgtcatcaccccaggcttcctcacaaatgcaagcttgttcaggaaccagacgctgccaggaaaacatgccttgttccttcccatctagaaagaaatgggcagcagttttgtttctctgtaagtctgcagcacattgccactgctgcatgaataaatctacttcctaactccgtccccttggaattatgtaatcttaatggagaacttccaccattaactataaatagggtgtgaatcatctgcaaattgattattaactgacacttatctcagggctgttacttgtagctacaagctggtcttcagctaatgcatttagaacctaggtctcttcagccagttcccacttagacccaaacgtctgattaagcacctcttgtttaagcaggtctagtcctcagaggtgggcacaaaactgtacaaaatggaaagtaaccctagtctcagtgagacatttagggggtacctttatctaggcaaatggcggactgtaagggagtttagagatatcatcacaggttgtggagattcatctactgatgtaccctctggatactagacagtcggtattggtgaaattatattgatttatcataccaaatgaatctttcttaaattgtttatatttaaatagatatctgtaagtcccaaaagtgacaccccaaattattattctatcttttgccattcagccatttatatagctgaattaagtaaatcagtcaggcaaaaaaaatttttttttcattttactttatgggtatgagcatttggcctgcatgaatgtacaccatgtgcatacagtcccctaaaaggccaggagtgggaaggaggacttgaacccagttcctctggaagtgctcttaaccactgagccatccatctaatccttcaagtatttttgaaatgtaatctcactttctttcttttttgagatggactctagctctgtgttgctcagactggcctcagacctcagggctgtactgagcctcagccacgcaagtgtctaatgctggcactgcatgccaacacactaagctgtaatctctccttaaggcaactgaacatcttgtgtttaaacacttgctactgttttgataggaaatcctaatagtaatagtaattgattgctttctcttttatttatttatctccttctttgttactggttttggtggaagtcccagtttcccaacagaccaagtacctacttctttttcctcctccctcagtatcccatggataaatactgaaatgaaatatttaaagtatattctttggggaatttgtgtatatgtggtatgtgtctatgtctgtatgtaagcatatatggaggtcagaggtcaatgtcctatatcttctctattgctctccaacttttaaaaaataatttacatttatttatgtgtttgggtgtgtgcatgcatatgcatgccttgacacacatgtgaaagtcagaggacaacgtgcaggagttcattctctccaccatgtaacttccaaggatcaaactcgggctctgtggcaagcctctttacccactgagccatcccactaacctagtttattttgtgagacaaggtctctccctgagcctggacctccctgatagagctatcaggtatcctcctgtctctgccctactagcactaggattacaggcatcactgtacccaattatagtatgtaattgctaaggatccaaatcaagtcctcatgtatatgctgcaagcgctataccaactgagccatccctcatcttctgaggaattttacctaataaggaaagaaatgaaatagccaagctgtcaagatgtttaaatcacctcataccttttagttaaataattccattgggttgtatgttgagccaggtatcatttgttactgctaactgatcagacagacttactggcttattaaataaaagattggtgacttttatttggggctaaaaatcttccttttgatttaaaagtaacatggagaagcagtcacatgatctaaacaactataaaatattttaaaataaaaagctaaaacaagtatataacagtacaagaaaaagttaatggatttatgtgtgtgtgtgagagagagagagagagagtgtgtgtgtgtgtgttgaggacaatcacagctttgtgttttatacaaatgtaagaatggatcataatttgagtcttattccttcaggaattttacaaattaaagaatatttcaaaagggcggaggtgaggggaaagagtgtagagagagtgctcggcagttaagagtgcagactggccttgtgcagaccccagcacccatgtcaagaaccttacaactgccttagctccagagccaggacatccaagagccccttctggcctctgaaggaacccacactcacactgcataaacccccgtagacacaattaaaaataaaagtgcagctttgagagctctggaggaggatatattttggagacacctttacactagatgccttggactccagatttatttaactttctaccttctcagataaataactattgaaagagagtaagcctctgacttcctataattcgtcatttgtgaacctcttagacactgttcctttagcgtctgaagcctgctaaccgggacaggattctgtgctgtagggcactgtcatctcagtggtaccagtattgcagttctaagtggtactgtgtagaattttacttatctgctgtcttggctctactgtagcaaagaaagttggaggaagtcatgaagaaatccagtgacatataaagcctgccatttacagagtagcccctgtcggtgataaactgtatacagcactcaactctgggaagagcacctaagctggagtccagctcagcaggcagatgaaccacgacactggatgcacgaacacgtggccctttctgtttcctggagcctttcagggataccacttactagcaatttgatgtagtgttatctgtctacctcactgagcctcaacatgtatgtgagagaaacactgttatgctctaagagtagattatatggactgtgatatgtgtgtgcctcacagatagtaagccttcagtgtgatcctcccaagtggaacttggaagagaaagatccaagcatcagaagatgatagcacggcaatgtctgtttctcagaaagccatacttcatccattgtttgtctgccccacctgctagggaccatcctttacatccaactaaataaagggcatcatttgccaacctctcaccacactaggtatgggataaccacagttcatatgcattgtctagacctagccatttgcccagatcgactattagagcagccagcaaatggggactagctgtgttctgcatgaatctctgccaaaagcctgtaccttgtcagccgtggatttaaacaaaccccacagaatgggatcttatttaggtattgtaatttgttatgtttggtcatattaagttagaatgcacttttagaagttgaaaatgccttttttcagatttatgtcctttatctcatagacctgtgcctcagacaaaatcctggagtttgatcgggactttcgaatccgtcattatgcgggtgacgtggtgtaagtatcttactctggtgcctagcatgataatttgcatgcagcctgtcttcaggaaataagactaggaaactatcagtcatttttctttttatgtgtgtgtggaggcgggaggagaggtcattttgtagatgagcgagcgtattttagtcttttggtttgaggaaagtgccatagcttcatttcttccttgcttctcagacatttggtttgagtgtatattgtgtgacaatatgcacttcctggtgtggttggaactcagtaaaaattaactagtgtatcacttgccttgggtctacagtagacacacggataagatgggtgctgcccataagaagccagcagaatagtgaatacaagtagatacatctacgtcacaggaagggagggaaggtcttagctgcagagacattatgggagcagtgaggagtctggagaagtctcgttggaggaggcagtgtgcaagtttcgcaccgttaagtgaaagcctggagataggagagtagagagtgaggggccaggaactgcagagcacccagtgtctgcagggctacagcaactgtgcacacagaagcagttttactctattattgtcagataatgtttaaaaagagaattcttatttttaactgtttattgccttacaataaaaatagcaaatgacatgaagtaccaagtggtgtgaaaattatctcgctatgttagggttcaggtgctcctgtatcagactgtcacaagccggtggcttaaagcagcagccacctaggcgagggaatgtagcttagtggtgaaatgcttgcctggcataggtgaggccccagcaccacaaaaacaaacacagaagcacacatgtgagctctcctagtttcccagttcaggaggcaagacgatgaaaactggatgagggcaggctacacctgtccgggaagcttctctcggggagactctgcccccctttccaccttttgatgctatggacattccttggtttgtggctctacctcctatggctgcctcctctgtccattgctttctcctgagtgttaactctcccgtccatgctaaaaggatttcgtggcatttagattagtgccttctttcaagatccttaacaaaatcacatctcttaccatagaggacagcattgccaagttccagtatgggagttcttttcccaagggattgtggtgtggctgtcgtttggtacggggtcactgttcaggctgaatttgttgtttcactcttcattgaaccctagtcctcattgttctttatcatttaaagaactctgccttttccttatttattatgttaggaattcttcccacataacccattacaagaagagatttatcaagacaaaagcaaatgattatctttataaatgctggaaagacatttgaagaaactttaatagctatttctgactaaattaaaactccagaatcataaaactatatgactctaaattaccaccctctgtcaaactagccatcattacaagatgtcatcatctcccacagttccgaccctgtgcccaggttttacagtgctaagtccagctccactgagatgcctctcactaggataagcctaagcctcatcccaggctgctgtttgatgatcagggtggtgtaagggcagagctggacagaggcctctgcccccaagtcctccggttttatagagaaatcagcttctacagaacaagtaaacatctgtctcaaagtctcatgctgtaattattggagagctaggcagtaaccaggtttccaggctcctggtccagagttccacctggcattcactgcctcaggcgtctcctttagctttcagtcctctgctgggtttttatggattatcttctagatttccaatactttacagggtatggtatctggccacaaggtgcttttcatacaagatgtacacatgtgcatgtgattaagtatatatttaagcataaatgtacacgtgtacatatccatatgtgtgcataagaaaagataggttataataatttccatatgagtcatagcaagtgttgtgacaaactctgagtaagaaaacactgtaatatttttaggtgttgtgtatgcctggagaggctgatgctgctgggctctgggtgctaggaattatttttataggatgaagtgggaagggtggtgaaaaaatattcaggaagtagcagggatgtaccatcctcgccatagtgcagattggagatgcctggaaaagtagatggatcaaatcatagtgagactcgaacactgtactgtggcctctgaaacccaacctgtgtgggtttaacaatagattaagagcagggcaatttatgagttcaattaagaatgacaggaaagtattaagaagaagatctagccaggcagtggtggcgcacacctttaatcccagcacttgggaggcagaggcaggcagatttctgagttcgaggccagcccggtctacagagtgagttccagaatagccagggctaaacggagaaatcttgtctccaaaaaaaagatctaggttaggcaggcagtaagataattttgggtgtggtggccttaaatccctgtggatagcacacctgggatatttttttgtttgcaaaattaaatatgtaaaattaaaggtcggggtcaggggcctgagaagtatcgaagtgattgtcaggtagaaaatggaggcgggcaagagagcagaactgctaaggtggagtttagagttactgtgtgcagtcacctagcccatacctactcatcctgagccctggatttaccccatcacagtgtggctcccagtagaagactttccagtcactgcagcagtatagatcccctgcctgggctcttctcaccatctgccttcttagctggactttcaaagccttactttctgccttcctcctgatgatgaatagtgggctcatctctgtaatgttcctgcatgtgcctgcttccgcccttcatcctgcctgttgttcctcgttatctgccggtccttttcctctctgcttacccagttcttaccatcctttgcagttctccttggactctctcataccctgcacactgagtggtacttaggcaagtcacttgacctccccatggatgggacacttagttcctgtatgcagctgttttccttttatcttaggcgtgctggatgatacatacagctatctattttgaagtcatcttctcgaggtaagctagccagtagaaaatgatattcttagaatggtgggactagtgttcactttccttctgaaggagaggagcagagtcccttttatttggtgtgcaagatctagcctttacctcagagctaagtgaactggttgtacagtaatctgattgcaaaacttatagcagaagacctgtgcacactagggaagctcgggtgtggctcgtacatggcgatgatgctcatgctctgttctctcctcagctattctgccatcggttttatcgacaaaaataaagatactttatttcaagatttcaagcgccttatgtataacaggtatgactgtttcttgcctttacttccagttctttgacaaacattgaagggtgtatgtgtgtgcacatggttcctttatgtgacaattttaggagacttttctgcattgttctgcttaatgtatgaaaaatgtatatgacctcaagattataaaatctgtagacttggggcaggagctactaataccagtaaggtttgccttgattctccttgctttctctcttcactagccttctggcaccctgtaccaatgtccccagtagtttctaagctaggccagaggtcactggtgtcaagtggtgtcaagttttaggtccacctcaaactgttccttcctcagattcccactgcggggtctttgcacccaggtatgagccgctctgttctcaggctgacgcctggcctcctgaccaagcaggagaattccttcacaaaccacctaaagacaaaaggcggtgtacagaacaaaagcagacaacagatgggactttaaacccagtatggagagaaggttcgggaagacagaaaaggcatcttgaccattattctgtaggttaaagagacctctgctcacttgtttaagtctaagtaattcctcagtagattacaagattatattaattacctttgagccacatgtccttgtatgctctgaggtacagctggggagtcagtttagaagccactctttttctaataataagtaaataactttcaggaaaagtaggtaagagattaagagtagaggtgcaggggaggcattaaaaataggataacccttactagaggcagcatcaagcagacacctatatgaagtaagggggtgagggggaaccacactgctacctggaggagaagtattttaggccgagagaagagctggtccaaggccccaaggaaggaatctgctgagagcattgacagcaagaggctatatgctaaaaacagtgggagatggggagagtggcaacaatgaatttagagagatggacagaaccagaatcatagtctgtgagccaacgcaatggcaaaggatggaaagagggagcattgcaaagcatgatctgctgtgatttgcaccatggggatcactagtgccactgtgtaagaaatgctgtcaccggcaaaagcagagctagtgagaccagttggggctggcttagcagtgacaaggtgaggaggagtcagaccaggtgatattcagaaaggagagtggagctgtaagctgataggcagccagaacccagttgtgatgccagagcctatgtagtaagacaatgtgtgtttcggatgtggaagtctatactgcacccaagtgaaaatgcccagtagaccacggcagaaccgcatctgcagctccagaaaggctgggctggaggaacctctccacgttggtatgttgattatatttaagaccgtgagactggaagagttacccaaggaacaagtaggtttaaaaataacagtaaagaaagaatagggtaaaaatatttgatccttaatggtccaacgtttagtcaaaaaaaactgagggcactctacaagatagaagaaaaacaaatccagtgttacagaggcccagcagggggtactttaagaaaatagataaataaataaataagcaaacaaacaacacagtggtactcagtagttaagagcacttgctgatctttcaaaacatcccacatgagacagctcacagccacctaaaactccaattccaagagatctgataccctctctggacctacataagcactacatacattcaatgtgcctatattcaggcacatataaatgaaataaataaatctcttttaaaacaggagaaaacagtaataagcaatatcaaataaaaagcagaaatggtgccaagattaaccaactgtgtttgttcatgggataactcattggattctttagcatactgatttctgggcagtggtcaagacaaatgtttgattgacatgggcttgagggagaatagaaaatgaaaagatggacacaagatgtttaaataattctcttaagatcttttgctctaaaatggtttgtctatatatgctagagctacaaagaatgaggacagagctgtcagcagtagaaagttgcaaacacatcgaaataggaaagcaaatccatgcgaaagctgggcataggagaacatgactctcaggaaagaaagccagtgttccgtttgtcaggtggtatgcacccgtttgaggaacttctggcagagtctagcatttctctatgtagaaaatgttaaactggatatataaccacatctgaccagtgataatgtcacagtatgctgtcaagcttgtgtcctaaaaggaacacaaaatggtatttgttttctgtgtgcgtttaccatggcctagaaaaatcagctgacagtgcagcacctctcagtgtagactaatgtagcccaggatcacagccccagggtagaaatgaagtaacactcggatatatttcctaaaatattgaacagtcacacagggtgcactacttacattggtctgacaggttgttttctattggaaaaacctgcttgggaagccagacagcagtgggaacttgcttattaattgacaatgaaaaatattacccacagaagctagtccgcttgcatgcttggtaagcacagagttagaacaaaggaactgagactgggacaaggtgaatccattttatcatcttccagagcagtgaaaagattaaatgtctgcacctatgctgcctatgtcatgtgtctctctgtaatggacaagcccttgcagtgaggtggcatttagatgtgacatgtttacccacactttttgatgtttttgtggctaaccaacctctcaaaatctgattgcatcctttctttgtatgtgtgattgtggcccttggatctctcgttctttagaacccaacatttgcacatgcacacaggaatgctgtgatattcactttgtgcacacgtgtccgtaaacggaagaatggagcaggcagctggtctgcagagtgcatgaatttttacttatcctcttgttgttcacatctaccttacctttatacatgctatgtttctgactttatttctctcgctttaaagaaaaaaaatctaggggtgctggagagcttgctgttcttccagaggactggagtttagttcccagtacccatatcaggtagcacacaagtattatccaagtatttaagctatcttataaaaaaaacaaaacaaaaaaacaaaaaacaaagcaaaacaaaacaaagcaaaacaaaacaatacaactctttggagctagagagatggctcagaggttaagagcacttccagggttcttaagttcaattcccagcaaccacatggtggctcacaaccatttgtaatgggatccgatgccctcttctggtgctacagtgtactcatctacataaagtaaatacagctacagtgtactcatatacataaagtaaataaataaatcttaaaaaaaaaagtttgataatattatatacatgtctttctgccctgaaaattctctcttaaaatgaccatgtctgtttggattctttttatatcactctaatgtgatatataatcatatttttagtcctcttcctccttccttccacttacagcattatatgagagtagtctccagttacagccaacagtaattaaagtagaggaagaatttggattagaaactgcctaggtccaaaccacagtgctccacagtcttctggcacatgtaagaattcttgaagtacacacagaagttttctaccgtctggaaaccccacaatgacacacctcctccaacaaggccacacctcctaatagggccactccctaggccaagcatatacaaaccatcatagtgcgcttttgtgtgtacatttttattagggtatgactggaaatgacaggctagcgacatacagtgatcacactatcccaatttgtttcctggctgtattgatggtaattggtcctccacagtggtggtggtggtggtggtggtggtggtggtggtggtggtggtggttagtgttgccctctctgggcacacagccaacctcacatcacccttctgccctctggcatcatccagtcctctgtctcagagtgatcgttttgggcagatgtgaaacacactcacagtgtgctttggagaaccaactcagttttctacaaagaaaaatgggcaaggtggtggaggaataaatacaattagcagtgaatgcctgttaattattgtctttgctaaccccaaatttgtcaggaaaaacaatctgacaagaaaaaaaggtcctccagtgaaacgacgtttccagtcccagctattttaaagcacaaagcacccaaagggagatggaagaaaatcacagcttgaggcactacaaacattttatgaggggggaaaaaaaaccctgcacaaagtaaaataacaaatctgtggtttcaacatggaattggcctaatgtgcatttttaggtcatagtagccctagtatgatatcaatgtgctagaaccactagcactacctgtgaatgtgttaataaatccagctcttgtggatggctctgctaggagactatcagaacagttatgttcatatccctagccgtgtattggttacctgtagaaaatgttttcccttccgtattgtctgccaggacatgagaaccatttgcctgctagagactttttttttttttggccattaaaaaaacattccaggtgtgtgtgtgtgtgtgtgtgtgtgtgtgtgtgtgtgtgtgtgtgtttatataaaataaatgtactggctacttttgtgtgccaacttaacacaagctggagttatcacagagaaagtagccttccttgagaaaatacctccatgagatccagctgtaaggcattttctcaattagtgatcaagttgggagggccccttgtaagtggtgccatctctgggctggtagtcttggttctataagagagcaggctgagcaagccaggggacacaagccagtaaggaacatccctccatggcctctgcatcagctcctgcttcctgacctgcttgagttccagtcctgacttcttctagtgatggacagcagtatggaagtgtaagctgaataaaccctttcctccccaacctgcttcttggtcctgacatttgtgcaggaacagaaaccctgactaagacaataagatacatattgatgtgtatctcctaagagccacattatctatgcaaaatatctacatagtaatttaatggatgtcactttaaagaagtttaaagaatttttttaaagtgctacagtttgaaaattgtctgtggtacaatattcctcatggtatgaccatagttttctaatgcaacagttttcccagttgggctttgtgaatcccgtgtgcagtgcaccgtgatcctaggactcacttgacagcacagattgccttttttattccccttatttaaatgcagctttgactcattctttctctgtttctcagctcaaatcctgtgctgaagaatatgtggcccgaaggcaagctcagcattacagaggtgaccaagaggcctctgaccgctgccaccttgtttaagaattctatgattgctttagtagacaaccttgcttcaaaggtaattattttcctttctaaatgtcctttataatccacagattccctcttaacataattaacatacattggagaacacaggtatgatttattttttaggtcatttttcttaattaagttgaacagtatatattcaaagtgagcaataaaaattttattcctgctttaaaaaaaaaaaaaaacttgactaaaacaattgtatcctgtcggttaaaatggtggccacgtctggccggccatagggctagagcccgcttatgggagtggactcaggaagtttgactttgagcaccccacaactcggggctggcatcgggctgtgagaagccacaggaccccagtccgggggtgggaaagcacagtctgagattcccaccggagttggctcagggtccccgggcctgcatggaggtcaggcacagcaggttctcgctcttgggcaccgcagacaccactagagtggggacccggtacaggctctagcccaggggaggaagggaaaagggcagggaagagaggtccagctggttcttgtgggcattggagtgtctctggcttgctcctcggtggcttaggttggtggaagccatgtctgggaatgcagggaggccttccccgggagactagacacccagctctttagaggaagacctgctccattgttccccacggtgggtctaatgagaagaggcagtctatggttttaaaggcatttattgtcatagtgggaagtggagctaagagagtagtagaggtagagaaaggcagagagagggagtagagaattagaggccagccaaggccacgtggagagaggggagaagagaatgaggaggggggggagcaagagggcaagagagaagcaagcagaaagcaggagtaagtaagattaagagagggaggaggggacaaacagcccctttttacagtggtccagggctacctggctattgccaggtaaccgtggggaggagcatacctgactgttgccaggtaactgtgggggtggagtcatgacagaataccaggagcttggggcattgccctgggtgactgatggccacagaattatggagctgaggccttgtgtcaggaccctagcatctgggagcatggcaaacgggctttccatcctttgcaggaacacctgctgggtctccaggatttaaagctagctctaccagaaaacaggctgcctttcacggtcccacagtatcccagatgaattacttttttaaatttaaactttttattctaccattaaggtcaaggggaaactgccattgtggtttcaacaagatgtatgacgtaccgtacctgaaaagataaactgaatctatgctggaaagtagggcatggccagagagggaggggagaggtgggaacagctgactgtagctgtagccatgcgccatgcgtccgtgtgttgtgtgtgaacagcaaatggccagaagggatttacacaagaaacaaagtgagttccaggacagccagagctatacagagaaaccctgtgtcaaacaaacaaacaaacaaacaaacaaagaccgtagcttctatgtgtcagcctcacagtgctgtaaacggctggactttaccaatgattcatgacaattctttctaatttttgctgttgctttgattgtaatgttgtctataagttaaatctggttattttcccattttattttaaaatgcagcttttattttcccctcccttaaagaacagatttctgttcctaactgctgttcttgacaggtttgataaactagcagcattctaggacgtgttaattttagctcctttatatctatttcttctggaaattttattgtatgttttcttctttattgttatcttttgtaaaatctattttccttgtaaaaaaaattaatttgcatctgtacgtcaccatggctacaataggcaaataccacaagggcgaatctatgcagtagctttctgtggtctccacagtcattcctttgcctcaactgatagtgaataagctcagtccctccccttgtataattaaatttccagaaagacagaagaatgagtatgaaggctagaatgtcgtccacaccctgagcctcccatctctatactctatgtcatctttaatccactgcatccagtaaagaggtgaacctagaaagaaggcatgcaatgcaggaaagagccgagtgctgtggagggcattgactcgtttaactagagaaagaaatcactgttctcaaaatggataaatatagatctgtcacctcaggaagactgacagagcaaggcctccttaggccgcactgcaagttccaggtcagactcagctatatagggagactgtctcaaacacaggaaactatgaaaacctaattccaaccttttctaatacatcaaaacaaccctgtacccaggaagtaggaactatgtagtccttttaagtataaatggaaccttctgcaagaactgaccaaatgccgggcagcaatgacgaaactgctttgaagactagatagacagttccattctccatcctcaaaacaagttatttaaatgtgcttgcaaactctaaaaataaaatgcttccctaaataagtcaccgatttgagaggatagcacaacaaaattataaaatatctaggactgcttgacaaagcattgatatcatttataggatatcaacatttggcacacctttataaagcaacaaagatagctaaaagtaggtaggttcaactcaaagacccagaagagaaactcaaaagaaagaaaataattttaatagcagaaattaaccctaatggagaaaccaaaaaccaggaaatagacaaaacctctaataaaactgattttaaaaataaaaaaataaaaaccaacaggttggatggaaggccgttataacctctgacactggaggtcagtatgctttgaataactggctgctaacacattttaaaatttagtttgctagaaacatgttgttagaattgattcaagatgaaatagaaagtcagaataaaacagtaaccttaagaattctgaatcactaatcagaagtttactgccctctagctcctccaagagcatcaggtctgatgatttcacagatgcagtttataaactttagtaacagcacctgtcaactgtatgggaggtgtgaagaaaggttactcattttttgggagttacaataatacaaggttaatatgagaaaataagaggttggttgaacgtaagaacacagacaaaagatcctaaaagtatgtatggaagttgtctttcctagtagcataataatacagtgcctactaaagatacctgaaacaacacaagtattaagtgaattctttaaaaaaaatcaactttctgatgctaaccaggaactagtaaacttaagagatagtaaaccaggggctgtgtaaatatagagttcaactaagtggaaggacagccttagagctgccttttcacctgagggtggttaatcagcattccagtctatgcccttggactggaatcttagacttacacaaattaaactggtaatctacacacgcacacgcacacacctacaaggacttatatgccccaaagaccacatctagaataaactagaaataatcctccattgtcagtgaggaaactgcctatcttggtctttgacacttagccaaactgtgtcaggtattggaagggaaggcagtgagtctttcttgagaatatgtagttataagccagctttaatgagattcacagcccacattcacgctacttgaagggcttaaaaagctttaacccaaaagtttagtttaagggcgtccagttcttatattgccttaaacttctgaaagaagaaaacacaattattattttgagggtatcaccttcataacagaccttaaagacttcccacaaggaaaataggagctcactgtgaagagtgactacagggggtaggaggtggtgctatcctctggaaagatggctcagcgatttagagcatttgttgcttttccagaggacctaggttcaattcccagtacccactgagtgactcacaaccatgggttattccagttccaaagaaactgacactctcttctggctcctgtgagcaccaagcacacatgtggtccacatgcctacattcaggcaaggtactcataatacataagataaataaatcttaaaaataaaaataatgaagttttttttaagtgacttcaagatatcatatgctagagtaggaataaacagcaggcccggtgacagctcctgatcctagaacaatcacaaatagaatccacagctggggaggtggctcacgaggctcaagcatgaggaccttagttccgaacccagcacccatgtcaaagctgagtatggtggtgcatctttgccaacccagtgctagagagcagagacaaacatcccaggggcttgcagccattcctactgaaagtaagatccaggttccatgaaagactgtctcacaaaataacactaagaagttattaaggatgacaccctacatcaacctctggcctttacatgtttccttgcatgcatgcatgcatacacatcatgtgcacacacatgtaacaacattcaaaatgtttagtgaagagcctgggaatatgagaaagaacaactagataagttactgaaataaagctgaacaaaaaaatattaatgaaaatttaaaagttaaaaattatctagaattacacttagagccataaagtgatgaacatatctagcatgcacgctctcaggtgcacagaaagggagagacgcagagcaacacttgaagaaatttacccaagaagtctaagaattttataagacgccacagtccaagcaagccaggaagtcaagtagaccccgagctgggaaagttaaaggcaatctgatgtgccacctagtgaaatgcagagcctcaaaaggcaaagcatcttgtctgcttgtgttgtgtggataacaggcttgggctgccctggagctctctgccaccgctgagaatacgctggaactcctcagcttcctgtctgcagctcccaggtacagggattacatgtgagcaccaccacacctgcttcagagacaagtctcttagcagccagagaaaagataggttagcttcaaaagaataataatcaggcagagtgaaaatggtttcactagaattccatagccagagaatgttctttccacaaacaaagacataagaaagactcttgctgaaaagagatgctgagtgtttatcagcattagaagctcaccagcagtagtgaacatctgcaccaggatccagaagcagcctggcatctgcttgttggcttctggtctggaccagagctttccctactcctttacagtagtgaatggaagaggcctttcccatcttttctcccctgcccttcaggatttcattggaaaactgatgagtactacctagtcaacttcccagaatttctccacagtgtttcaagtgtactatcatctttcctcacctagaatctaggttctagaatatcttttaaatacagagaataggtcctactttatatatatctcaatggctctataaaatgctaccagcatatgatcagtaagttattaaatgaatttgaatacactttgtctgtttgacagtgtgcaaaacagatcaaatagatgtataattaaatgcattagagggtcacaagtcccttccggtaggcgccagcaccgggtcaccttgggcgcggagtcagcggacacccccaaggttcctagaggactcgccatgctatcttaggacctctggtgagtggaacacaacttttgccaggaggcatgttcaaacaccagatatctgggcaccttccctgcaagaggagagcttgcctgcagagactgctctgaccactgaaactcaggagagagctaatctcccaggtctgctgatagaggctaacagaatcacgagaggaacaagctctaaccagagacaactataacaactaactccagagaataccagatggcgaaaggcaaacgtaagaatcttactaacagaaaccaaaaccactcaccatcatcagaacgcagcactcccacctcacccagtcctgggcaccccaacacacgcgaaaagctagacccggatttaaaagcatatctaatgatgatggtagaggacatcaagaaggactttaataactcacttaaagaaatacaggagaacaatgctaaagagttacaagtccttaaagaaaaacaggaaaacacaaccaaacaggtagaagtccttaaagaaaaacaggaaaacacatccaaacaggtgatggaaatgaacaaaaccatactagaactaaaaagggaagtagacacaataaagaaaacccaaagtgaggcaacactggagatagaaaccctaggaaagaaatctggaaccatagatgtgagcatcagcaacagaatacaagagatggaagagagaatctcaggagcagaagattccatagagaacataggcacaacaatcaaagaaaatgcaaaaggatcctaactcaaaacatccaggaaatccaggacacaatgagaagaccaaacctatggataataggagtagatgagaatgaagattttcaacttaaagggccagcaaatatcttcaacaaaataatagaagaaaactttccaaacctaaagaaagagatgcccatgaacatacaagaagcctacaaaactccaaatagactggaccagaaaagaaattcctcctgacacataataatcagaacaacaaatgcactaaataaagacagaatattaaaagcagtaaggggaaaaggtcaagtaacatataaaggcaggcctatcagaataacaccagacttttcactggagactatgaaagccagaagatcctgcacagatgttatacagacactaagagaacacaaatgccagcccaggctactatacccagccaaactcttaattaccatagatggagaaaccaaagtatttcacgacaaaaccaaattcacacattatctttccacgaatctagcccttcaaaggataataacagaaaaaaaaaaaaaaaaaactatacaaggacagaaaccacatcctagaaaaagcaagaaagtaatcaacaaaccaaaaagaagacagccacaagaacagaatgccaactctaacaacaaaaataataggaagcaacaattacttttccttaatatctcttaatatcaatgggctcaattcccccaataaaaagacatggactaacagactgactacacaaacagggcccaacattttgctgcttacaggaaacccatctcagggaaaaagacagacactacctcaaaataaaaggctggaaaacaattttccaagaaaatggtctgaagaaacaagctagagtagccattctaatatcgaataaaatcgacttccaacccaaagttatcaaaaaagacaaggagggacacttcatactcatcaaaggtaaaatcctccaagaggagctctcaattctgaatatctatgctccaaattcaagggcaaccacattcattagagaaactttagtaaagctcaaagcacactttgcacctcacccaataatagtgggagacttcaacacaccacttttatcaatggtctgatcttggaaacagaaactaaacagggacacagtgaaactaacagaagttatgaaacaaatggatttaacagatatctacagaacattttatcctaaaacaaaaggatataccttcttctcagcacctcatggtaccttctccaaaactgaccatataattggtcacaaaacaggcctcaacagacacaaaattattgaaattgtcccatgcttcctagcagatcaccatggactaaggctgatcttcaataacaacataaataatagaaagccaacattcacgtggaaactgaacaacactcttatcaatgataccttggtcaaggaaggaataaagaaagaaattaaagactttttagagtttaatgaaaatgaagccacaacatacccaaacttatgggacacaatgaaagcatttctaagagggaaactcatagctctgagtgcctccaaaaagaaactagagagagcacacactagcagcttgccaacacacctaaaagctctagaacaaaaggaagcaaattcacccaagaggagtagatggcaggaaataaactcaggggcgaaatcaaccaagtggaaacaagaagaactattcaaagaatcaaccaaacgaggagctggttctttgagaaaatcagaaagatagataaaccccttgccagactcactagagggcacagggacagcatcctaattaacaaaatcagcaatgaaaagggagacataacaacagatcctgaaaaaatccaaaataccatcagatccttctacaaaaggctatactcaacaaaactggaaaacctggatgaaatgaacaaatttctagacagataccaggtaccaaagttaaatcaggatcaggttaataatctaaacagtcctatatcccctaaagaaatagaagcagtcattaatagtctcccacccaaaaaaaaaaaaaaaaaaaaaaagcctaggaccagatgggtttagtgcagagttctatcagaccttcaaagaagatctaattccagttctgcacaaactattccacaaaatagaaggagaaggtactctacccaattcattctatgaagcacaattactctgatacctaaaccacagaaagattcaacaaagatagagaacttcagaccaatttcccttatgactatcaatgcaaaaatactcaataaaattcttgctaaccgaatccaagaacacattaaaacaatcatccatcctgatcaagaaggttttactccagggatgcagggatggtttaatatacggaaatccataaacgtaatccactatataaacaaactcaaagacaaaaccacatgatcatctcattagacagggagagagcatttgacaaaatccaacacccattcatgataaaagtcttggaaagatcaggatttcaaggcccatacctaaacatgataaaatcaatctacagcaaaccactgccaacatcaaagtaaatggtgagaagctggaagcaatcccactaaaatcggggactagacaaggctgcccactttctccatacctattcaacattgtacttgaagtcctagccagagcaatttgacaacaaaaggagatcaaggggatacaaattggaaaagatgaagtaaaaatatcacattttgcagatgatatgatagtatatataaatgaccctaaaaattccaccagagaactcctaaacctgataaacagcttcagtgaagtagctgcatacaaaattaaatcaaacaagtcaatggcctttctctacacaaagaataaacaggctgagaaagaaattagggaaacaacacccttcacaagagtcacaaacaatataaaataccttggtgtgactctaaccaaggaagtgaaagatctgtatgataaaaacttcaagtctctgaagaaagaaattaaagaagatctcagaagatggaaagatctcccatgctcatggattggcaggatcaatatagtaaaaatggctatcttgccaaaagcaatctatagattcaatgcaatccccatcaaaattccaactcaattcttcgacgaattagaaagggcaatctgcaaattcatctggaataacaaaaaacctaggatagcaaaaactcttctcaaggataaaagaacctcaggtagaatcaccatgcctgatctaaagctgtactacagagcaattgtgataaaaatggcatggtactggtatagcgacagacaagtagaccaatggaatagaattgaagacccagaaatgaacccacacacctatggtcacttgatctttgacaagggagctaaaaccatccagtggaaaaaagacagcattttcaacaaatggtgctggcacaactggtggttatcatgtagaagaatgtgaatttatccattcctatttccttgtactaaagtcaaatctaagtggatcaaggaactccacataaaaccagagacagtgaaacttatagaggagaaagtggggaaaaacctcgaagatatgggcacaggggaaatattcctgaatagaacagcaatggtgtgtgctgtaagatcgagaatggacaaatgggacctcataaaattgcaaagcttctgtaaggcaaaagacaccatcaacaagacaaaaaggccaccaacagattgggaaaggatctttacctatcctaaatcagataggggactaatatccaatatatacaaagagctcaagaaggtggactccagaaaatcaaataatcccattaaaaaatgaggctcagagctaaacaaagaattctcaactgaggaatacggaatggctgagaagcacctgaaaaaatgttcagcatccttaatcatcagggaaatgcaaatcaaaacaacactaagattccacctcacaccagtcagaatggctaagatcagaaattcaggtgacagcatatgctggcaaggatgtggagaaagaggaacactcctccattgttggtgggattgcaagcttgtacaaccactctggaaatcagtctggtggttcctcagaaaattggacatggtactactggaggatcccgcaatacctctcctgagcatatatccagaagatgttccaactggtaagaaagacacacgttccactatgttcatagcagctttatttataatagccagaagctggaaagaacctagatgcccctcaacagaggaatggatactggatacagaaaatgtggtacatttacgcaatggagttactattctgctatttaaaagaatgaatttatgaaatttctaggcaaatggatggacctggagggcattatcctgagtgaggtaacccaatcacaaaagaactcacatgatatgtactcactgataaggggatattagcccagaaacttagaatatccaagatgcaagttacaatttttgaaacacatgaaactcaagaagaaggaagaccaaagtgtggacacattgccccttcttagaattgggaacaaaacatccatggaaggagttacatagacaaagtttggagctgagacaaaaggatggaccatctagagactgccatatcaggggatccatcccataatcagcctccaaacgctgacaccattgcataccctagcaagattttgctgaaaggaccctgatatagctgtctcttgtgagactatgccggggcctagcaaatgcagaagtggatgctcacagtcagctattggatggaatacagggcccccagtggaggagctagagaaagtacccaaggagctaaagggatctgcaaccctataggtggaacaacaatatgaactacccagtaccccccggagctcgtgtctctagctgcatatgtatcagaagatggcctagtcggccatcagtggaaagagaggcccattggttgtgcaaactttatatgcctcagtacaggggaacgccagggccaagaagtgggagtgggtaggtaggggagtggggggggttggggggacttttgggatagcattggaaatgtaaatgaggaaaatacctaataaaaaaaacttacttagaacaaatgcccaacaagtaaactaggccctctctttccttttttaactttttagaaataaagaataacaaagtgaaaaaaaaaatgcattaacttctaggtaacgcatgcaccatttggcgtacttttacaaattacattttccacttaaaacctagggagacaggttaagaaaatgagatcactatgaactccatcagtttagcttttatacaacaccaagttcgtcaaatttaggattgcttaggctgagtcagtcttgatatttataagtgagagaggaggtggcatttataagctgagacagggtgctgattaaatatagaaaaagtattcccactagattctttattcagtcacttacatcacgaggcaggaggaaagggcttccccacttgttggttggctggtagtgtctcatggtggtgtttctgcttcctgtgtgctagtgctcagtgctgatgtgattccacttatctgatcaataaagtctcacgtgcggcctcaaatgactccttgcattgattgctgagtccatgtcactacatgtatacgcaattcaaagtatttcctagttcatctcataattcagacctctgagtcattcagtagtatgtttcttaattcccaagcatgaaggttttctttgctttgaatattttgtattcacatctttctttttttattattaaatattttcttcatttacatttcaaatgttatcccaaaagtcccctataccctccccccaccctgctcctcaacccacccactcctgcttcctggccctggcattcccctgtactggggcatatgatctttgcaagaccaagggcctctcctcccataggtggccgactacgctctcctctgctatatatgcaactagaggcacagctctgggtggtggggggcgggatactggttagttcatattgttgatccttgtatagggttgcagacccctttagctccttgggtactttctctagctacttcattaggggccctgtgttccatccaatagatgactgtgagcatccacttctgtatttgccaggcactggcatagcctcacaagagatagctatatcagggtcctgtcagcaaaatcttgctggcatatgcaatagtgtctgggtttggtggttgtatatgggatggatcccagggtggggcagtctctggatgatctttccttcagtctcagctccaaactttgtctctgtaactccttccatgggtattttgttccccattctaagaaggaacaaaatatccaccctttggtcttccttcttgagtattcacatctttctgttggttgagccacttgcctgttggaaacattccttccttccctcctcatttttatttgtaagtctgctttgtgtaaatattacaaatatgaaaacatgtttttactagtgtttgtatggcttctttttagctcttggagatttatttccttatttcactgactctgcgtgtacatgagtgtgtgtgtgtgtgtgtgtgtgtgtgtgtgtgtgtgtgtgtgtgtgtagtacatgtctgcagaatacccagcagaagcaatgtaatgaagaaaagttcatttgggttcattgttttttgaagattcagtccatcgtggcggaaaaggcttggtactgcagactagttcacatcatggagagccagaggcagggagggaagatgaatgctgatactcaggtctccatttcctgttccccttttactctacccagagccccagccactatgatggtactgccacattccagcctgatcttaccataatgacttgcagaaccgtaatccttaccattaattctttgcaaaactgtcccttcagacacagacgtgtactacatcaatttcctaggtggttctacatgtggtcaatctgacattaaagaggaaataatcacactacataataacagagatgactctatgccgattctgtatagtgttacatcagcaccagaacatgctggtagacctaaaaccactttgatacttattgtgcttgatgctacttgtctaggtttattccccaagtagtgagaacttctatgccaaaaggctcaccaaagaccttcactaaatagtgacctctcctccttccccatggcactaagtcttttcaaagttaatcaatactctgtgtaaaaactattaccaactctggctacttttaaaagtaggattctgcataaacgtaataatattcatcctctgattaaatatacaaaaatatttaaaatataagtattgatatttcaggattggctagcataccagtgtgtgtgtgtgtgtgtgtgcgcgcgcgcgtgtgtgtgtgtgtgtgtgtgtgtgtgtgtgtgtgtgtgtttgtttgtttttgagactgggactcactgcctagttttggctggtctggaactcgatatgtagaccaggctgccttcaaactcagaaagatctaccagcctctgcttcctgagtgctgggattaaagacatgggccaacaagcctgtagtcagttatctcttgatgcatatgccttgatgcataacaaattactctgaaatatagtgcttaagagaacccagcttggaaatgtaaatgagctaaatgcctaataaaaaatgggaaaaaaaaaaaaagagaacccagcttatccccatgattgaattattccccatgattcaatgagctggctgggtaattctgctaggctcaacaagcagaggtcaggatgtcagggatgggcagtctaatgagtgaatgactatggcctgactctctaatcatgattgagtatcttattcatgtagtgtttggcttctttacatgctagagaggcagtgtctctctctctcatggcgacctcttccaatgtcccttagtatcacttctgctgtattgtattggtaaagcaagtcacaaagccagcccagatccagagactcctacctcttagtggcttatgctacaaatatcatggtcatgtcactcttccatagatgaacaagaccaaaataaagacaggtatgctagacagaatagtggccctacctggtagcaccaatccttatacctactaggtaatgtgtaatttatttccctctgacactactagccaaattgtcatctggtccaacaagttaaaaggcaaagttgctaataagattgatgttgatttcaaatgccatcttcaagtgaggtctctggaacccacttccgtatgacttggatacgatttttgaagttttcttaattgttctttacatttaataatttgttagaatgattcacagaactataaattctatccctatagtaacagttttattatgaaggatacaaacaaccagatgaaaagataaataagctgacaaaggctggaagtagggtctgagtgcagtggctttctgtccccaaggagtaagagggtaccattcacccaatacatcaatacatcctccaagcccaagtgttgtgagttgttaatcagagttttattatataggcatgaccgattaaatcattggctgcataatttactcttcatgccttttattatgctatatttactttgcttgttgttatttcatagattccttacttaggaatccatgtaactgtgttacacagaaaaggtgaaatcaaggtcttactagcattccttaaagttagtgattatccaaggatatctgggttctttcagtatataattacttagccctttggtagggaaagggagacaaaagagtcagaagcagaaagctgacatgagaagacccagccattgctgtatgagagattgagtctcattgttgtaacagaataactgacataacaacttgaaaggaggcaaaatgtatttaggttcttggtttttcttccattgtgacaagaagagcatggtagagcagagcaattgatatcgtggcagccaggatgtggcatggggctatgggtagtccccttcccctttgtgccagccaagcctccagcctctaaggttgtgctgctcacatttccctttgttaatcctctcggagtattctcagagatagtgaagaagtgcacttaactaatctagatgcatctcagtccagtcaagttaacaatcacaatttaccatcgcaccagaaaagataaacaagctatctccaaggtccttctgaaagtaataactctatatcaccatgactttaactgttgaaacccatcttagacttctaacctccacagctgtgagataataaaataatattttaagccactaaatttgtcataatctgctgcatcaacaataggaagctaatgcagtaggatttgcaaagaaggaagaaaacaactttatttttatggtgcgggagcataatgaatatataattatagcttcttttttaggtattgaaaacttttttaaagtataaatcagttcacattcttcaaaactctcctacttcgtaaatcatttgctactctttgccatctcaaatcctccatgatgcccaaaattacctaatataactatggaggactctatcttaattaggtgcatctgtgtgtctgatggataatggattcagagaagagaaagacagtcactattcttacaagtaggatatatttgacctcttaaattcatccagtgataatttattcattatcctcggtgtaccaggatctatgccaaacatggctttatatttaacaggagttgagatctaatgcctggtacaaaatgtaattgacagaggggagaatttttggtggggctttttcatagaatctctaatgctgattgatggctttaaaatgtttctcttacccataaagtttcatgtctttcagaagcacaaactagtgcaacaagggcaaagatataatgatataagggcaatggctgacactcagggagctacttcacgactcctaggcctgatcttctccatcgcaccatgttctccatcacagttgatctttaccacagctgctgcattctcttcttttgattgattccttcagctatttgtaatcctaattttttgctccttggctttaacccctttctgttgtttctgatgagtcttaaagagtagaatataaaccgcttgattccatgagaaccgctttgaattgaggcaggaaggaagaacgcttcatttacaggtgtgtgccccagtggtcagaggcgctgagattagtgtggcacagttggcactaatgacacgctggcacccttgtctgggcctgacttctgtcactgcttatgtattcctttaggagccgtactatgtgcgttgcatcaaacccaatgacaagaagtccccacagatatttgacgatgagcgctgccgccatcaggtagaatacctggggctgctggagaatgtgagagtgcgccgggcagggtttgccttccgccagacctacgagaagtttcttcacaggtaagggtggagtacacagcagaacctaacagcactcagaattaccatgaaacagcagcccacattaggccatctgcaagcatctattaagtgaacagaaaagtcaaggaaattgcacatatgagaagttattctccagagtccacattgtccctgagtttgtagcttataagccatggaagaaaattcagtcatattgatggaaatgtgaggaacatggatttggaatcttacccaggactctactgtaatacttccttcccacttgttcctgagccagatgtttcacttctttgatcttatttctgcatctataaaatgaatattaaaatgaattaagaaaaagttcaagtccctggaacataatagatattcactattactatggctgctgatacaggagctgtcattatcctaagttaaacaccgaggttgtgaaattagactaactggtgtgaatcttggatttaccactagatgactgggataaaggacatacggcacttagggcagctcctagctggaggagtcactgagtgtgaaatgctgctgctgttgattcagggatggcaatgagtgactcttggcaaccgggagcagggaaatgttttctttttcatcagtttaattatttgaaatatctatatttaaacattttcaacattctggactatagatctctctcacacacacaaagtgagtatataaatatataggacttaaaccaggggttggaaaggtggctcagtgcttaagtgcacttgctgttctccgtgctgtgtgacctacatgggtgtgatggtttgagtaagcacggcctccataggcttgtatgttggcatgcttaggaagtggtgctacttgaaaggattaggaggaggaggtggagtgttctcaaggaacatggtccagctacgtagttcctgtgtgtacactctgagaatcagaaatgttcccaggaaacatgttagggaatcagcccaggcgcccaccaagaggaggatgcatccagaacatggatagatagagttccttttcagaagttggatggaactgtagatgattatgttgagtgaaataacccacgcttgaaaagagaagtgtttctgtttcctctcatctgtggaatcttgggagaaggtatgaaagcagaaagaaaactaggagaaggagatcaaagtctactgtactccgtataaaagagtctcagtgaaccctgttgttttattcaactaatatgtactcgttaaattgtcttaaataagaaaagcatgtgactaccaggaggaagcaccagccaaataccctgtaacctgagtgatgtgaagagaatctctgtaaagttcaggttcagtatcagagaacaatggctgatttagctgcacattagtgctgcatagagtatggggacatcactgtgcaggcagggtttttagatgctctccctcctgccatggactcataccatgtgtgactccctaaaatgtctgcagacactcacgactgcttgcagcaaaacagactatgatagaagtggtggaatgtcaccttgaggttgagatgtgtgacttctgtcttacacttgcaaaaaagctgtggattaaggagtggctttgagacagactcaaatagcaaggtgctgtttagctgtagaatgcaattcattctcatgggttgacccaacactgcttaattttctcctaggtttaagagtttatgcaaagattcatttgattcctttgaagagagtcctttattcatgagcattgtcagttctgttcttcctcactgtgctaattagacctccagtgttgagaacccgtgatggtagcatcctcgtcttgtgtctctaaagagagtgcttcctaggtcacctgcttacagatgatatttgctatacatttgtggcaagtggccttccaaagactaaggaaggcctaatatttagcctcagtttagtaagaattattatcatgaaggagtgttttagtgaagagattttctttttcatcttatcaggctgatgaaattcacatctcataacagttggctaaacttttgttgagaagattttctgttggacgacactacttttttttccattctttgatttgtgctgtcttctttcctcacctaggtacaagatgatctctgagttcacctggcctaaccatgaccttccttcagacaaagaggctgtcaagaaactcatagagcgatgtggctttcaggatgacgtagcttatgggaagagcaaaattttcattcgaacaccccgtacactgttcaccctggaagaacttcgtgcccagatgctcgtcagggttgtcctcttcctacaaaaggtaacttcatgttttataggcaagaaggtcaaaacttcactaaatgtttttctttattcaagaaatgtgatacagtgtatggtatagtgtggggtctttgagcacttcacctttttctcccttcccacacgcaaaacttatttggctgtgccactccaaaacttgaaagctattttgtcctctgatgtttaaagttaaggatcctgttggcctacttttgcagttcaacatttttttcctcagtttaaatgcttaaaggacttttttttttttaaaatcttgtatttcaccccctggcagtggacaaagagacaccttggtggtggtagtgttcttagtcaagggtggggcagatgacagtcctttgttcatcctagcttgatgcctgtcttagaggccaaagctttttcatgcctagggcacatgaaaatcatatatttcaaaaattgtaccaatatgtttgtaaccatcccataagtaatccttcccccaccactacctccgaggtggatgctgagtccacactcattggctcacacctctcctcactgatctgctccaggctgccttctcattgcatgcatgtatttgttcttcttatccccatgccttttcatcaaaacttccacaataataaagaaatgttatatatgtgaacaaggcctagtggctcacacttgggatcctagcactcaggaaactgaggcaagaggatcaccatgtttgaaacaagcctaaactacatgatcagtctgagccacagagaaagtccttgtctcaaacatgagtgtgtgtgtgcacatacttctatgaagaagttcggggccatagcatgtatataattggtatggccaggttcctattcagagcaacaaccaattgtacaaccactacctccttgttatccgcatgagagtgactgtgtacccatattcctaccagtatgatcttgctccctacattttatcagactgatgagtacaatgataagtatttcagagttgttttaggttctatttacctggttactgttgaacttgaacatttcagtaattgattgtttggggaggggaattactgcaaattgcctatttatatttctttgtaatatttttattctttgaaaatttcatgcaatgcattttcagcacacacacacatgcatacacacccatgtacacagacacacacaccatattcaatcatcatcaacttctctccttacctcccttcctaccccgacaacctttcctttgaactgtgagattactttttttcttatttttcatacctatcaggcccagtttgtgtgtggcctagggagtcttaacctacattgatatgtggtcagtctatcaggccacatcactgaaggaaccatctctcctcccagcagctatcaaaggctattagctcctcagcaagtgatagaattgcacatctaccttccttagtgctgaaattatgtttgggtatagcttgcaaaggtcttccacacaccgtcacatatattacgttcgtatgtacatttatcctgttggatctggaaaacattgtttctttgatattatcaacaacctctggttctcacaatcttttggccacctcttctacaaagattcctgaaccttggagggagtggtgtgatacaaatgtctgacttagagataagcattctgcagcctttatttttacatgttagtcagttaggggcctcagcactagtttcatctactgcaaggagtttctctgatgagaactgagatactctaaaggtatagcagtgagtcattggaaatcaatttaatactctgtctatttagcagattaatagtatcgggttttcccctagggactatgacctatctatccacaggttgttggttcctatagtagtgccagatatgggttccatctcatagagcaggcctttgatccaatcagaaagttgttgatcttgtctctagctgcatatgtatcaaaagatggcctagtcggccatcactgcaaagagaagcccattggacttgcaaactttatatgccccagtacaggggaacgccagggccaaaaagggggagtgggtgggtaggggagtgggggtgggtgggtatgggggacttttggtatagcattggaaatgtaaatgagctaaatacctaataaaaaatgggaaaaaaaaacagtcatgactattacaccagtgcgcctatgttgtcaggctagctgttgtcaggccaggctcacagggttcgtgcttggtgaggctgatgcttgctcttgtcctctggcatcgtgcatagcgcttccaggactgtgacaccaggctatagaaatggagcttacaaggtagtaccagcttgatgtccccatgtcctgggactcaagaatgtagtgtcttcagcagtagggtcttactggtaagttctgggggatagccaggagcgctggcaatagcctgtaatgcttggggagtctgtgtgaccccaacagccagctctaaaagagttaacctattcctggtcctgagttttttatttgctagcataaagtatatgtttggggcattatctccctattgtgggtataattccaataaactacttcatatatatatagttatacattttatgaagcttctattgttttaggtcttttgttcatttttcttcaagttggtgtcttcttgataataagtaagaattccttgaatccaattcttaacatggccttatagccacttttgacattataaatatagtctcctattttattttatagacattaaaatgaaatgtatctatataatatgctttgttgaacacgggttctttaattttatacttttacatattattctttatactctaggcttttgaatttcacttgagaagaattcccttgtcacaaaaatattatgtcttctttcaagaattagatgaatttctctcttacatttaggtctttaattcttttgtaatatatctattaaatggtttcacatgggaatacaatttgtttttctttcatatggttggcccatcttcttcttgtgaggtaagcccatcagagaccaccacaagaacactctgaaagacaaaaagcaagtctttattgccagctgggggctgcatggagaacttgtccagattacgcagccccatgccttacagcctttggtcttttctgcaataaacggcatcctggttgtcacacttccattagtaagaagcagaacaactcaaaagctaaaaggcaaggttaatacatttagagtatttcctggaactacgggccaggtctttgatgaactaagtcattgctcctaggttggcaagtattaggacctgcatgctgggtttcaaggtcaggatggttcctctaacatggcatctgttatactaaggtcttggcctcatacattctcacactatctcctgcatattccttttcctttgatttttggagctacttataactcgtgttgaatatactgttttccctggtgcttggttctgttctagtttttgtatttgtctttctttatattaatcccacacagcttttaccacagtatgtcttagtacccagcttcttaagttgtgagttataacccggatgtgactaagtaactgagtgtgggggtgcaaaacctttggtgacactaaaaggtttctgaacatgcagtgaccaaaaatgaactcagaatcactctgaggtgtttgaggcaaggctcactcatgttacattgtaaacgttactgcagctttgactcagaacacctaacatgcccacattgcggtatccaagctattccagcaccagccaatgtgcagcaataccttaggccagatttgaaatcaccgtgtgctgtgaattgtagtcagtgtcacagtgcattttgctgcccttacagaaacacagacaatattttcacactgtcactcttcagtgtgtgttgaattagtgtattcttagattgcattctggtaggatgtttgaccttagaaattgctgtttgggtggctgatttttctttaaaaaaatatggttaatgctgggtataatggtaccacacctttaatctcaacacttgggaggaagagtcaggtggatcttttgtcctgggctacacagagaaactttgtcttgaaaaacaaaaacaacaaaaaatggtaaatgaactttggttccttatgtgtatttcattagtatgctaatttccttccacctttaataaatgacaaaatatacgtatcccagagcgttgttttaaaataaatttctttgttgtttgctattattaaatgtttgagtgtgtgtgtgtgtgtgtgtgtgtgtgtgtgtgtgtgtgtgtgtgtgtaactttctcaggtgaagaaggtttacagtagggaacattgaaggaaccctgccttgatgtattgtaggataaactaccttctatgcttttctttactgagatagattggtctatacctttatcctgcaataaaaattttaatgtgtgtaataggttcattaagcataacagtaatctttattagaattgcattgaatttaccgactctcttaaaatgattaacatttgtgcagtgttaagtgatctattgtgagtacaaaataggtttattaaataaatcttcattggtctttaaaccaaaagaggtcttaggattcatgattaattcatagatactttactattttcatgctaatggatttattatattttctacatagtaatgttggttcagagaataatattgttttatgttgggttttctgcatcaagaatgaaacattcatttttttcttttctttctttcttttcgagacagggtttctctgtgtagtcctggctatcctggaactcactttgtagaccaggctggcctggaactcagaaatctgcctgcctctccccccacccgctccaatgctgggattaaaggcatgcgtcaccattgcctggcaaaatgagacatttcttaattcatatttgtaactcattttcctggctatgcagacataaaattatctcttaccttatagttaccaatgtgtttctgagtcttggtctctattcattttgcatggaatgcaaaatcacttttaaactagactacaaaattctgtttaatctcaaacaatttctttgtactaattgcattttgggtattgtctttgcccacttctgtcctccttcttatgagtgactatgactttgggtctttattttctgaaacactgaactatttccatgcacctatcacagatcctcaagtcctttccccttgcttctcagtgctcatgtttgagggagcttcatggtggtgatggactgaccggttggtggttttcttggttagtttctttgaagcaggatctggctatgtagctcaggcttgagttcatcatggtcatcccacttctgccttcctagttctggggaaagtgtgtgcccatgcccacctgtctgttgtgattctcttgctaatttttgtcttcttttagacctgatactgtatttgatctgtcctttgaaacaatctaaccatcattgaagttagtctgttcaggttcacttccttaggaagacatctggaagggacatttgtgtgagcatgactcagtaattgtgttgaggctgtgtgtttccttttgtttgttgttatgcttgcctttacttgagacgggtttagtatgtaggccaagctaacttgatactcagttgcacagatattgggactataggcatgtgccaccttggcagttagctttctcttgatctttatgatgacctgtgagtttttattatctgttgtagaatcagttttgataatttttttccttagaaaatcatccaggtccttaaatttaattgagtagacttgaacctgtttttcttcagattcttcactctctgtctgcagtcaactccttcttatgctcactgtgttctctcctcagctttagttttgattgttggcccccaaggaccaggtttccaacttacttattctgtaattttatcttatcaagtctttttaacctgaaacagaagtgaaagtgtcttactccaatttctttcccatgtgttaatgacaaactatgaaagttgttctgggatctgcttttcctctatacaagactagctattacatatgtgtgtgtgtatgtgtgtgtgtgtgtgtgtgttgtatgtgtgtatgtgtgtatatatatatatatatatattgtgtgtgtgtatatatattgtgtatatatatatatatattgtgtgtatatatatagtgtgtatatatatatattgtgtgtgtgtgtatatatatatatatatatatatatttagagagagagagagagagagtgtgtgttggattcctttgttcccagtagttgattttttttaggttttggttttagtttgtttatttgtttgtttttaagataatcactttagcataggagcacataactgtgatctcagtacttggaagacagaggtaggaggttcacaagtttgaggcaagcctgggctacgtaatgagtttcaggcaaagctgagctatataggaagactgtgtcaaaaaatcaagagctggggatgtagctcagtgctgacctaatctgtacaaggccctggtttcaacctccagtgcacacacacagaaatgtgggggccagtgagatggctcgtgataatgagcttgactgcccgatggaagaagagaacaccctgggttgtcctctgactccacccgcacccacagtgtgtgcatccacacacacatgcacacaaacacaacagaataagtaaatagaatgtagtcattttctacttctaaaccttcccaggcagtgcgtgctttatgtgtgtgatatctcactttctgcttttgtgagcttttacttctgccactgctcaaggtcacagtaggaatttagtggcatttatcatcccatacatttatttacttttatgtgtactggtgtgttgctgtctgtctgtctgtgtaagagtgtcagatcccctggaactggagttgcagacagttgtgagctgccatatgggtgctgggaattgaatctgggtcctttggaagagcagccagtgctcttaaccactgagtcatctcttcagccccatactgtaaattcataattgctgtcagcatctgatacttggtcttttaccatctccagctggctggagcctgtgtctttacagatgattagggacagcctgggcttgctgagagtggagcatagtactgtacatcaaagcacagtcaacataccattggccatggttcctgctctcagtttagaatgttgttcaagtatatttttaaaacttgctataatgtattaattataagtgtttttataaagtagcttttcgttttttaaaataacacttcaaaggtagccaagtagccggtgtatcacaaggactgtccttgctggtctgtcttggttaaccatttaactttatctgtatgttcttgcatttatttgttaacgttgggctgtgtattgcatgcgtgcatgtgtttggggaggggttataataaaacccccatcacaagaatgatcttatgaagaattaggtagctcattaacatataataaggattgtgaattctggaacttgcgaataaaatagctgttgattataagggacctctgaggtttgtgtacagaattgcacaaactaaccacaagacagactgtggacagaatcattctccatccaggattctgttgcccctgcagcccgtttgccccctcctctcaggagctgtgtactgtgacgctttgtcgagtggtgatgctttgtccagtgatgtctttaaggctcctctacacaaagacctcttccttccattgaaatgcaccacatgctttgttattcctcacattaaaggcaaaataactacttctcaaaagttacttttacccttaaagaaacaaaccaaagagcttcctaaaatggtacctggctgatggatgctcttccaggtactctgtatgcttcctccatcttttaagaaccttgtaaacaagtccgtttggtaactaaggaaactaaagttctagttaagtagatgggtggaggtcacacagatgatgaatgctggaactggaatttgaacccaggaacctgcctcccccacacacaaggcacttgctcaacagtgatatcattcagggtgccctgttgtgagcaaaatcagctgtgactcacacacttgaaggagagtttgtaaaaccagccacaaaggtgatgaggaggaggctgatggagttggcacaattcctttgtcaaaccaccttagacatccagcagtgtctgaatcattcactgtaaaacatggggctggggtatgttcttcatgcaagtggaggaaaaagttgatgtcggaagcatgagtcagctcttgacatgaagagtaatgcgacgtggtcagtgagtgctggatcctgcagtgttctccgagagaagagatctgtgcttgttaaactgtcttgtgagccaccaatgggataggaaaggatgcggatgccaactgacagagcattggctgaatgacagggttaggatctgagacaccagctcaacccaagcagtcacaagagtccaaccctaagccctttaagagcagcttggacagatcaggcaggccccctccctacccccatacccccagccccacaacccccacttgctgtcagcttcatccaggcaggagggcggccttctccagcagtgttcagctcctagccactggcgcagggctctaagagcagcactagtttctcaggttttgtttcgactcggctggggatgatgatggtgatggtgatggtgatggtgatggtgatggtgatggtgatggtgatgtatgttttttctgaaaatccctgagatgggttaagactaagttaaggggtgaacagcctgcagattgtttggctcattttctaaatatgaaacacagagcaatcaaactaaacaaagctatagttacaaactgtcagacatgaatagacggcgtgtttagaactagaaccagatgttcacccaatgggaaccagtgagggctaggctgtctccagatcactctgaccctatgagcaatactgactccagtttctcctttcttgggtccccagataggcataccaaccaggaaccagaacacaggcttatctctggaggtccagagggctgaaaaacagacctcggtgctgccgctttggctttggggctcaagcatgtagtgtttggttccaggccaacacaccaaatattggggtctgaaaaaccaaaataacccaagcagtcacaagaatctagaaaagcaagatctttatttgaattgggcagcaaaagctgtcagccagggacaacagcacagacttgggaattgactgtgccttcaaacgttcatcttagtattaaagcagatgccaaaattttattgtactaaagccactactgattagtgagggcagactggggagctgaactgtgaccctgaagagaaattgtacaatatttgtaaaggatggaaccccaaagcaaggggaagcggggcaggctgcagcgttttccagtcatcttttgatacagtggttgaacaaggaagtaaacgttggtgactgggccttatcctggtcacatggtttcaggatcctcaagtcagcttttgcagtcagatcccctcctggacttctgaccaggaatccggaatgataagggaacaaaggagtgggcaagctgcacatagtcaacttaagtcagacaggcactacattcatgacttgcgcgccttagtttagatatctgcagcttccctctttacactctgcactggttagcagactcacagatccactgcttggccttgcctgagtgttgaaagaagtagtgtccctttgatcagatcgtcgcctctagctatcattgtagtacccttttaatgagtaataagcacccaggtttcaactcacgcacacgaacacgcgcacacacacacacacacacactgtgttaacactcagaccagtaaggtaaagagattgtgatgccctggggtacatagtcactgccagaggagctcagtgagggctccaacctaagccgaggagggaaagaaggctttgctggagagagttacagaagtttaccaaaatgttaactttttctagatctattttttacttgaaaatgtgtttctactaatagagtaaaagagggatatggaaagggaagaataaatcttaaggaaggcaagggatacatgtgacatgaaagtagaggaaggattagctgggaagaggaaaggaccagcaagaagggacagggggattaagaaaggaccttgggagccaggcagtggtggcgcacgcctttaatcccagcactcaagaggcagagacaggtgaatctctgagtttgaggccagcctggtctacagagtgagttccaggacatccaggacagagaaaccctgtctccaatcaaaaaaacaaacaagaaaggagagtggagcaggggtgaataagaacaagtgagaataaagtatatgtaatgatataaagcctatcgcttaatttggagggcattgttcatttgtttaagacagggaccttgtatagccaagactggcctcaaactcactaggttcgttctgagctaatgatctttattcctgcacctctaggatgctggagttgcaggcttgcattgtaacacccagggaagtccattattttgtttgctgtctctgtgacttttctattgctgtgaagagacaccatgaccaaaacaacttataaaagaaaagtgtttaacttagtggctgtgattccagcagtcatggagcaggggaacaaggaggcaggcaggcaggcatattgcagaagaagtgcctgagagtttatatcctgatccacaggcatgagactgagatgcagaagtgggtatctgagtatggtgtaaacttttgaaaccttaaagcccacccccagtgacacaattcctccagcaaggccatagttcttcctaaacaattcaaccaactagagataaagtattcaaatatatgagcctgtagaggccattctcattcaaattaccacagtaatcttttttgttgttgttgttgttttgttttgttttttcgagacagggtttttctgtgtagccctggctgtcctggaactcactctgtagaccaggatggtctcgaacttgagatccgcctgcctctgcctcccaagtgctgggattaaaggcgtacaccacaccaccaggcccagcaaataatctttttttttaagaaaaaatacatttatagtaaagtaagatcttaatcagtagtataccaacagtttatacaggtggaactcattagagctagatcattgacactaaagtaaattagtcagtgctaaggctcatgggtaaaataaccttatgacaaatataagtacaaagtcttatacaaaaatattccatttttttttcttataacaaaactattcccagactattccttggaatgactacaattgtcctttctgtgctgcaggagagctcttacccctctcccacatttccagataggtgaccagcttgcactgcagcaaggacgttcacttagcctgacgctcagtcttctggccagcacgagggtttgctaacagggcataagagctggctcgtgacttcttctgccaggactgctcattaataactgctagttaggttgcagcctcatgtagtggcacattttggggactgggagaggggatttgttttgttgttctgttctgcttttatcatggctaaaacgtttgtttcttacattcccctgtgcacagttttcagcagcttgatttgctgtttggtgtttcgtttgacttttggtttgttttggtagcttttgctttgttgttttggtgtttgttttataggtttctggttttttgtttgtttctttatctttgtttgatttttggagacagttgtactatgtagcccaggctagcctgcacccatcttcctcctgtattagctgccccagtgctgggattatagacactgtgtcatgatgctgccttaacgtatcatttcaggattttctttagagtagcacagtgatcatttatttaaactttgtacttccttatgttatttcattatttaaaacttcccatataactgggaattgaggttacacgtctttaatcccaagtactcaggaggcagagacaggaggatctcactgagtctgaggccagcctgacttctaggccagccaagtctacacagagagaccctgtctgaaaagcaagctttagtttacaacttacatcaatagtcatgaatttgcttttcagtttttcatcatttcacaaaaagcttcagttaacaattttgtacattttctcttaccttcaagtaagcctgttctttgaagaagttgcttttattgaagaccccagagagttcattttagaaacatctgcatattgtaggaacatgcaggcacagatccagttatctataagaatgttgatgttgccaggtgggggtagtgcagactttaataccagcactcaggaggcagagacacatggatctctgagttcaaagccagcctggtctaccaaatgagttccaggacagccaaggctatccaagacagccaagaaaaccctgtctcaaaaaactgaaaacatcaacatttactgtgttggtctctacgtctgtacacttgtgaaggagtaagaattttaaaatccaatagcctacttcttttcttagggaattattttgttcttaaagtatctcttatgaggatttcagcaatgccaagggttcccttggaacactcttttagagcagctgcctcaaagcataaactcatactagaaatgctcaattgtaaggtgtgaacatttttaaatatgttgaagattacccaattgctttgctttgtggttggtttgtttgtttgtttgtttgtttgtttgttgttttctgctgcacactcaggctagggggcccatgagctctgggcatgattctgtcttcaccttccgtctcccccacgggagtgctgaccttcgctttcttgcaagctcagctgtagctgttacgtgtttatacatcagtagagtttcttgccatattccatggaaatcataagagaaaagtagtgtagtcagttttggaattttaaataaaagtgtatcaaagaggaaacagtagccaatttacgaatcttatggcctaagtcacacagctgagatgagaggaaattatcagaccatgagagttgtttggggttcccattcttccaagttggggtcatagatagctaatgttgtgaatgactgagatagaaggtatagtcactagcacatatttccaggatattagcagtgtaggcatgatatgtttcaggtatgaatgagacattcaagtagaaatgactggcaagggggctggagagatggctcagcggttaagagcactgactgctcttccagaggtcctgagttcaaatcccagcaaccacatggtggctcacaaccatctgtaacaatatctggcgccctcttctggagtgtctgaagacagctacagtgtacttacatataataaataaataatttaaaaaaaaaaattaaaaaaaaaaaaaaaaaaaaagaaatgactggcaagcagttagtggtgaaaaggaaggaagaaaggaagtagcagttttctttttgtttgtttgtttttgtttttgagtttctctgtgttgccctggctatcctggatgtcactctatagaccagactggcctcaaactcagagatctgcctgactctgccccaaatgctgagattaaagacatgtgtcacacccatgctacacccagccagcagttttcaaatatatagtcaccagtgtgttaaggtagactatgataagcacaagatacaggagaactagatacaaggaacagagtcctccagcaaggaagtatgttggacatttataataaaacagtatggaaaagtgtgtgtatgttctcaatgaagaaaccaaggcatgtttgtcttctgaaacatctaggagatttcagctactgaatttgaaaccttatcctgcatatattactaagccatgctattagaatagtattgctatgtacaagtcattgatcttacaattctgaagaaaatctctaagatttattatataagccaacaactgatccatttaaatatgcagccacatctgcaccttgacaaatgacagccttttagaaaaataaaaaggcttcagcagaaattatcattgaaaccacaaggcattcttgctttcccgccctcagcaccctcctcctccaccacccaactggtgaataaaatgagaaaaagcatatttggaaaataatgatgatgtgtcaaaaccaatttgtctcatccttatctcctcctagatatggccagtgtcatctgttgcccttccacagcccacttcccccgctgtcagtaagtgtcctttgcctcccttccccaacccattcccccacattggactccgatgatttgctttccagaaagagcagcaaacccgttgcctgggtgatagctcattactacggcaaccaatttggtgcatcagtatgaatcccaattttaaaatgtaattatgccgagatgtgtacatatgcttcagatttacttaaaagaagtctgttccccgttggaagaaaaacgtttcctgtgctagatgaaagaaggggaaaacctttattttcttctctcgggcggaatacacctctcaattgagtctccactgtgtcgggaaaacagcttgctttgtttttttttccctcaccacttttgttttaacttgagatgttccctttctcagacatttctctcttgagacctgtcactcacagcccaacagctggtgtctccatggcaacggtgtctggcccctataggtggtatcagagaaaagggggaggggatggaagcatggctacattttcattgctcttttcttgtttaattgctgcaagctgaagagattgactctttgtaaagcattcattaggaaaaggaaggggatttagtgaatagatgtttacacgaaatcacaatattcctgctaccccgtactcaagaggagcaagctcatgaataagaagtgtagctggaaatgtgttcaggcacggggaacaaaagccatccagttgctactgagcaattcatttttgctccttccccaacaaaaataattgttctaaagacacaaagggcatatttgggtgcaaggagtatttattttagttgcctgccttattaaacatgcctgctaaatcaggtaagccttgcaactcattaagtttcccctgtgctgaagctgctgggaagcacagctgccgaagccatcttcaattcgggctttctaacagacgtcttctcctctcctgccttcacctctgccccactgttagctggccttctctggttcttgtgacgatcagaatattttattgtaatggctgttcatcccttagtgaaaagtaactgccacttaaagtatttttagggtttttttttttcgtttgtttggtttgtgtggtggagttctgtttgtggtgtgcaggggatggaacccaggcaggcctcaacatttgcaaggcaaacttgtcttaacattgaaccatatccttagtgcaagtttaaaaatatactccctagcatatctaattttttttcacatattaacctaagaaaatgtaactgtttatcaaggtagctatataagatacgtgtggtttcagtctgagcatcgcagggtgaggtacctttgtttcctttccttttgcttagcaaatgtatgaaatactatcaagcgatatgcgcgagtctggcatttctagtgtagctgatctggtgagttccaggttcagttagactctcaaaccatcaggtagaaagcagcagaagaagacatcagtgtcagccgttagctttcatgtgcatgagcacacctctgctcacccatctacacgcttgtatacaaacatggatacctgcctgcgcacatcatacgcataggaagtggtgagaacttgccaaggaataacttagcagtataattttttaaaaatctaaaaatgttttgcctcaattctagctactatacttctagtaattaatattgagaacatttttatttgtaaaaaaaattttgtaatatttcttatgaaagtagaaagcggtggaaaaaattaaatgttaagacagtagttatatatattatgcatttatgcagcaaaaaacagctattaacagtggccttgtaaaaaattaagaatatcaaaatgttcctgataaaaataactactgtaccacatgatattaagtattattttctcttggctgtgttgttcattctggaactatctgcttacatactcatcatagtgaagtggacagagcactcattgggggcaaggctataatcttacgtaaagaaaacttaacagtatttttattcagtagttttattggactgtcttaatgttgtcaaacatcatggtctatccaaatttagtagagtaatgagagcatgtacttttttttaaaaaaaaaaatctaattatatcaagtgttgtggtacatgcctttaatcctagcacttaggaggcagaggtaggtgaatctctggtctacatagtaagttccaggacaaccagagatacatgatgagacattgtcaaagaagaagaagaggaggaggaggaggcagcaaattgtaaaataagatgtttatttaggatattacatttaaattaggatattgaatatagagttaaaaaataatatattaactcaggatagtcaactatcctaaatggttttattttgtctttgtatggctaggaaatggaccatttacagaaaatgagttgatgatgaatattctcggagaaccaagatataatcaagtatttatcatttaaattcacttttaaagactaatttttgagtttattaagctttaaatgaatagattataaataggaacaacatatagctctacttttattattttggcctaaatttttaattaacattttattacaattaacacattttgaatatttaagtaaagatgacatcaacccagtcattatccagctctctcttatgcacagttttaaaactcaaagccatgacgtatacactgtgcataggtattctcatacaaaatccaacaacagcatgaagatgtcccgcccacactgagtgaccttctaggttttcttccttgactcttacatgtacaaaactgtagtctgagtttcagtgatgatgctcatctattcataaacccttccatctcctaaaaattaaaagcagactcttccagcatctcattcaaccagctgcatctcctcccatgccgtgggctgccattgtctctcgccactgatctgcagacacaacctgtactgcgtacctcatcaccatgcttttacacatgctacctgccttgttctcagtgttcttcaaatgacactgccctccaccagagcctcccagtgaaacattttaaatggccatctttacttctctccactgcttgtcatttgtggggctgagatgatgaattcagtgggagggaaggcccttgagcctgatgttggttacaagattccggctttctgtcatcctcacttctgtctctaaatgatagaggtgggtaaagcaggcccatgtccggtgtgagtaggacatgggggtctcttacattatgagttgtaagcaggactgattcaaggtcatttctttaaagctgatacttgctttcttgagtgagcaaaacatatgttctagggattgtatgacccctgggagtgtgctgtgggtgtaaatgccctaacgtatgttgtaaatactcagggcagagaagctcttactcagctacgtgatttataagaatcttgctcaaaagaaaatgcttattgtcctttttaatgcctgtacttttcccccagtgtctaagtcttaagccatttattcctttgcatgtatatcttcagctcggttagcagtaggtcagcaggaatgacacgcgcaagtgtacattccacgggaggccacccacacattgcctgttacaatgttacagatactagtgagttcttaacaactatttgtgtacgttcggcaataccaagcaaatgaaggaactagtatgtgcaagaattattcttgactgagaaaatagtcttaaaggttttatgcttcctgagttgaagagtcacaaaccttgctgatttctagcgtccactgtggttcttccgagccacagagggttctccctatagtctactgtaagacattgagttccagtctccactccataggacagcgtgcttattagatcacgtgtgcctcagttttcttaggtgtacaaggaaaataaaaccgtacttgggggtatagttacaattattagatgagtcagtgtactcaacatagtttcagcactctgtaagtaatttacttactttctgttgttattaataccaatattgctgatttggacttgaatcaagttattgccatagctatgccatataaccatgtgaattagtgccaaagactgctggaaatgattattacaaatgcggtggcttaaaacaacagaagtgtattctttcatatttctaacagaaagttttaattcagtttattgagcaaaaacaagcagagagcaagacagtgctctctccaaaggtggtgaaggaaatcagtctcctacctcttgtggcttctgatagcttccaccagtgtgtggcttgtgggaacatcactccaatctctattcttgcatctgccctcatggaaacagtgctgtctgctcctgtacctcaggtctcccactgccaccgtcttgtgaattatgggactgcatttaggctccagccagataatccaggatattcaacctgtgttaaaagctttaatcatataaactcttggactatttattgccattaaaatatgtagcgtattaatatcaacaacctcttaaaaggtctgcctataaatattgtataatttctttggtcagaaacatctgggctaagttgcgtcacctgagtcaatattttcttcagtgctgtttagcaaaccaactgtctttggtctatttacctaacaaataatttacagaatggttttcacttgtagagtcatgtgcggggttcttcgctattcttcaggaaccctgtctagcaaaactagagggaaaacctgagattcatctctcttaagagagagtgggatctagtgggtaagtaacccctgacctctgcagtctgcagtggggagtgtttgtgctcctctcggaacagacaagcaacacggaggtgtttttcagttgcatgtgcctcctaagtgaaaaacagaaaataagtcattgtaattggcacagtagaaacctccctgggtggtggtgttctgaaaagaaacggcagcttcccaccaggcatgcgctctccgatttcctgtcaaccgcagtatatgaaacagaaaaggtgagagaaatgatcaccacacagtggccagtgggatgtacaacccagagagcttaaaatatacctatgtcagccttgtcttctcaggcctctctatgaaaagaacacgatcctataatccacacatagcaccaacctgcatgtaggtgagactggtccaactccaggtacaagaagaaacaaattctgttatagtcactaagttctagggtagtgcaataggctgaataatggactctaaaagatgtcttctttctaatccctgaaacctgttacctcagttgggaggaaagtttgcttctgcacatgcactctgtttccatttttattggatatttccaaatgtaaagaaagtcgagattcttttttttcttttcttttttctttatttttttattagatattttctttatatacatttcaaatgctatcctgaaagttccctataccctccctcctccctgcttacacaggttcaaatgagagaatctcagaatccatggccctttggaaggacagagacctgctgggtcacctctccagaggggtgtgagtgagaaattctcacagcagctgtaataacgctggggctttgttcatggccatgtcttctcatgaaacctctaccaaaagcatcagagagctagctaatatagtctaacccaaaaatggcttcttttttggaatcagaacttttaaataagtttaatatattgtcttagttagggttttactgctgtgaacagacaccatgaccaaggcaagtcttataaaaaacaacatttaattggagctggcttacaggttcagaggttcagtctattatcatcaaggtgagagcatggcagtatccaggcaggcatggcacaggaggagctgagagttctatgtcttcatccaaaggctgctagtggaagacaactagggtgaggatcttatacccacacccacagtgacacacccattccaaccaggtcacacctattccaacaaggccacaccttcagatgatgccacttcctggtccaaggatatacaaaccatcacatatatatattttaattttataaactttatttttaaaaacttgaaaataaaaaattcatacactcctatatatgaaaaaagaatatgagctggtgagatgatggctcagcagttaaaagcactgactgctcttccggaggtcatgagttcaaatcccagcaaccacatggtggctcacaaccatccataatgagaaacaaatttaaaaaaaaaaaaaaaaaaaaaaaaaaaaaccaccaccaaaaaaccctaggtcagagcaagcagggcccggagtgagcgggacctggagtaagtagaagtaagggggggtggggggaagaagaaaaaaagaatacataatttaaaaaaatatataatcctaagaatagaagttcactgaatcatataaactttaggtctagtcaataactttggtatatgatgtgatgttattaattacagttttattaatttcaaaaccagtatagaactagtaaataatttttgttattttggttttacagaaaccaaacaacagaagtctagtctcccccacagtctcatcctctttattcaagtgttaaaaggaattttctcataggccctgtgaaggcaggaaaaattacacagtagagctcgtggcttcctcctcagtcatttctctacaaaagggagaatagaggtctgcattttccttagtcacttgatgaatgacacttgagcactgaattttgcccccacccaaaataatagttctttattaaaatcctaaaactgaaatgaacaggtaggtaagcaagcacttaatttagaatctctgcattctatactgggaaccagcttaaggtaaagattttgtgttttgaacgaaatccttctgctgggaaagcaatgttcaacgagactcagacttttccatttgtcactatgtcaggggccagtggtctttcaagttgatgtttgtctatgctagactgctctagagcatgctgttagactgctctagaactgtggctatcaacattgctgttgaagttctccattgctgaagaccatgactgctgccaagtctctactgtcctgaacgtttgtttctgagtggtttggctcttcctcacggctgtgtgacggggtgaatttttctttctgtgttctgctaaccacacagttactgggccctccctgcaggtcagactctcatgaccttttctcagacaagcaactctcatgtataataaatgcatttgttttattcagaccaataatgattcattcaccatcaggcactctttgaaaatccagtcctgaatgaagcagaaatagatcttgtctttgtggaatataccttctggccaagaagtgaagcaaaaggtgtgaacaaagaaataacttcagcttatgtaacgctgtggaggaaggtccctcgggaccaggatgcatggagccaggatgctctgcaaagacctctctaaggagagctgaccctaggactagatcaaagagaacagggaatggaccagagaaacactgaagcaaagcctgcaaagcaagacgagcatctgaaggccttccctgcagcctgctggctgggtctgcccgcccaccaccttgcacatggctgttccttcaaggctcagtgcagcagggcttatctccacacagggtgtcagctggagcctgggtttggatttagttctctgtaaggacacctgagggcggctatgagggagttccatgaaatattcatcacaagcagtcaagaggggtgagaaaaaagagagaggtagattttgatgatcctaatgtaattctcaggatcacaaacagaaatggctataggcaatttagtgctggggtttattagaaaggccgtctgaactggaggtaggtgttcctgactttgcatgaaactcctggcttggctggtgtgttgactggcagactctccactatagcttaagtcttctatagtcaaataactgtattatgtgggtgcacacatctgtgtatctgttcatatcagttcatctccctgcctgtttcccagtgacttccttttcctcagcggcttttacatctgtttcacagagatttctcatggtaatttgatattaacccttcttagtccctgaccagaaggagcctattagcatcctgcccactcaccgattatgcccatctgctgtacctgacaactaatttgcattccaaagaatctagagctcttatgggcatgccacacttttaaatcatatataatctgtagaatgcaccctactaactgccattcctggtgtgagcatgagagaaaagaaagccctggttgtaagccctttcatccctgtgtagcttgtatcttaagaaaagcataaaaattattttatggacatatacttgatttttagactaggaacagcatttctaaatatagcagcaaccagagaattgagaaaagcagatgttgacagctgttcctgccccaaacttaacactcttaattctcaaagtatatcgctacacagaaacagaaagtgcagttcacattggcacagagaatactaccttcttgctccgtctggcgccccctcatggttgtaagattggaactagcaacttcagcaacctggcttactgtttcagagagacactgctaaatccttgggcagtttcagaagacacaggagtggcgttttgttttgtcttagttttcctcagaaacactgagtaaaattcttgtcatattttattttcatgaactaataactatatcaaagttgtcgtaaagggcaaagtgtagtctcaggaaatataaaagactagctggttttctatacaaaaacttctgcaaaattttactatgtaaaattctaagtacaggatggcttttttttttttttaaaaagatgaagaaacatgaagaaacagtttaaaaaaaaaaaaagtcaagccaggcatggtgctgcaagcctgttattccatcattcaagaagtgggggcagggggattctgagctggaggccagctgggactacacaaggagaccttatctgaaaacattgggtgggaggatgctggggaattttttggtagtttgtgaggatcagagttcggatttccaggacccatgtaaaatgctaagaagttgggtagggtacctgtaactccagccgctgaaggcagaaggtaagagcaagctcactagggaaactagccgcatcagtaagctctgggtttgattgagggaccttgctccaatgaatgggttagaagaacattaaggatgattctctgcatgaacacaggatgagtaccagtgcactgttttccatcgcctcctaggccatggcaagagagacctttgagataacgtgtatgtgttatcaggagctgttggggtcggtggtagattccctagatggtcagctttccagggaagaacctgaagcctctccctgcagagccggccagggagctgtccacctcgccagtgctggattcccgagcagcaaccttgctctgcagtattggacactttatacagttggagccttttaaaggggtttgtagtaaaacaatactgaaagacatggtggcatacacctttaatcccaacactcaggagacagaggcaagtggatctctgtcagttctaaagcagctagagctacatagtgagactccatgttgaaaaagaactaaagtcaagaagtaggcttcatgacactttcaatcaaatatattgtgtattttgaccgcattcactatttcccccttctgccctcctccctactcatttccatccttgtcccaaataggcccttctacatccgtgtgtgtgtgtgtgtgtgtgtgtgtgtgtgtgtaatgtgggatccacattgtatttttgtgagtctggtttatttcacttagcatgtgatctccagtttcattcattttcctgccatcatcctgagtgaggtaacacattcacaaaggaactcacacaatatgtactcactgataagtggatattagccccaaacctaggatacccaagatataagatacaatttgctaaacacatgaaactcaagaagaatgaagactgaagtgtggacactatgcccctccttagaattgggaacaaaacacccatggaaggagttacagagacaaagtttggagctgagatgaaaggatggaccatgtagagactgccatatccagggatccaccccataatcagcatccaaacgctgacaccattgcatacactagcaagattttatcgaaaggacccagatgtagctgtctcttgtgagactatgccggggcctagcaaacacagaagtggatgctcacagtcagctaatggatggatcagagggctcccaatggaggagctagagaaagaacccaaggagctaaagggatctgcaaccctataggtggaacaacattatgaactaaccagtaccccggagctcttgactctagctgcatatgtatcaaaagatggcctagtcggccatcactggaaagagaggcgcattggacacacaaactttatatgccccagtacaggggaacgccagggccaaaaagggggagtgggtgggtaggggagtgggggtgggtgggtatgggggacttttggtatagcattggaaatgtaaatgagctaaatacctaattaaaaaaaaaagagatcatctcattcttcgtgatagactagaattccatgtgtgtctacaccatgttctgtggctgtggacagtaggttgattttgtgtctctactactaaggataatgcctcagtgaacagaagcaggcatcactgtagcctgctaacttagaagttaggttttttaagaagttagttgtttccaggtacctcaggaatactgaatctttcttaagctaacccaggtatcttgtttttcctttgtgctccctccagaagacacatgtaccacacaggcttattgaatgaaataagacccccactgcttctaggaacattttataagtcagaaaagattgaaagagaaaataatctaaatgccagtgttttataaagatacgaggtatttcccaactaatagagtaataaaaatataacttatatttagatgtggaagcttaagttgccagaaagataattagtattattgctggagtctaactctgatacctctaggtatatagtaagtgttgtttgttctttttcctattaaaaacaagttattgttgatgaatatttagtatctcattggacctgtatgctaagaagtaaaataattaccaatttcaaatatcatattgttccaaaatggtgttcatagttaattcttagttaactttctaagagtactaagtagaaattgctcagccaatatttagtgtacttttttctttttttttttagtgtactttttctatattacaaaaatttgagtcatatattttcatttatcaaagctatttgccaaagtgaactttcactctcttatgaaaactcgtcttctgatgtataattcctcacagcaatccattggtaaataatgaaaacagccctaagtaacaaaacgaaacaaaaatccctttataactataagttaagcttgtcagcaaaccctgatgtgcctttgtggtaagtgccatcatagctgcagtgtgtaagtccctcttcgtgtctgcctctatcttaccataacactgtgaaccttttctcatgaaatcagaacaaggttgtgttcgtgctgtagaaagagagcgagtcagttgagacatggtgatttggggactgcctgtctttacgtgaagagtgtagactaggctgtatttgaaaccagcactcctgttgactgtcaagaaagctcaggtctcgttctcagaaggaaatcaaatgaagggcactgccctgcatagggtcactggctcccagttgtgatcagttcttggagttagagcagcctgagatactgtttccgtatgtactgtaagctgcagagtacaaaacatccgcctgtctggaccactaagagaattaatgagatgctgtgtgtaaatcaccttactcagaggccagcacaggcctggcactctctccttccctctgtctgccagctgatgagtccagtctgtcttacgtgaaggactagggttggatgagtaagactgatagaaaacttatcaaggcagattattttcatcacaatatgtttaaagcccctagtcaacgggaggggataaacaaaagatcaggattttaaataaaagtaagatctgcattcttaattttttctcttctcctcaggttctaagtggcttagtataagtatagccctgtgtagtactctacattgtaactccagaagagagtaaataaaaattagttttacttgggaggcagaggcaggcggatttctgagttcgaggccagcctggtctacagagtgagttccaggacagccagggctacacagagaaaccctgactcggaaaaccataaaaataaataaataaataaataaataagttttgcattcttaatttccaatctgtttaacgagcctaagctcatttacatactcaagcacttattttcagtttgctgcatatgcccccacctgtgttcagaaagcacagataaataacgcttagatcttgctgattcaactttaatttttgtgcatttattgcttgtgtgtttatgtctatgtgtgccgttgtacaagtgtggaaaacagagaacagtctttgggagtctgttctttcctcccaccatgtgtgttccagagattaacatcaagtcctcaggcttggcagaaggcacctttaactgccgaacctcattggcctactcctttaagagagtgtgtgtgtgtgtgtgtgtgtgtgtgtatacacacctatgtggacacacatatataaagaccatctcacttatgaaaaatttgttcttctctatcacttaaaaataattttgttattttgagataattatagatttatagacttacaaggttaatataaagaatttctatgctgccccaagtgttaaatgcttttcccatatttgctttgtcatgtttgttctctttgcatatatctatgtaagcatatacacagagacatagctgtatcagatttttgtttttgtgtgcatatgcactcggctatttaaagagaatccagatattatgtctcttcatagtacttcatcatgtgtttcctaaaagtgaggacattctctaccatagttataaaacagctataaaattagaaaatgttggtgtggttttctaaggaatttactcagttgaagaaaacataggggtttttgtttgttagtttttgtttttattcactttacatccccatcacagtccctctccctcctcgcttcccagttccacccttaccaatccctcccccccattacccctcctcttctctgaggagaaggtgagcctccccttgggtgtcaccccaccctggagcatctagtcctggcaaactgggtacatcctctcccactgaggcccaatcaggcagtccaggtagggggtaaggggagtcaaatgtcagggaacagagaccaagacagccccccattccacttgttaggggacgcacatgaagaccaagctatacatttgctacaaatgtgttggggtctaggtccagctcctctatgctccctggttagtggcccgggctctgtgaggtcccatgattctgtggatctgctcgtagtgtctttgacccctctaacttgcttacttctatcccccactcttccacaagactccccaggctttgcctgatgtttggtcgtgggtctctgcatctgactgcgtccactgatggatgaagcctctcaggagacagtcatgccatgttcctgtccgcaagcatactagagcatcattattactgtctggggttggctctctcccatcggatgggtctcaagttggggcagtcattggttgggtgtttcctcaatctctcctccatcttttttttttttttttaggtattttcctcgtttacattttcaatgctatcccaaaggtcccccatacccacccacccaccccaatcccctannnnnnnnnnnnnnnnnnnncaccccaatcccctacccacccactccccctttttggccctggcattcccctgtactggggcatataaagtttgcaagtccaatgggcctctctttgcagtgatggccgactaggccatcttttgatacatatctctgctccatctttatccctgcacatcttgtaggcaagaaaatttttagattgaaggttttgtgggtggcttgatacccccctccctcttctagttgtcctgcctggaaacaggaggtggtcacttcagtctctatatctgcccccactggtaggattcgaagctaaggttgccctcatagattcttctcccttacagtaagcttggtggtggagggcagagaaccttcccacatttgtttttcttggtttctttccctttgccaaagtaccatgttttagagtggtgcattctgattgtgttcaaaatgaggtgtctgtatacagaaatgtctgtagtcaagtatgtgtcaaaaatataaatattatataatgtatatatccagaatgtctcaaggtatctagtatgctaatgtgagttgtaaacttccaaaataggtatttcagtgtacagcttttccaaacttaatgaatagttagtccccttttaaaggggcattgtaaaaagcctatttcagaattcacaatggaaactctgcaaaagaaagacttatctctggctggttctgagttttcaagtatctagggaaccattcaaaactgagatattttgtaagcatctggcactaaaatgtaataggtaatttttttttctttaaggaggcaaagttgaaacatcccaagacaccactttggatcatttcaaactcataaggcttgacaaaaacactatagttctctatcaaaaagcagtttagaggtagccttgacttgaccggttgtaaaggtaaattatcagctttgtaactttgctctcaagaaactaaagccaaacaaaagcaagcagtcacttcaataccacggagtgtttacttttgaacaagatggagtcctgatatcaatccctcagaattactgggcctgttaactaaagcattttgttttcttttgtctgcaaaataactgtaattttaggttttgaaggggttaatgttgagattgaccaaaaggtcagttgcttcctgaaatgggagttgcaaggaaactgtcagatcctgtcattgccgtgctggagtcactgtgagcagcagtggcctgcacactactgacagctaaaggacctgggcaaggctgcatgggaaacatgcaagtctcagacacctgcctgcttagtgctccagactcagttaccacagctcaaggatagactctgtgtgtgtgtgtgtgtgtgtgtgtgtgtgtgtgtgtgttggtgcatatatgctgccacatgtgtagaaatcatggaataacctcaattgtcaatctttactattaatctttgcctttcaccttgtttgaaacagggcctgttgttgttgttgttgttgttttctgttgtgtnnnnnnnnnnnnnnnnnnnnctgttgtgtgcaccaggctagctggcacacagattctcctgtgtctgcctgtcatctctggggggggggggggcaggggggggcactggggttacagatatctgtgcttctgtatttgcctttctgtgggttgtggggttcaaacttgggtcctcgtgcttgcatgtcaagctctttgcccaccaagccctctctccagcccacagtgatcatgtctaaattacgttctaccaggcagaccctgcaccccactctctaacaatagttgggctcatcaggacagcttatgatgatagccattcacatgtacttttctgaatctccttttttaaaatggtttattgactgacgatttagtcacctcatttcatcttagatttcccataggtcatcttaaaatattattaatttatatgtaatactgaggggctatgttttaggaattatactaaaaacataaattatatccactagattttaccttcttgatacatactaacctgccattctgataaaaatgtcttgaaatagcacactaggcctttattaattttattcctccaacagatattttaggagaagaggaatatgtttctgtctttgagccttgctttaaaataactcctgaagaacaataggatatatgtgacatgaaagaagaggggactccttagggggaggaaggaatgagcgaaggagggggcacagtggaggatgggcaggatcgaatgctctgtgggtgtgaaagggccacagtgaaccccactgccttgtgcactcaccaaggaaaccgcttgtagaggggccaaatctgacagtcacattctaaattggattgagtatgtgaatatctgtgagaaattctatgtgttgtatggtttgctcaaagttcaacctgagacttaaatgttctctcttacccactaccatcctttaacaggtagaccctgtcaaagtaactaagatgagcatttagagtatagaaatggagaaagaccctctaaaaaccttgtttctaggccagacaagagtaatgtccaactttaaccccagcacttgggaggcagagacaggtggagctctgagttcaaggccagcctggtctacagagtgagttccaggacagccagggctgcacagagaaaccttgtctcaaaaaaccaaaaacaaataaatgaaaaacctaaatatggaggcttaggaagctaaatcttgaagaattctggttgtaggaaccaagagaatgcccacttcagagagtactagaaaggtatgaggtagtgatttgtactaaccgtaagacagacccatgctggtgacaacaagaataaaagtaacaaaagaaagcgtgtggggctctgggtggagaaaggaagctggcgtcttctgacactaaagcagaggttcccagttaacctgtgatgagtgccagatattactctgaaatgcctgaccgctgaggaagcatgaaccaaaggaaagatgcagcagccaaatggtgctggaaaccccctgttaatggtagagattgtgtttctatctcccctctccggccccggcccggcccccacacagcagggtagttctaaaccttagataaaaccacaaggacaagcagagccttagtgcacatgacagcagacaagagacaggaactacctttggaagggaacaagtgataattcccccaagcaggtgtctgcatacagcagaagccacccactcgtctcccagagctgtgggaagggccaggtacctcgtccatagaggagcgagacgggcaactgaggaaacagattagtaagaactgcataaaggggagaggacggccagggctcctttcggacaccaagaagctggtgactccctctctttctcacagattcaccaagtttaccgtcctgcttaaagtcctgggcttggggacatcagactcagaaggtcaggcacaatactgaatccaaggatgttacatgaaagagtagacactgaaaagtcaggcacgcatctcccataccttcctctcactcagagaaacctagtagcaaagagacacagttacatcccagagtccctgacaaatagcgagtccccaggcgaaccatacactgagggaaagtgagatgctgtgaaataggagccatgtgcctttcatggaatcttccacaagcaaggatgagctttctcttgagtgactgcagcatccttggcattgtcatagcgtgagacatggcagtgagcaaagaacatgagcagtgctccggcatgtcagcagcatggtctgttagagcgtgctgagagaggagacgagattgaccatggaacagaggagtcacctacaggagaggagagtggggacaagtggaactcgtcaacaggatagtggcagctgaacaagccagagtaagaaagtcacccaggtagcatctggaagatcatcccagacagggaagagctagcatgaggcctgaagggagggaccctggctagttccgggtacagcagggaagctagtgtgtctgggacaagccaggaagaagagcggcagtaggagatggggacagacagggaggagtatcaggcagccattggaggaacattcattacaagaaacgtgaagggacacatttggaggcagaaatgtgacataaatagatcacatgcttctgtgtggagatttgctcagtactgtcctggcgccctgggtagtgtgctcagtactgtcctggcaccctgggtagtgtgctcagtactgtcctggcgccctgtccctgtgggatgctcctgctttccctctgtcctaaaaggctgctggccctttcctgcggctctgcactccatgctgtccctaccacttcaccaggacacttttctagtctctggctgctgttctggtgaacgagcctaaccccatcttaaggtcagtagccattttgttacaaggtcaaaataagttcatttatgtttactggaaaacttgagttccaccttgcctcaacccattttccggaattcggcatgttttataccctataccctgacctctgctctcacgggatgttctgtcaggttcctacatgacattccttggaaacccctgagccttgcagtctggggactataaaaaccccacctctcctatgtttggtgctgaccttcctaacttttgtgttttatttttgaaacaagacctcatttttaaaatatttaaatgcttctttcttaatttttgagataaggtctccttaggtaagctaggttggccttgaactcactataaagaatttctgatcctcctctaaatctgaactgaattaaaatgcttttagctggacatgtagtggttcacatgtggaaccccagcacttgggagacagcagcaggattctgtggctgagcctgccgctctgagaagtgtcactggttacttggtgggcctttgtgacatttggtgaaagcgaacattgatatactaagaaggtagaggagtggtttagaaattgtacctggagttctaaactacgagtgaaggcaaacacataaggtaatgggagaataatcatactcccttatacaacaataagcccattttatatgctatacataatctaatgcaatgcacatgtgtgtggatatggtatacataataaacaactgaaaactgttttgacagctgttgaagtgacggcaggatgagtgttggtgagacaggtaaatgcccaggttttgaaatttgaacagaacatacatgcatagtatcggcagatatgacattaagtcctagaagaagcagctaaaatagtttgggaagaacaagcgtgcaggatgggaaagtaagctcaggtgacagggaaagggttacttactgtcttttaggataagtgttttttatgctatttttttcaacaatctaaaacctagataagccagctacacaaacggaacaagtgaagcctgtccttaaaaagcacttccggaatgctttcaacgtttccaaccaaaactgttttaataaaaagctttacaaaatgcttcttggaaattagaagattggctttgtataaagtgggcaccagagaatctcaattttctccccctctgaaaagcaaagccccaaacagtaggaaacttgaagtgtgttttgtctaagaaattgaatcacacacttccaccctctaattgtgttccctttggtttctcaagataccaaagaaggggcctttattttagcactcgggtgggggcgtagcacagccatctgcacagcacattcggctacaggaaggagccgctgagactaaaaagggttctgttccgtgccacgtgagagcacgagatggttttcattgcctcattgtcttccagtactggtgatacgtgaaccccagattgccatcacacacgttgctcacacaccacgtttccctatgtattgcgggttttcttgccccatcgggctcccttgataacctcctcccatgtggtctgcatacaaatctgtgcgcttgctcacgccgtgccacaggctgtggagggagaacgtgccagcacacagtgagcactcagccgcaggaagacagcctcacaacagctaaatggaggagctggtgcaagtgtgtctcgggagaattcaggggcacagatggggattcaagaggaattacaggaaccctgggggaggctggagaagccgtactgtgagctttgaattcgcggttgaaaccagagggaaatgacacaagccaccgaaggataggactgggtgattaaggcacagcggtgactagcaagggatctgggggtagcattcggcaaagagagtatggttagtcatctgaggtcacagagcctctgtggcagaaaagaacagaaaggggcacatactggaaacagtaggaaagaaaacaaattcagtgattgagagaaagagtcagagaagggcccttgatcagtcaaagattacattaaattcggctttctcaaaagattgtaaactaggagtacctggatacaggagcttgaaaagatctaagtatctctgatgtgatgcttggacagatttggtgtttgtatattgtctgattatcaagtgctgaagcccagggaaacttaatgtgatcctgatggtctcttcggccctctccccaggggtgaatatactaagttctcacgactgtatcgtgcctaggaaaagctggagcgtaggctttgtgtaaatccacttagcgccggtgtgctatctgtgtgaagctgcatttctgaagcactgtagatgcttacggcatttggctctgactcatcttacttgacttcagctttcctaaaatatttatccatctacagatacttgcattttggtttccttcattttgtgataataaagttaaaacaaaactgctttaaataccacacacacttctctataaaattatgattggctggggagtgggggtgagggggaacgaccatgattcctcacgccatctattggcagcagatggaatagacaggctttgtctctttttggtggtggtggttttagtgtatgttagtttgtttgagacccgttttctctgtgtagttctggctgtcctagaactcactctttagaccaggctggccttgaactcagagatctatgtgcctctggcacacgccaccacccaccacccctgcattgattttcactgcaatcaggttaccagctgagcttgttaagccgaggaaccatctgaaatgccaaagtcactactacttagtcagccagcaatgttttcagtttcctttctctctcacgaaggtgtggcgtggcaccctggcccgcatgcggtacaagaggaccaaggcagctctgacaataatcaggtactacaggcgctataaagtgaagtcgtacatccacgaggtggccagacgattccacggtgtcaagaacatgagggactatgggaagcatgtgaagtggccaaccccaccaaaagtcctgcggcgtttcgaggaggccctgcagtcgatttttaataggtaagaactggttggcaagtgccacatttcctatccagtggcatgctcccaaatcctgggccatggtagtggctcagctctctgctgttatgacgcctgcctctccctctgccttgagtttgatcgatttgttttcaaagggcatctgcttacctctcaaagtaatggaactgtcagcatatttttcctgtagcacttgacagcatcatgccacaacatccaaatgcctggatctgagccacatttaagataaactaccagcatgctgtccctacttcctgtcattagcaaaaatccataaataactttcttaaaatcaacacacattcttcaaactagcaagtcacattgatcctgtcagggtagcggctctgggccagctgtgcccgagactcagaggagtccctgcagccctgtcaccctggacccaccagagcatccaagggccaaggtctttaacggttcctgggtggctttaaagtgtagccaagggagaaaacgactattttaggccacgatttttttttaaataaatacccatggaaaaatttggaccttcccaactaattttttatgacctgtcctgactctgagactgtctttgccttctcatatttttagcttatttgttgacagcatgtacacagcagaaacagtggccatgcagtgtcttcagataagtggctccaggctccctggagacactagaatccacaagttctcaagtccctaataaagagtactgtaattcattctctctctctctttttctttcttccttccttcctttctttctttttttcttttttccttccttcctttcttttctttttccttttttcttctcttttcttttcttttcatttctcttcttttcttttctcttctctttttgacaagctctctctattacaaaactctgactgtccaggaattttctttgtagaccatgctgacgttgaactcacagagatccacctgcttctgcctcccaagtgctgggattaaggtgtgcaccacaatgcctagccagtttgtagtactttggtttatttctaatacataatacaatataaatattttgtatatggttgttattattgccatattgtttagggaatagccagaaggagaatctctacatgtgttaaacagagttgcaaccattgatgtcctaactatagtagccatgtgaggccagccgaacccaaggatgcagatcctatagataggacgtgctgataaaatctagtgctgtcttagctccatcatctagtgacattaaccaaactagaagctccctaatgtagtcatttaatataatttccttttaaaaacactgcttgacctgggtgtggtggcatatgcctttaatcccagcacttgggaggcagaggcaggcggatttctgagttcgaggccagcctggtctacagagtgagttccaggacagccagggctacacagagaaaccctgtctcaaaaaaacaaaaaccaaacacaaaaacactgcttgacttcaaattgtatgatgaattagacttttggcttctttagagttgatactacattgatagactgtgcaaaaatagagaaatcacatgacagaaaactcatgaatatatatctcatttgtactttataaaaactgtaagatacagacctgatggtacaaccccatagctgcttagggaggatcacaaggtcaaggccagtttgggtaacttagaccctgcctcaaaaggttaagcagggggcaggggaggggactcaacactatctactgcctggatattttatatattttaatagcacttaaactctttttaagttcatatttatttctacgtgagaaatatgcttatatataaagttgaaatacaccatacttttcattcctgctttccttctttcttttaagatagccactctagcaatattgttaatacccttccaaacttctgcctttgctttcttttagtgcaagtgcacatgcacacttgtgcgcgcgcgcgcgcacacacacacacacactgtaaaaggcagcaccatagagggataaggaatccatatcccagaacccggttcatatgttggctttctctggactggccatgtaactttgagtaaattagttaacttttatgtgggggtgagggtaggggggcaataccttatgtatctcaggctaagttgtaacttgctatatagcaaggttggcctttgacttctgatcttcctgcctcccgttcctgagcactgggattacatgtgtgcattatgactcacgtgttgcagccatcaactgccggtagctccttagctagaggtaggccctcatgagctcctccatccacagtgacattctgaccagcttggccttatgcagttcatgagttcaatggccctgtggtacccaggagacagtgcctaacagcactcctcttcccctctcagctcctgcattcctcccaccccttcctctgcagtgctcccagagccctgggagaagggaatgtatagctgtcccatttagggatgagcattcaaagtcatttattttcattccttgaccagttataaatatctgcattagccactacccgctgcaaaaagaaacttttctgaacaaagttgaaagcagcaaacctatgggtataaatataaatatttaggaagcaatttgacaacatgacataaaaaaaaaaaaaaccagtaacagtaacagtaggttctcctctagggtctattgcctccccagccacaggcttttgacaaagtttacagtggtatatagggataaattccctcctgtggaaaatgcctcaaatctaatcagaaagtagttggtggcctctgtataatagtcataccatttggattagtaggcacatcttgcctggcaggttaatagtgcagcatgcaggatcccacactgggtgagaccactgatgtcttctctccctgtggcctgctcagtaccttctagcactgtaaaagccagccatcgaggaggaggaggttcccgtcaggcccaagttcattctctatgtcctgcaaccaatgtatgtggtatctttggcaatagggtcaccagctaattatggtgggcagtcttgagaatcagctgtagcctgtgttattggagggactggctggaacctccttcattgataactcataggatggtgacccatacctggcactgaaattttgcatatcttctgtgaatagcatttctacacatacagggttctttcattcaaactacctttttaaatgtattttattattttatttattaaattaacttacaaagtagtacatctttggttgtggttagcccaatccactctcccatcccccagttaaccctgtagctccccgtgcaccccctttgctttcctgtcccacatattctcctactctcctctccccactaacacctaccccaccacagtcatttccggcttcctgacctctgcaagcatccatgttaactgtctaaatctaaaaacgggaagctaagatccagatatgaaaaagaacatggatatttgccttctgagtctggcttctctcagtgtaatgttttccagttccatccatgttgctacagatttcagaatttcatttttctttatacttgaataaagtgtgtgtgtgtgtgtgtgtgtgtgtgtgtgtgtgtgtgcgcgcgcgcgctaatgcgcgagagtacgagtgtgaatacaccacatttccatgatccatgcattgttgggcatctgtgtggtcagaggcagggtcctatgggtgtggcctgtgggtgtggcccgggcgtggcccagcgtgtgcatctggtaactctatttggaaaacttctacactgatttccatagtggctacaccaatgtatacccctgtttaaaatttgtgatgactataaatgattgtgattaatttcagattgtactctggcctgaggaggcttccttttaaattctaatgttttgttttaagtccagaactgattaatttgtataaaattaaatttattcatccaacaaatatttactgaacacctggtgtttgcaggcactaaccaagcctccagggatacagagatgattgggaagagtaggaaggacagtcccacctgctcacaagggtcacagttgatgaaactgtgtttgtgcactccctcccttatgcgcgctctctctctccttccctccctccctctctccctttctctctctctctctctttcactctctctctctctccttctctccctccctctctctctctctctctctctctctttctctctctctctctctcttccctcactccctctctccttccctccctccttctctccctctctctccttccttccctctctctttctctctctccctccctctctctctccttccctccctctctctctccctttctctctctccctccctccctctcgctctctctctccttccctccttccctccctctctcccccatctctttttctctcttccctcccccaccccctgaatgaatcttgccatttatattcatctagtcaggcaaactttttctgtaaagggcctacagtattttgggttgtgcaggctacaggctacatatggtctctcacatactctttgttttgttaaacatgtaaaaatgtaaaagaatcttcctagctcacaagcagtataaaaacagaccttgagccagatttgaaacaagctgtagtttatggactcctggtcttgaatgttttgttctgtggaattctatgagatgtgtggtaaagaattccagtgttactgtggggtttccctttgtctttctggaatctccatgtgtataaattgtgttattttattttctctgtttactttttgttgttgttgtttcttcctttgagactcagtctcacataacctaaactcagactccattatgtaaccaatggcctggatcatctgatcctctgcctctgcctcccaggcgctgggctgtggccatgggttatcatgcctggctcttccggctttgtttttgtttttgtcttttaatatttatttatttatatttatttaatgtatgtaagtacactgtagctatcttcagacactccagaagagggcatcagatatcattagggatggttgtgagccaccacgtggttgctgggatttgaactcaggaccttcagaagagcagtcagtgctcttaaccactgagccatctctcctgccccctggctcttcctaattgtattaagatgattccttttcctcacagtaactttttgtggctaagatttttttttttttttttttttggtccttttcctgtcattgaggtagctggtctttatgagtgcagctgttgttgcctagccaaacttatgtattgtagcttatatgaccagaataagaagtcatgtggctctcaccatggctgaacaggccagatgaacaggcccaagtgtgcttctgtgctgaaagcctgcatagtcaggtatgaaccttgtcttgggccactgtgggaaataaaacagagacagggcggccaggcgagtgggcaggaaagagcacagtcaagaaaatctctcctaccagcagtataatctgaagccccagggcccactggggcagttgttggggaagtcacttagtgctgaggggcttgcttgtcaccactgtccttaactttgaccactgtagctcttctattctctttaacaaaggcctcagagcagtctgagtcatatgggcactggtaagccatcgaattcagagtggggctcacactgtagtgctgagcctttgtgatttctttagtgtgttgtgatctaccatgctgaccctaccaaccatgactcattacagctgtcacctcctgcccttgctcccagcccctcccactcaggtctcaagatcttctgggtcttgccataaaacctattcctgggagttcatctccttgcatgagcacactgtgagctgcttctcattagcacctgctcatgtttgccaaaaagtcctcacaggcagtaagtatattgacatccatcccctgtccctgtagtgtctaggttttctcttatcctttaattacttggcgatttcattggaaagaatttattttcggtgaaacttattctagtgttccgtagggacatagtttgggaatcactggccttgacgatccattcaattaaagacagtccactgacttagcctcctggattggcactaccgaccatagcacagcaagagaacagatgtgtcatgcgatacagagttgttgctgggagcataaaattctcctgctgttcttctcagccaagaatactcttgctttatgtttgcagatgctgatgccaaaaacaaataaaacccttggagtcatccttacacttcctcttccccagcaagctaatccatctgtaaataccactggcccttccaccagaatgcatctagactcacacttacctctgcttccatcactgcctccctggcctgatgcacatttctctggtgtgtgttttaaagaaatagcctcccagcaggttttcctgaccctagcccacagcaatgacagtggtcctaggtcatctagtctctgtgcagaaccctccagagctgtctcacctcatgcagagtagaaaccggagtcccaataatgccctcatgactgtggattcatttagtcctagctctccctctgacctcttctcttcctttccctatcccatactacttcagcttctcaggatcccaggtttccctagtaactcactgaacagttcctgtctcagaacccttgccttactgtggtccctccatatgtctggcttcctccttagggccctatcatctatccttaccagaggaccctccctaaccacccatgtaagcaccatcacacccgcttcttccttccaaggctctctgccctccttccttgtttccctacacagcagctattcatccccatcacacacccacatagtgacccacaaaagtcttaaaagcacccagaagaaggctccttgggctgttttgcttgtagcactgcttcccctatgcagaaaaggacctgcttggatgaatgatgaatctgtgtttatgcgatgtaataataaacacaggttgagtgtcccatatcgaagatacttgggatcagaagtgtgacttcgaactgttcagaccttagaatatgtacaccgatcatgctggttgtgctgaactcaggaaggtttggacttcagagctcttaggatgtcaggttgttttgtgcccaactggtattgtaaaagccagaagccacggagttctagtcacttcagagcacacaaacaaagaagtcgttacaaaatttttggcttcaggaaacaatattttagcaacttctgtataggtttgataatcattcccctccctttttattttttggtttattgagacagggtttctctgtgtagccctggctgtcctggaactcactctgtagaccaggctggcctcgaactcagaaatctacctgcctctgcctcccaagtgctgggatcattttcccttttttttttaagcacaatatacagttacttcatgctatttaatgacaccttgaaaccctttggggagtggatgaatgtctaaagcctatacatcttgtttatttgcttgtagatggagagcatcccaactcatcaagaccatacctgcatcagaccttccccaggtcagggcaaaggttgcagccatggagatgctgaaaggtcaaagggcagaccttggactccagagagcctgggaaggcaactatcttgcttcggtaagtccagaagaatagtctgaattcctgcagctctgcaaagaaagaatgtttcctaagacttttcagaatgggagtgggggggatgtttaagggatgtataggttctagcctcagcactgtgaagcacattaatagctcatagagaaactaggtaacttctctgcggtactgagctaaaagatccatcgcttgatgcatcatctactttgaaaagggttatagtacatacatatattagcatactctagagcttggcctttgaccacttcaacctctattcagaagcctctctacatagctcctgctgtcctggaactcactgtgcaaaccagactacaagacatccacctgcctctgcctcctgagtgctagaatcaaaggtgtgcaccaccacacccaacttcagcagccatttttatttatttatttttaagatttaaatatttattttatacatatgagtataccaccattgctatcttcagtcacaccagaagagggcaccagaccccattacagatggttgtgagccaccatgtggatgctgggaattgaactcaggatctcaggaagaacagtcggcgctcttaatcactgagccatctctccgcccccatttttaattataaactttatattattctcaaggctgtaactcctcttccctcttactgcccaatttaacgttttgataggacctttgatatggtactaccccttgctagtctaacatcttggcgggaagatgaaaggatgcatgtgaagctgtgtaggtatagttgtcacgcagtagacggagcacctaccgtctaagaattctcttgctgttcccttgttccttcagaagccagacacacctcagacctcaggcactttcgtcccagttgctaatgagctgaaacgcaaggacaagtatatgaacgttctcttttcctgtcacgtccggaaggtacgtagctcttgaaccagactatcctggagagagaggactgagaggaaactcaggtgtgggcctcagtgaaaaccagcagtgccgtgcagctgggagcagcccagggagcccccccccccccatctgtgcttggagcctgactggacaatttagagttgtgttaataaagcctccctgagggaggaggatagtcttggataacttttttttttcatttatgtttctgagacagggtcttataaagtcaaggctggcctcagaatcactgtagccaagggtaggctggagcgccttcctgtctccctgcctctgcctctccagcgctgtattcagatgtgtgccactttgcccagctcgatcggccttccttttgtaaacagctttggtgtgcccttcaggccatgggtctgtgttttactacatgcatgtccttcacagcaactacaggtcggctctttattgagtggttattatacacaagtatcattgctgcttttaaaactagatttgcagactggagagatgactcagcgggtaagagcactgactgcccttccaaaggtcctgagttcaaatcccagcaaccacatggtagctcacaaccacctgtaatgagatctgatgccttcttctggtacgtctgaagatagcttcagtgtatcacatgatggctcataactatctgtacagctacagtgtactcatatacataaaaataaataaataaatctttaaaaaaaaagaacaaaaaaaatagatttgcaggagctggagagatggctcagcagttcaagaaccttctgctcttccagagaatcggagtttggttcttagcacctgtgtcaggcagttcgccacctgttactccagctccaggggcatttgatgcctctggcctccaataggacatacatatgcataatttaaaaataaatatttaaaaactacaaccagaagaaataagaatttttatttaaaaagaagcttattaaataatctcaacataattccatatatgaatgaaatcatgcattgccttaacaaaaggtactgttgtcaatatagcaccataaaaagaaaaattcaaaaagctagcaaaaacctcagaaaaagcactttgtctcagatcttaagaaaaatattggctagaaagatggctcagtggttaagagcactgactgcttttctagaggtcctgagttcaattcccagcaaccacatggtggctcacagccatctgtaatgggatctgatgcccccttctggtgtgtctgaggacagctacagtgtactcatatacataaaataaataaatctttaaaaaaagaaaaatatttagttccagtgtatgattcagatcagagtgataaaatgtgagagacgttgaattcataaagaaatcaaaactcagttgtccaagaagacacagacaagattattgaggcaattattagcattctattttatatattcaaaaagcttgaggaaagattgggcacgtttaataattacatagaagactcttaaatggttacagttacatttataaacgtgagagaatatgtggtcagtaagattaacagtaggttagactttgcagaagaaagattagtggctttggactggaatggctcagatggcaaaggtatttgtggcccaggcctggtgtcttgtgaggtcaatccctcagacccaaggaaaggtgaaagaagataaaggaggccacaatggtgtcctccagcctccacacatgcacctcagcacaagtgcaggataaatataaactgacataaaataaacctcatttataagatttattaaaatcttaactgcataaaatagatcttaaaaccaaaagaaagggagaagaggctaagagtgtggggctccatggaggagcgcttgcctaacatgttaagggcctgaatttcattccccagaatttgtcaaaataaaaaaaaaattactaacaaaaatcccaatgaatacaaatttgaaaatgtgcgacagggaacaaagaataaatgggacaaataaataagttgacagatgacaaatttaagcctaaccttattgaccatcataataaatgtcagtggtctgaccacccccaattaaagggaaaccttgtgccctcctggccccgaggaagctttgaccatccgggaagctctccaaactccagagttcctggaggtttcatcctgtaggcaggcttgtttaagccactgctggctggtaattagcttagccccgagccttcgcctttccccctccccctgaaggtggttgctgggaagagctcctgagtgagagagggttcagccttctactcaggccttgatcttagcagccagcctccatgactcccattccgaggggtttgcagactttgtattgggagccaggggcagtaggacagttggacattcagaatatgaaacgttgtgaatcccgaccgtcttgagtgctggcatgacattcagaatgcttcagatttcacacatgcagcctgaacattctgaggaagaattcaagtccaagtgataggaccaggacaacaaatagactgaaacaaatatcattgaggaaagttcgtagtatcatcagctggtcgccacattccagacgtgagttctgagctctgaaacccaggaactccattttattgactatacctaaggctaatcacacaatccaaaggaggcttttgttatccagatgtacacaaccacacaaaaagtttccatcatacttcctatttgtgactacaacacaggaatatacttgtacccaccacctagggagggaggttgtgcccacccttgtttctggtatcttgctatctggcaatcagaacaaagagtcaggtggttctgagaatgcggccatctgtagaaaagcctgctgcagtgcttctcattccgaggaggacagtttcactctggattctggtgagtaaacgctgaagaattcctgctgatggcttgctgatggccctgtatttctaagtttagtacaaacacccttcttcatgcttgcttagattatgtcctcttagactcttttaatcccaaagggacaccaaggcaaatttgatatgcttccgaagagccttcctcctggtgcgttgagtatattgaagcagctgctttccattaacagcagttattataaagtgttcgttaaggtgagagtactgcaaatagctcctctcaccactatgctgttctgttctgactctgcagcagctttatctttgaccccctgtggaaatgaccgaaactctaaacagctgccttgaagtcgctagagaaagcaggaaactaggattttttctcctggggtagggattttaactttgagtacaagaaacaaggtgaagtcttatctagttctgagtcttcggtccagctttgctatcattttgcaaaaataaatatgaaataaaagtagtgttcccataccataacagtgtgaagcgggattcacctgtatgtgttgaatttttcatttctgtgtcgatagagctaagttaagccatctacagatcttatgctgttagacttgatgactttcacacctacctgattcttgttttaagatctgagttgctgaaatagaaggtaaatatttgttcatatgaagaatatttctgaacagcttctgtctgctttgaggttctttgtttttcccccttgtttttagattaactcattatatatcctaaaaaggacctgtggctttttttttctcaactcaaatgattttgtgagattgtataacagggtttttaaagtatattctgttccacctcatgtgggtttttttttttctccaaatgattccataaaagatgaaggaaattatttccacttattttttagtttctgtgcgaggcgtcctgtgttctacacagtgtaaggtagatgaaaatgataatgaatggtctccagaatggcttccacagaaccacattttgttaaataggtgtttgttcaaaaaggattatgtagattaaatgtgctgtggaaaagctgggttaaacatactactttaatgagaattctcagaacctttggtaaccttctgggctatagatatcatagtgagagctgtggtttgcaatgttatccatccatccatccagactatgggaccctttcttacaaagctctgcataaaaccagcactgggcagagcggctaagaggatcttcacactcagtgcttcagatcttctgggaagtaccagttgtctgttccaacaaaaaacagaggctatgcaaagttatccccaagcacccacactgctgtgtacactcttttcatcagaggcacacttgctgtcatgttgaagactgaaaaatgtgctcttcttagacaataactgttaagagaattgactgatggctaaaaccacagcaaagagaaaagataaatttccatgttaagtttgaattttagtttactgccttgtctgtagccctgcctgtctgaatgcagctatctgaatagcctaccaaagcacagtgttttcagactagcctctaacttcttgggtggtgtagagagaacatatatgacatgtagcttagctcgggcacctcctgttgggggaggcgcgtcttgtgcttctctcgtctgctcgcctttaggtgcgtgagaaccttggcaatgtggacgctcagaaaaccactggggctggagaggtagctcggaggttaagagcacatgctgatcttcagaggatccaggctcagttcctaatacccacgtcagtcagctcacacctgcctgtaactccagttccagaggagccacaccccctggcctgcaagggcacccgcacacacagtacacataaataaactcacacggcacacacatacacattaaagaaataactttttttaaaatgtgtttttaaatattaatccaggtacattgattaaaaattaactggaatatcctaacaaataagtagccatagtttatacaatgtaccaaggttaattttacctcttacttggaaaaaaaactatctgtaaagtcaggcattctgtcccagtatctaagacattctgcataaatgtgtatattttttcatgtcattttcattttttccgtattttctgtggtattatttcagcccttacttatcgctctcatctccacatgctattctcagcttcctaagacagcccagaacttctggcataagtgttttcagttgaattacctgttcattgctgagttaaattaattctttttttttttttaagatttctttctctctttttttaagggtttatttatgagttcactgtcgctgtcttcagacacaccagaagagggcatcggattccattatagatggttgtgagccaccatgtggttgctgggaattgaactcagaacctctggaaaaacaaccagtgctcttaaccgctgagccaactctccagcccttaaattattcttgatctattctagataaaacatatcagacacgtgattcacagaaccttttctccctatcattgggtgttctattcacttcctagatggggtctagattttatattcctagttgccaagttgtacatttgccctgttttccctgacaagctaaaaaattttagtgccaaactctactatctggaaaccgccattcctttgacatcataacgtgccacccgtggtaaccatctactaagacttcacctccgaagtcagcgcctctgaacctaggtatttccaaacacaacttggttccctccctcatgagatactatggcttatcggtttggttttgttacaggtgaatcggtttagtaaggtagaagaccgagcaatttttgtcactgaccgtcacctgtataaaatggaccccactaagcagtacaaggtgatgaagactatcccactgtacaacgtaagtatgcatcaaataaagactcctatttcctgacagaggctgatgggagaaacatgcagcctctggcttgggatatcccatgtcttcctggcactttacaccaattttgtgttgtaccaaagcagttttctataagaggattcaaagtttctgatagaataactaaaacagtttttaaggatatgaacattggttgtatgtgatatatattacatactgtctacacatagtataaactgcttgcacatagtgtgttttcttatcttcttttataaatgtgtgagcatgtgggcacacatgtctgcacgggtgcacgtggaggtcagaggacagccccaggtgccattccacaggagccatccttggttttggagagaggctctcactgacctagacttaacaagtaggctaggctaggtgaccaatgagccccagggaccctcctgttttcacttcctcagtgctggagctagtggcacacatgggattagtgcccagcatctgtgggctttggagcctgagctcgtgtctctatgcttgtgtggcaagctctgtgctgactgagctgtctcccagctcgactttcataaattgtctatgaaaatggaagcaagtagaaaatgactttgtagaaacattacctctttcatttgtttttttctgtgtgtgtgtatgtatgtatgtatgtatgtatgtgtatatgtgtatgcatgtatgtgtgtgtgtgtgtgttatgcacatgtaaaagcctaaggttgatgttaggatttatcctcagtcaccttttctaccttattctttgaagtagggtctctccatcaaacccagagctcactgatatggctaatcttgctctgaggattccctgactctgccttcaaaggctcagattcctggagggctgccatgcctgctgggcatttacatgggtttctgaggagtcagatttcaggattcacacttgcactgtaagcactgtaaccactaagccagccccccagctctccagccccccagctccccagctccccagccccccagctccccagctctctagccccccagctctccagcccccagctccccagccccccagccccccagctctccagccccccagctccccagctccccctactactattttaaatgtgagttttgtgtagctcccagaagttagtctttaccaatatattttacaacattaatttgctagtggaatgacttctgatctacggccactctataattcactattatacttaggctttcgaattctacaatcacttctgaaacatgaaatttgttgaaatttcatgaaatgtattttcctgaatctcagtgtgcaacatcacttttattgtgtttgagcctgggccttgctggtctcagactcatgagctgatgtgatcctctagagcagccaggactgcgagcgtgctcgaccacagctggctcacgttttccccgtgtaacggtgttagttttacacggtgactgttctgattcagaagcagcgactggactgctggtctcttaatctgtggggcaattttctgcctgctcgttcttaaatagggaagtctgtgttttcccagtgctggggtctgtgaaaagtattactgaaagattattttaaatccctttggtctctgcaaaaagaaataggaagcctattgttttgtggctttctttggtttcttctgaggtcctttggtagtaaggaacagtgacaaccaaagcattcctggctttgctgagtgacctgtgcatttgtggttagccagcgccattagggctgagattggtctcacggtggtgcccctccatctcccccgaccctaccacacacacacctcattgcaacagaaaggccaatgaattgcagctgagaagagactttggatggtgtataaccttcttagccaagacctgaaatctttcagccacaatttaagcctaacagcctgcagactcagagcaggagagaaaggagagtagacgagggagaaaattatattttgtcaaagtctaaggaggtatgaacgcaagcaaaaagaatcgaatgtgatttgtttatttgcctttatttttattaaggggaacccatcaagttcatgatataaattcaacaaatagctaaacaactcttgaaactggtgtcttcctttttaattttttttggtttttgtttgattatgtgtatatgtgtgtatcttggtgtaaatatgtgcgtatacatgcctggtgtccacagagtccagagaggcagttggatccctggagctagagttagagtggttgtgtgccacccagtgtgggtgctgagaactgaactcagatcttcaagagtagaacgtgctcttaatgactgagccacgtctctcaccacatcttccctttctgcattgactacaaataaaatttttaaaacctgtttacatttatactcattttcccataatcattgctagtggcactgacagttacaatatcataaagaaggacgatatctaactgctctaggaaagtagacgtctgagggatggatccccactgttggagatgttctcggtattctacctatgtcactttgtatcccatgacatttttgtgcacacatcctaattttcagcagccatcatctttgtcaagaagctgccctcagccagagctcctgccctctcagatagattggaaacacagtgagcagtgggcatggagtatcataccccaggtctgtcctgtgtcaccaagatcttttccagagcttccccgcagaacaaccttcaggtgcccacaggagtgactgccttcttctcctgacccagctcttctcccttgtcctcccagatcagccatgcacactcgtcagccctcaccttgcatctacttctgggaagaactaacttcagaacaatggaatggctgcctcctctagtgaggcaaactgggtacaaagggggcctccaaatgtagcctgaaggggtttttaatcttgaagtaaatatggcaatattaagcctaaatattttattattaaaacattgaaagtaaaaccaaagataaagacagtgaaacatatgacgatgcctgacactgggcggggctaaaggaaaacacttcccacctcagtcatggctgggcatatgcctgagtccccaactacctcaagaggccgaagcaggagaatcagatgctgaaaaccattctggactatgtagtgaactgaggccagccaacctgaacactgtagtgaaagtttgccttcaaaattaatatttaaagtgtgtgtgggggggggtgtgggtgtgtgtgtccactttaaccacattgtctttcaggtattagtacaggtccagtgtcagtgcatagggaatgaggagtctaacattgggggtgaacatttaggagtgggtctatgtcggattggagaaggaaattatgactgtggagagaaagggggtggattactcacacacgtccacagttaaatgatgggggaattcaccaaggaaggggagtagaagccaagctctgggttccttgtgtggactctcatctccccatgtgctccttggctctgattgcccattagagccccaggttaccatgtatcattctaaggaaggaaaaaacaatgacagtaccatgtttaaaatcaatttgaaaagttctcaaaactagaagtgataagttgtttgtttgtttgtgtttgtttttgagataatcagtacaaaatacagctcttctgtctctgagaagagattgtaaccacacattgttgtaagcatggtttattcttcatgaggatattcatggtgatgaggggaagtcctgaaatcatggccacacttccattccaaggcatcgctgcaggactgcattatccttgcagccccatcagcagcatgggcactggacaggcctttccatctctgctctttatgtgctttcttgctcagcacaagttagagtggtccaccccatcagccactcagttctgtcctgcagtaaggagtcctacattgtgtctcagaagagggctctcatagcaattgatggcctcatgatccaaatcctacttttgtgtcttgtcaaacacttgcaaatctatgcatatggataattcctacaaattatttggggtatcattgtgtcttcccactactatcatgattattgtatcaaagcccaagccatacttgaactttggtcataaattgtgctgaatattggaataggtcactaagttttcctaatggcaaagagggctaggcaagaagaggtttgagtacagcaggttcatggggcatttttcttaaagatttatttattttatttatatgagtactctgtagctgtcttcagacacaccagaggaggacattggatcccattacagatggtcatgagccaccatatggttgctggaaattgaacttaggacctctggaagagcagtcagtgctcttaactgctgagccatctcttcagccctcatggggcatttttaagccactaagctaatggttctcaactttcctaatgctgtgaccctttaaaacattttctcatattgcagtaaccccaaccgtaaaattacttttcttgctacttcataactgtaattttgctactgttatgaatcataatgtaaatatctgatatgcagaatatcttggtatgtggcccgaagggggtcgagacccataggttgagaaccactgcactggtctcttcctagctgccccatttcagttgccaagatcccagtctctttcaagcagggcctaaaactgtgttcatgaacacccaggttggtttcttgaactgcctccatccaggcaatagaggttcaatattagtttctttcctaaagcaccacaaaactacccaacccgttccatcattctctgcacctcccagctcattgaacttgtgtagtctagcagtagccacgtgtcctagctgtaccgttagtgaacatgtcagccatcctctgggatcaccaaagggaagctaagaaactgctccattcctgcagcctggggccactgaccttctgctgcagtcctccctgagatgctgcagccgccagccccctgcagtgctcttgcagagccccactgtgctccttgcttttgctgtatctcggattgcaatgagcaggttcacaggacctcaagtaaaatgagggaacaggcttgaagacacagctacaggagaatttgtcgggattttagcagctgtataccattgtcagtttagaccctcaataacaagccattcaattcacattattaagtgtttattatgtagatgccacataggtgttgggggtcatagaaatgctcaaacagtcacagactctgcttttattcctccccactggaagaaaacgtgtgtgtgtgtgtgtgtgtgtgtgtgtgtgtgtgtgtgtgtgtgtgtgtgtgtaggagggagaatcagtcactggagtatgataaggagaaaataagttagagacgaagacaaacaggagtataccgtcatttggaataaggtctgcagacctccttgactggctgacatttaagcaaagacttacaggagttacagaatccacctatcttcactcacaggaaagtattgtaggcaggaggacagcaaaaggcagacacagcagactagggagtcctctgtaggaaatgtgttcaggatcttgatctggtggtggctgcccaggatgtgtgtggacatccatcaaggcacttatctgagatatataaaccctcctgcatgcttgtcacgcacagaagtgaaaagggagcgagagaaaggatgctgctgataaagaggtcggagagatgtcatcaaagatgggggcaggggagcaaagaagaaaatgatctctaacctggggggatagcagcatccacagacagtggtgtgtgaagccacgcccttcacagtggaaaatgctacagtaatattccacagcctgactgttcctcaggagaaaggcagccattgactccatcagggtaggctcttgctgaggaaaagctaagggtctgcacaagtaactgacaatatctagagttggatcctgctctgtgttcctgaccttgatggtagctgctttacccatttcattcaatagcacatatgctttctcttccgttttttttttcactttcgttttttttttttagttgttaagagaaggtcttcccgtgtaacccagagtggcctccagctccaggtcatcctgcctcagcctccccaatgctgggtgacaggagaatgttacagtgcctggctttttctgttctttgggttaatcatgttctagctctcatagatgggtgcttttaactgcttcagtttttaaatatttttaaataaatttgaaactacgtatgtttgtatttaagaatggtttgagttgaattttacttttgatgcaatattggatttgttttcatttttgttgtgaggtcttcttaaagccatgaatagtttagtaatattatttcataaatggtaatttatggtccttgagtgtgtatgtcccatggaaagagacttcatttccccattgctcatttctgccacacttaccataaactaagaactcacatgtccttttctgctttctgtgccttagtctatcagtctactgattatccttgaaccaattacaatttttactacagttggacacagttttatgaattctaggataacagtaacttcccaggccccttccttccaattcattccatctagctgggtctgagactcaatagtagagtctttgacttacatgtgagaagcctagattaatcccaacacagccgagcaaaacaaataggatttaccccattccagcctaacactcactcaccacaccacaagaagagaaagggtgtggcagatggtaacaaaagtacgccagtcaggacagacatagacagctacacacacactattcattctcccctaggaaatggccccctgggaacctctggccattttcctgtctctctggctgtaccttctctagaatgtcatgtgtcagcaccatatattatgtagacttttcagattggcctctttcacccagcaacaagcatttaaggctacctgtgtctttctatggctgggtggctcttaatttttttcaatcaatgaataatattctgttatttggaggtatcacaatgtgtttatccattcactattgaaggacaatttgcttctggtttggagcagtcatgaataaagctactataaatatttgcatgcaggtttcttgtgtggacatggacactttgaacagttgaatatatacacctagaagtgcacttactcagtcacagataagactcagtctagctctgtaagaactgccagttttcttccaatgtagctgtaccattttgtattctaagcggaattagggtgcctagttcttcacattctcactttgatattgtccatttgtttgtatttcacccattctaaaatgtgtatagctatatatacatgtatatatttttattaccctaaaatatataacccaatatttactaagtctccatgtttaaccataagaaccatctccctacgttctcttggtttatattaagatgataaaactgatttttttaaataaacctaagctattttgtttaaagatacatttggcacctttctcccctctgactagcgaacactgtacaacactttgtcttttaaaggtgttctggtcaatcctctcaggaaagataaaaaaaatgggacatcatagcatagccttgagactattttcaacaagcactgtcctcacaaatgacttagtcacataatagtaaaaactatctgagagagaaacattcaagttacaggtgacccctttagcagctaagtgactgtctatgtacaaacactgctgggttgggttaagctttcagccagctgcaatctgtgttgctatcaaatcagtgtcttccctcacagtcactttctgtactagatttttatattatgcttttaaattaaagcattagttccaatacatttgtcaagaaaggtttgaaattttgcaaggggcagtatggtcaggatttgagtattttatgaatctgagagatccgtgcttgctgcaacttaataggagaacaaaggaaagatagtacgttacctgcatgattagcagcactgggtccgatgctttgatcaccaggtctttgactcagaattatcctgggaaagcacagttaagttgatagaaaagatggctccctgcggttggggctgctgcttaaataaatgtacctctgcattcaggttcatgtagacgtatgtgcacccagatcagtgctcaggacggaggcagcctaggttaattcctaggtggaattaaatctgcttgttgctttcgagggagaccatataagctgaatcacttagcctgagtgccactgcaattcttctgccctccttttgttggagagtgttagttttgctgatgaattagtctgaaaaaatggtttaaatctgcccattaatgttgttttgatatagacccttttatcagtatgggcttgagggctaaggacgtagccaattaattactctcatccctcctttagttctgtgtgaaatacaaaacaaacagcgaaaaggaaagagacaattatctgaactaatgtgcaggttccgtggagctcaatggcctgtaattatgtcacgcttcgtgctttattactctgtttgacgtggcttgctagaaagatgtcattctgttggaagatggattgtccttttaatgtatacagggggtgagccctgttgaaatccgtccgccagactgctctgctcccagccaccatttctaaagcaccctctcctcctggcagtgtcccaagggaaggcgtttccatagtaacctcaacagaggcaatcagctgttgtctggcactgcctgagctggtgtgtgctagccttctcccttctctatcctccctcaagcccttaaaacactatatttattagtcttctttaatggaagtttataatcccttaatgtcacactctgagtagcactctggtttatttatttatttaggtaataaatctaccttcctaattaattctcagcagtcctgggagctctattattttgaacatcttgtacaaatgtttatagttctgcctgttgtaacaaagaagctgcttaggaaaattagatattcagaaacctctgtctatactggaaataaatttggaaaaatacagatgctaaggtttcagatgaatttttaaggtgtttttttccttactgtgacaatggtaaggaagcagtctttccccaattgcatgtttcagcactccatgattctattgattcagtgaacatagatatttaaaaatctttgaactgtggtatctgagaccacatttctctcttaactttttttaatgggggtggggtggggggagggaggatgacacatgaagagcttccctactgactgttttcttggcacgtgtgcagaagtaaatgccttttgttacatggcttagacaccatgacttatgcaaaacagtactaaacaaagcaagcagtagtctcttccagataccaggaagagtccatcttcatcaatactagacatggaaagtcagtctcaaatttcaaagatatctcaacacagtatctgaaaggagaatccaggcatcttgctaaagaagtgcaaagccttttaagagctaaagtagccctgggcacagtggcacatgccttttgccccattgcttgggaggtggaggcaaatctctgaggtagaggccagcctggtctacaaagtgagttccaggatagccagggctacacagagaaatcctgtctagatagatagatggatggatagatagatggatggatagatagatagatagatagatagatagatagatagagggtatataaagagctgttaagtataagaaagtaagcatactaccacttattttccagataaaatcactagaagccagatcctttcaaaaacaaaaccttaaatagagacgtatatacaaatagatttctgcatttgcaaaatagctatcaccatgctgatggaattacaggcttcctttatacaactgtcttcacaggctctggggatgttgctcagtggtaaagcatttgcctggcatatgcgaactctgggttccatctccagcaccatagaactaagtaactgtcctgtcagagctttcttctatgcattaagcatttttgagcagcttctctgcggcatgcatagacaacacggacagtgcaagagtgcttcatacagtttgtctatgacacctcctgctctgtgggagaagcagagatacatttagcacaatgcctggggtgtatgccgaacagcccttaggtacaatcactataatgtcttgttctcaagaaagttgtattcagaaaagtgaagcagcccaaccaagacctccaaggttccaaacaaagaaactgggtttcatgcccacatctgcacagcctagcacccaacctctgctacccactgcctcccacttatgaaagcacacaaaactaaactctctttggaagggtattgggaatcagagccagggtctcagccataactaagctatagacatagccctaatattttattttcaaaagcaaataataataattaaactagattctgtcacatagctaatgtgtttagtggcttaactctgctttatctccgtctttaagagcctgggcaggaagcacctttcataagtgaagagaccagttcaaaacgaaagtggtcattggtgtgaggtttcagtacagcatttctgacctcaaaccccaagttaacttcaaagttaggtttctcggcatgccctgtgctgccctgtatctccttgcattgtctttgtttacttacataaaccttccttccattattagtggtttctttctaaaacatttcattttagcctattgagtacaagttactgataagacctcagaaaacgggagaatcaagacctagcttgtacatcagcccttcagtgggtggaaggaatggtccattagtataaaaagagaataataaaacaattgttccatttctagtgagggaaaataacagcacctttgaagagacctgctgtgtcattcttgagtttacacagccccacctttccacaggaaaaccctgcgagaaaggctgctacatgagaagccagccctttcagtgttaacctatgcttagagttaatttgggtatttcagttctaactcagggttctcatgacctttactacacgctagaatagtctgtggggtttggaggttttgtgttgggacttctatttttttgttggagattgaatcctgggcctcaggcatgctgagatctctatcgtgggctacatgtcaagcttctcgtgggggttttaaaaatcctgatactcaggccgtactgggtgctggtgaaatcagatctctcggtaggcataggggaagagattctctgtaacttccttaattcatatgtgggctctttgaatggatatagggacccaagtaatacaaatgctgtttaacaagagaagcgcatatacattttactatgttttcatgtacatggtaatcttcacaagaatcaagagtgaaaaaagtggctggagagatggctcaatggttaagagaactgactgttcttccagaagccttgagttcaattcccagcaaccatgtggttttcttttgggtacccacagatacacagaaccataaagcacttccatggcctgctacagcatgcatgttctccccacatttctgtactttcactgctatagctcttgcccatttttgagacagcatcttactatgtagcctggctgttctcaagctctcagagatccatctgccttggaatgctaggattaaaggcatgtgctaacatatctggccctttttattttggggttttttgtttgtttttggtgtgtgtgtgggggggggatgtttgttgttatagttcttgaggaaacatttgttgaaagtttgcatttgtctccaaattagttttagtcaattgagtgtgtgtgtgtgtgtgtgtgtgtgtgtgtgtgtgtgtgtgtgtgtgtgtaaaaagacagagaggggtaggatgatctaaatatgtttctctgaacttcctgtgttcacatcccaagtcccaagatggtagcattaggggatggggccttgagggctctacccttgcaatatcaatgaccttacagcagagctagaatgaccctcacattttcccaccacctttggacaccatgaagtcagcagtctcctgcccaagcctcagtctgggcatccactgtcctctgatcttagactcctaacaccccgaactgtgagaagatacattcctcttgtttataaaacacccaatttgggtattttttttcatagcagccccccccccaaaaaaaagaaagaagagggttagcaatggttatggttggaacagaagtttgctttctagattgggctgcccctgaaatcactacgtgccctaagctgccttcaaatttggaatcctcccaactcagcttcccatatactggggttactggcatgcaccaccatacgatcttcctgaagttcaaggttagtcttgtgaaaagatcttccttaaaccaaagtaatataagccaggcactgtagtccacacctgtaagcccagcgctctggaagctccagcaagaacatctatagttggaaaccagcctggtccatgtagaaacaccctctcagtaaataaataaatagccccatagtttataataacagtgcattcgtcattgcacttggctcccaccgcaccccaccctagtcttgtgaagttacctatgctggccctagataggcatttggtaaatgagcttctctgttattggttggatctagaacaaactttgtttgcacagaactttcacaattaagtttaactgcactacagaaagagcatcatcttctaagtgacagactttaaagggattttattttattttattagaactgtagctacccagagacatctttactgtgtgccatgaatgaggggatgcccagcagagtggcagcacaactgaccagttcagtttagtatcttccctccctttgccagcgtcctcattggactttggttgagagagcagccattttcctgcttcataagctgcctccagcatctgcctttctgcctctgctctccagcgtccttgacatttcagatcctggcttttcacaaagtcagagcagttatgaaaaggccttatttgcatctgaagaccagttcagtgcatgaggtaaatgaaatcttatccaatggggtctgaggacacagctgttagggtatgtgggagttatatataggtcatggtcaaataacaacacacttagtaggtccatgtaagcatatctgaaatagcatgtgtgaggtccatagcatggttcccatcctgtggctaaagtgcttagcaatcataaactgtccccaagccccttgtaaactaacaaccctagagagtcagagggataggaagaagccagcattctgggcctcactggctgctctctgccccacctgtctgtcctcaccaagtgtcctctcagacaaccgtgtgggcccctcacagattccctcagtacctactccaatacattccctcaccaagatggaaagtgtagggggaaagtaaaagtacaagaaagaatatgtcttaaataggctttgtttgaggtgtcgggagaacgcgatataagaagcccaataggctgtcatctgtctggagagctgtctagggtggaggcggtctcaaatgctgaaactgtgatgctcagggaggactgactgtctgaggacacagggaagagataaaaatagctttggggtgaggaagggtttcagcggtccataggtatatgccacctcttgtgtgttttctatgatcgatttaggtatttatttcctgtgtatggatgttttgcctgcatatgtctctgcagcacatgcatgcttgatgtatgaggaggccagaagagaacattggatcccctggaactggaattacagaaggttgtgagccctcatgtgtgtgctgggaatggagcctgtatcctctggatgggcagccagtgctcttaatccctgagtcagacctgcagctccattttcaaaatctattttttttttaagatttctttcacctttatttttatgggtgtttttcctgtgtgtgtctctgtaccatgtgtgtgcctcatgcctatggaggtcagaaaacagcaccagatgccctggaactggagttagagttgccagccaccgtgtggatgctgagaatcaaacaaacctgggtcccctggaagagcaaccaatactctgaacagcctggctgcctcgccaacattcttttccaagtttgtttgtttgtttgtttgtttgtttttcttgatacagtttttctctgtagtcctggctatcttggaactcactctgtagacctggctggcctggaactcaagagatccgactccctttgcctacagagcactgggattaaaggtgtgtaccaccaccactaggccctcttccaagttcttaaaccagggcttctcaaccttcctaatgctgtgaccctttaatacagttcttcatgttgtgatgaccccaaccataaaattattttgttgctacttcataactgtaattttacttctgatatgagttataaatttctgatatgcagaatcgctgatatgtgactcccaaagtggtcacaactcacaggttgagagccactctcctaaagtgttacatgagctactgctgtgggtgaagcagagtagcagattttacatggcatgttgtggactgaaatgggaagagctgggaagccatttcagggactcttggaattgtttccatggatgctgtaacaccagaagtagagagaagaaataagatacaagagattcctgaaacattcttcattcagattatcggtttaaaaatcattttgtgggtgtactagttaatgttctccatgtagtcatttaaataattttgttatccttcctgtgaggcagtattaagcccccactttcaggtgaagagacagagggcattgctagagcttcctagcacgtgaatgtgtgtgtgcatgtgcacatatgcatgcatatgtgttcgtgtgttatttgtagcctcctgtatgtcctgattagattcccttcctctcctactggttgtaaagtacttctcagaatctccaccaacgtgtggctgatggatgccaagtacaatcccatcgtatagcacagtggccaaaatgatcagaatacagttgaaatcactcatcatacctgaaatagagggcagctactgtgcatagattcaacttgtgggcaacggcaggagaacaaccgtgtacccaaaatgacgagtgcacaatctttttgcctcaggaaggtcattaattggtaagataaagaatttcaattcaaagaccaataaggaaagcaacttaattaagttgatattttaggagagaggaaaaatacatttaaaataattttttaaaactagattcaattagtaaaacaattatctttgtaaaataataatttgactatctaagacccaattatttagtagcttcacctagatcagtggttttatacaattggaatcacttgggaggcttcccaactgaagccaatcagagcatgcccagtgctcctaatgggaaccgctggcccaaatgagccacagtcagaatataagtttgaagagtcaaaatagatgtgacaggacttaagcacttagctttgcatgcttattctaaagaagtgcccacttgggccatccgtcttgcttcatgtacccttgtggagagtttgattatatgattcccaaacccacaacaataaatctgaggcagtaattaaagagagcccatctgccataggcgtgctgatggctgcaagctctgaaagccgagagtagagacactccggatacagcttgactcccactagatggctcggctttaaaatctcactgaagtgctttctagagctatttccccagagcagcctttttgaaattaaaattccagttttccgtggaactattttgctaaattccaagttataagataagcttccatactcaaagtgccaggtgttctagagcagtgtcctgtgtgaggatttcatcaagaagaagataatcacccaagagccactagattctaactgccttctcgtaaggaatttgacatggaaagagctcagtgcggtcctataaataaggcccttcccacacgaggaaagggatccgaggtctaacagaggggccactgcactggcaggccagttcagactatgccattctctggatgagtgtatatttcatttctaaagtatgcagttcatttgcaacaagaatgacgtataggctgtaaacattcttcttgatggtgcccttgacctctgtcaggatatgtgaaatatttagaagaatcaaagttgtcatctattccatgtagtgagatggattaaggttggaaacttgcagaacagttcttttggagggttacatcaaggtgttataatcaaaagtggaaagcccttgttagacagtgatgtaaattagccctttaatcggccgattacaattagtttcgttgacttgaataacattgatcagaactactagattcttagcaagcacttgtgtataaaatcagttttattggttttaagactacattttttaattgcccaaggcccatattttgtataatagggttttttcaccattaaaatgccagatggttcatatatatattggtatagtatttggagaacattgcccaagagtgtggtcctggggacttcagcatcccttagatgcatctgttttaaaacacgctaattaattttcatcactatgatgcttagttcctaaaagagtaaaataattacttggttctgtttaatttaggtagaaagcatttccaatatagagcccccccatcacatttaaaatacaatttgtcaagaggatatttttttttttttgtttattagggaattgagtcttaggtacaactaggtagtctttccacaataattttttaaaagatttattttatttactatatgtaagtacactggagctgtctttagacaccagaagagggaatcaagtcttgttacagatggctgtaagcgaccatgtggttgctgggatttgaactcaggacctccagaagagcagtctgtgctcttaaccgctgagccatctctccagctcccacaatatatttataaaatgagtatgtctttattggagctgaagtgtagttctcaaagattaaacatgtacttaacatgacaagatcctgggttcaattctaaacatctccccccatcaaaaagggttcatttatcttagggtccattgctgtgaagagaaaccatgactatggcaattcttataaaggaaaacatttaattgggtctggctttcagtttcagaggttcagtacattattgttatggtaggaagcatgatagtgtccaggcagacatggagaaggaacttagagctctacatcttgatgcacaggcagcagaagggaactgtgtgccacactcagtgtagcttgagcaaaagagacctcaaagcccacccctcatagtgacacacttccttcagcaaggccagtgccttctgatcatgccacttcctatgaccaagcattcacacgcatgaatctatgggagccatacctattcaaaccaccacacatgttttggttacaattgatgaataataaattatcctgggctggctcagcaagtaaaggtgccagctgccaaaactgacagtctgagttcagtctctagaacccacagggccataggttttcccctcacctccacatagacacacacagacagtaaattcataaaaatgcaatacattgcagcactcaggaggcagaggcaacttgacctcttttgagtctaagtcctgcatggtttacaaagtgagttccagataaacaaaggctacttaatgaaacagtcttttaaaaagaattaactatctcaaacatagaagcaagacatcttatggttctcatttcttgagtcaggaatctaacaaagcagatggtgaatctctgttccttagggtccaggatctccagtacctcagaggctagggactcaggtcattgggaggctcacctagtggtcagcacttgccgtaagtgtgaagatggcaactggaatgtctccaaagcctcgagattcttagcttctctaagcatggagatctgcaagtttcttctctctctctctctctctctctctctctctctctctctctctctctctctctctctcttctccttcttcttccctcttctttcttcttcttcttcctccttcctctctctctttcttctacttcttcttcttcctcctcctttctctctctaaaatcttcttcttcttcttctcttcctcctcctccttcttcttttttcttctctttctccttctcctccttctccttctcctcctcctcctcctcctcctccttcttcttcttctccttctcctcctcctcctcctcctcctcctcttcctcctctcataatcctcctgcctcagcctcctgacttcttgtattacagactggtactaccactcctggctgtggtcttcatgtgaggcactcagggaactgcattgtctatactaaaaggcactcagcctcgtgttggtgcatttattaggtaaaggcacttcgtagcatagccctcaaacaaaaggaagagcaattcaatgggaatagcggtaaagaatttgggatcatgtttgaaattccccacaagctaccctctgcaaaacaaacaaacaaacaaataaatacaacctcaaatttctctgtttagaatgttgccaggcagtggtgatgcataactttaatctcagcactcaagaggcaggcagaagcaggtggatctctgagtttgaggctagcctagtctacagagtgagttcctgcacagcctggagtacacagaaaaaccctgtctcaaaaagacagcatgcaagcatgcatttctctggttgaatgcccagcactctattttttaaaagcatgaaattgatactgtcattccatatagttccatgacatagcacctgcctactatacctatggctcagcactcagaaccaagtgtgtgtgagaatgtgagaaagagtgtgtatgtgtgtaaataaatgtgtgctttccctcccaagattcccccaaagttttgtcccctgatggtataaggttttaaggtcaaaaaccgagattcccccaaagttttgtcccctgatggtataaggtttcaaggtcaaaaaccaagatcgtaatcatttaattgagtccaggttgcactccctaaatagcattccttccatcttaagatcagtgaactaaacaagttgtccatggactatgatggagtagcctccatggatccccatttgaaggagagtgtttgggaggctcatcacccctggtcatctgtgtttgcagcttgccttcataacctactacttcccacagaaaaggggttcagaagtgtctgtgttgtgtgacttctgttcctttagtgctatctgaaatctaaacccacccctgtgaatctagatggagctactgcgcatggtcttctctgttagagggagaggagcacagccaggaatctgctaaactaactgctccatgtttgaacgtcttgtgctgctgtgacagggtccttgagactcttagaaccctggtgtcaatggagagaattcacaaggcatgccctgaagatctttacagcgtctttcatgtctggaagactctttgaagcaatgcttcagatgtttctgaggttgcgacaatggatcttacaatcctcctctggatttgatccattgccctgaaaccatttcttaattgaagaatcatttgccatctggagaagctgagaataaggaacagttgtattttgaagcccagcagttgcggacttctttatatttcctctaaatactgcatgaaagatgaacagttctttatttgggtctcttctttcctctcacatttttcatagcagaaagccagccggaattcccttcactctatctaaaacctccttatctggaccatgacattctctgtccccaccacctcactgacaccagtgtagtcacattaccaccccttcataaccacaatgccttttatactgctctgaggttgtttttcttcccttcctagctgccttcacttcacacctcctagaaactcatccctgagtcccccaggaggcttctcttccacctcctactcacatcccgaagcctatgccaactgtgttaaggctgttacagtggcatcccctcttctctccagatttttattccagtgactgttgctaagtaacaaagcaacccagacccaggagaaataaataattaaatcaccatcttatcatgctcacagattctgtgggctgagtttggaagggtcagtgcggcccgttcacctctgctgcgtggtgccttgggcatcagctgggaaatgctaaggctgcttctcagcaacttctgtgcactgagacccatttggctcctgtgagacccacatgggaactggatcccggtggtgactatctacaaggctggaaacttaatcaaagtatgtggctggaggtggggcctttaggaggcgattatcaccggataaggtcttcagaatagagcccttgttgaaaactgatggctgtgttggaagaaagacctaagaattcacacgtactctacaagatattagcaagaaggatgtttctacatcttcccctaaacgatgtaccagagttgtatgccacagtaaaccttgcttcctcatcatttgccttgcctgtgatgctgtgatatcatgctattacaatagcaaaaagactaggataaacaatgggtgtgaaacactgaagccctagagtttgtctggcccagtaccaatactgctgacccagaatgtctgtgctctgtaagacttggcatcctctcaacatggtaacctaggggacagtcagcttggggcacaagcatttagttgtttacaagaagataaactctcacttatcctaagcagtgatatgtccctgatgaagcagtaccagtaagatttggggtttaaatcttattgagacaagaaggctggagcaagagggcagagagggaggagaaaaggaggaaagagtgggggttgggggagagggagattacacggaaccctgtgaagaggcagcccaactggcttccaagtgtcgatgggaagacagaatgaacagagcgttctccattgagaaggagccaaatcaatttgctgagatcaaaagagcataattattatggccctgtagtcaagctgaagaaatgaagtagagaatgggaaattcaggagacagtgtatatttcagaagacaagcaggacctggagaaattccatggccacttggacttcagccacacctacatctctctggagggcagacgtgcccaagttactgtggtcttctaggatatgtgctgagagggctggagccagctgagagaagaggtcttccgctgagagaaccacagagtaaatcacttccccgaccccccccacaaagggaatcgagacacagtggtctcctcccaggaagttctctgtggtccctgaggggagaatttgttactatgacccagcctatcatattgtttagtctcttgtcataaagcactgagcctttgcctatgagtcacatgctccaaacatctgtggcttcttggagctcatttttaaaattctgcattttatagctgttatttctaggacgcacggttttgtctgacatgcacatgggggtacaatcaggttgaggtgtaaggacacaacagaaaggggaatgtgaaggaaaacagacaaggaaaatgacagttacagtgaccctcagcagactatgacccctacctgctacagcaaccaacaagcttaaatttcaaactaccttcatgcacttttggtggttgcgagggtttgaacccagggacccaagagtgcaagccaagtgctcagccactgcatggcacaccaaggccaaaggtaatcatgggggaaaggagaagctacattctgttgctctaagaatttaaatagcctctttttaagttcaccagcataatcacctttaaaaattagaatttgttgtagattagcgtagctctcagaactcatctgataagtttccttgtgcagtagtagttagcaagaaactcagaaccaatgaaaatgcagagaataccagttggtggtgtgctcagccacaggtgggacatcaccccctgccagggctgggaacactatagaagaggaagcagaaagactgtaagacccagaggtcaaggaggacccgagcaaagccgcgtctcctagatgagagaggactgctgtactccggaacttacacagctgtggtcagcattctagcccggagggaggagcactgtgaacccccaccctaactgaagagtgatttacagattctgacagctcctaggggaaggagagacagtcttaagggtgtgtcgcctggtaggttgatgctgtgcagtggatggccccacacctacgagtatatggtcagcacaaattggactcagtggataacttttacaaaaagaaagaggagctgaagcagcgaagagtagagcaatcagaagagaagtgagggtaaagatgattaaaatatgttttataaattctcaaacaattaatataaatgtattaaattagctttcccatgcatgtgcttatttttctgtactaaagattggacacatggccttacatatgctaagcaagcactctcccaccaaactacattcccaggcttgcatttatttgtttgtttgtggttttattttgagacagggtctaccaggctctctgaagatcaataatttttttttaattcttagtctggtagtatatgcccatgtaaatcaaggatagggcaaatagtttactgttactacagtggacccctgagttcaacagtaatcgtctctgtggcccatagagtttttacagctgggcacagcagctagagcatctgtaatagagcatctgtaatccagtgctctgtgcactggaggaggactgctgcaggttcgagtttggctgcatggcagagtgagactatttcacgcccacccacctactctcaagatactgaaatccccaaagtcccccaaaatacagttttatgcagatctggagctaaaactgaaaaaacggaaaagagcagccaggagagcactctggtgcgcaggtgtgtctcctgtctcagtgttagtgtcagcattgcccatctgtatgcttggggatctgtgaatgttaataaatgttacatacaacacacatgcaaattatactgtaacttgtacttcagctttagaacataccaaacgtacaaaatatgctttttctggcatttcagacgtatgtatcgtgtgctttgagaatattcactcgccactctcctctccgtcttcccctctccctcccactactccccttgtttcctgactagtcccctgcaattttcatatcatatatatctagattccacatatgggagaaatctatggttctatatagaggaggaaacgtgcaacctttgtcttttttagtctgccttacttaacataatcatctccaggcctgatcatgtttcacaaagagacataacatcctttttttctttctgctaagcaaaattccactgagtacatatgccaccttttaacccatccatctgttgataggaatctgggctggcttctcagcttggctgctgtggacatgagtgtgcagcgctctgttatgtttccctccttcagctgtatgcctggagtgctgttgctgaattatttagtagctgtcttttgttttttggggaatctccgtgttgatttctatgatagcaatacatttacattcctaccagcagttagatgcctaatctctttttttttttttttttaatgagtatgggcctttgcctgcatgtaagtctatgcaccatatgcatgcagtaccttcggaggccagaagaaggcattggatgctctgggactggagtcacagagagttctgagctgtcgtggtcctttagaagagcagccagagctctcacctgataagccacctcttcatcccctacacctcaatttttaaaaatcctgctgaactgttaattcaagttgtataagagtggggttatatttctaattttcagttcattacttcttttacctgttatttataaaaaataagtaagatatagatatcaattaaaaatcatattactgagccgggcatggtggcacacgcctttaatcccagcactcgggaggcagaggcaggcagatttctgagttcgagagcagcctggtctacaaagtgagttccaggacagccagggctatacagagaaactctgtctcaaaaaatcacattactgactagagggatggctcagaggctaagaatgcatactgctcttccagaggacccaatttctgttcccagcacccccataaagtactttgcacctacctgtaaccccagctccaagagattctcttctgaaccccaaaggcacctatgtgtatgtgtcgtggatacacacacacacacacacacaatcttttacacacacaatctttttggtttggttatattaaaagatccaggtagagttctccatggtcatccagatctgaggcctttcgttctttaattccaagggggcaaaatgtgttttctcctctctctacagcactttattgccaaagattaccaagtagttaagaaaagctagaccaataaaaatgatgagccagtaataaatacaagtgagcccctgccacttgctgtagaaggggctgtcatttgtatacatgaggtattataaaataaaaataatgcatatcagaattgtatgcttgccttaaagaattgaaagccatccaggctgacctcaaggattgcccctctagtaagccaagcataaatcatgcagagagcaggaagatgtggcctcctaatcaactgagctttactaatgttttcctaacacaagctgtcctttcagttgtgaattcaacttgttgattattttggatttttccatttgtactcatgatattcacatcagattgccgggcatggggggcactcatagaagcccataagagagagagaagatgaaacatcaaatcttgctatcagaattaagtaaaataatcaggatggcttccacatttctctgtgtaatagagcattctaagtcatataagaattatcatccagtcctgatagcacctgtaatcccagcatttggaaggctctgaggcagaagaatgcagaagaattccatgccactggccacaaagtccagaggaggttgagccccaggaattgaatgggcatctgagatgtcatggctgaagtggacttcacagacagatccctctcaacccacagccctcctactcaccatgcagccacccagaacagtttgtctgcctccagaaagagggacctcatctttccttgtgtagtggagcaagctcagtacttctgtctgtctctcttgagaaccaggactaggcacacagtaaaacctaaatacacaccgagagaactcatttgcactcgcagcagatgcagcgtcccttctcagagaaagatagggaaggaggtgggggtgggagtgggctctggtgaggaaggaagggcattctgggaagtggtcctctgtgtgaccacaagtgggggccacagcagcctgctgcctcagctgctcttgccagcccctgtagctaatggctcccggaaagtgctagcggttactgctgctcctgatctcattttattaggttttaatcaagctttcctgtgaagtgctggataaattcaattttagatttcacaaataaagtaatcaaatgagagtggggcatcataggcataaaatatttttcaaatgaaaatgatatttttaatttaatcatctggatgcaatatgtctaagtagcagagaaattgctgtactgcctgtcttaccccttagcctcagacagccatttgttcaaaagttagcaagtgatttccaatgatttaactgttttccctgctctccattaaacagtgacctgacaatagttaaactgcaccacagccagagcatggtgggatggctccgtggggaaaggcactggccaccaagcccgatgcctgagcactatccctgagatacacaccgtggaaggcgagatccatctcccacccggtgacttctgacctccacacgtgaactgtgtggccagtgggtgtccacactcataaataagcaaataaagtctactgagaactcacctcatatgaagacattttcacaggagtacaatttatgaatcttacgttcatttatgtggtatttgggaaagtttcatgtgatatggctgggtgtgtagctctgtggtagagtatttgctagcatgctgaaggcaccgagttggatccccagcacagaaagaaaaaggaagaaagaaaaagaaagagagagagagggagggagagacagacagacagacagacaaacagaaaagagaggaagggaagaaggaaggaagagaagagaggaaggggaggaaggaaggaaggaaggaaggaaggaaggaaggaaggaaggaaggaaggaaggaaggagagaaaatagaaaatagaagcaaacagaaaaaattaaactgggtatgatagaaaaaaaaaaaaacccgcagtgtgatcaattagtagcctgacttctggtctctggtctctgagcaccttgaaccctgctttcctcctctgtaaaatggatggttctccctagccttccagatctacaactgaagagtctttccctgtgcttggatagtctcccgaacctgactgtactgactcccctgagatccagccctggtgccagcacatgcactgtcctgcagcttcctggtccctgctggttgcttgctcactgatggtaccagtggcagtgagggggtgcacatcagtattgcctgcagtgggaaatgcccaagatgagagatagctctaatgtctgctttgttgcccaaagtaggatgccttgggagcaaaatggtcagagagctgtaatttttaatttgaatgtaataaaattggctttcatgattaaagctggtacccaggtctgagagtcttaacccattgtagtaaacactgccatggtcaggacacacagtggctccatcatactagaattttgagtaccactgaaatcatgtgtgtgactgactgcttacactcaacgtaacacctttgctgtttatgcttgttatagactaatctgcaccatcagtttgttctttctcataactgaggattgcttatagatgtctcttggtttgtttgtccagtacctattgataggcatttgattacattcattggagacatcacagggctactacaaacaatcatgtatataaattttgtattaacaaaggtttgaggttttgtgggggtgtgggtatgtgtctgtctgtgtgtcagtgtttatgtctgtattctggatttttttcaggcaggtttgtggtctatatctcatgatttttatttgtatcttctaaattgctaagaacattaacactgtttcatgttcacttgccatgccggttgccttctttggtgcagtaatttcttatcattagtttttgtctagaagtttgagagttaacgttttatatttagacctctggtccactttggattgagttgtgagggctgtggcttgaataaacacttgtttctgttagaaaatagatgcccagctaccccaggttgtcagattgccttcctctgctgagtcacatttgcacctctgtggccgacacacaggtcatagttctgtggctgtatttctgatcttcattttcatttcttcacatttacgttgtcctggtgacttcagctttatagctatcatgaaattcaacgacgcaagtcttccaaccttgcttttctttttcaaaaccgctgtgctggtctagctccctcgccttcctagctccctcgccttcccacgtacacggcagacgcagctttttgatatttaaccaaaacattttgtctgagactgtcttacatctataaatcagtttatagaaaattgacatctaaacagtactgagttttccagtctctaaatgtattttctcttcatctttagggtctttttttttttcatctgtattgtaatttgactttatcagtatttaatagttttcaatatataggccctatacacacactttgttagatttctaaatattttatcttttaaaaagtcattgaagggacaggtattttatttctttgtttttttttgttttgttttattttttgtttcattgtgtatttttcaaatatgtcattggattcagtttgctaatggttttatagccaagttcatagcgggcatcagtttattattttcttgtgctatctatttctggtgtcagaatgatgattcttaaaatgagttaaatgtgttcccttctatttcctagaagagatatggagaatttatggaatttctttagatgggtggtacaattcactaacgaaatcatctgggcctggaatgtctcttaaaatttttaggagatttaatttctccaatagacacaaatcagtcaggctctttggaggagagagggggttagtagcttgtgcttccaaggaattgtttagtctaagttgttgaattcagttgtacctagagttgttcaaataatcccttcttctattcagtgtcactgtggtctgtgctgagagcccccttgtgttcctagtcctggcaataatgtctctccatttctgtctcttaagctagaagcttgtcagttttattcattttctgaaagaatcatcattttgttaccttgatttccaaacacgttcatttcttacttttattgttttcttttgtctccttactccatgaaacttgttaaaggttaaaatcgtcaccatcgttgctatggcctgctctaattcattcttccaggagataccctaacagcctctgtgtgttccctccttgcagttgactggtctgagtgtctccaatggaaaggaccaacttgtagtgttccatacaaaagacaacaaagacctcattgtctgcctcttcagcaaacagccaacccatgagagtcgtattggagaacttgttggagtcctggtgaatcatttcaagaggtaaaattttatttttgtagataaaagacaacttttaaatacacaaaatgttgaatcatacttatcactaaccttggtttgtgccaatgtgaatatattgttttcctccacaaggacaaattaaagcatctttttcatagaaggtgaaattagcatccggccttatttcagggccaggagtgatcctctgcttttccaggatctagctttgtcaacaatgagagattccctcatggttctttcgttgctaccaatccaaatgtaatgtaattcagtccaaacaatagaagaaattactttattattcttatggccactgcttcacatttatcccaacgtaatcagttagtgtgtctgctgaggctataaacaagttagaaagcaggtttaaggtagtatgtggtttataaaggttgaggaaactcccaggacaaggagacattgttatggaaacagttatgacagaagagagcctatgctgagaaaactcactctaaagcagcatggtgtctgggggaagggcacagggagttggagagatggctcagcacttaagagtaccagctactcttccagaggacccaggttcagttctcagccccagaggctttcagccatttgtaattacagttccagggggtccaacaccttgttctggcctctgtgggcattacatacttatgtggtacagagatatacatgcaggcaaaacacccatcacatacacataaaaatagtaaaattaaaaaatatagataatggactacagatctctgctccctcctccccccagtggtgggaactagtcagtaaatacttttaaacaggagagtagattatcaggttatttgttggaatgttggagatggtcatggagtgaccatgctgtaagccgtcatggagtattggggcagggccctctcctagtttacgttctaattgtggtgtgctttctccccccgccccaaccccaaccccaaccccaccctatcctgacgtgagaacgaacaaggtcatgctacaaaatcagtggtggcaaatggtacaggtagcagtcccttttcttcctgaaagacagttccatgttcttagaaatgttcagagctgcctgctagtgttagacccatgaccacatgttctactgtctttattcttgctgataaatgtatatcgtgtaatgtaagcagtcttgttttgtttgggacatgatttctgtgttgaccaggctgacttcaaactcacagagattcatctgcccctgtcttctgagtacactagtctttgctattaagccttgtattctaaatcaaaatggatctttacatatttatatatcttataaattatgcttagtggtcacttggtagaccactctagaatgtatagaattgataaaaaaaaaagtgtgtgtgtgtgtgtgtgtgtgaaagagagagagagagagagagagagagagagagaatgaatgagaataagcctagtggaggtagcactccattaatcctagcactcaaaggcagaagtaagtctttctctgagttcaagggcagcctgatctacagactgaattccaggacatagtcaggctacacagagaaaccctatctcaaaataggatgtgggggggggggtgtggtgtgtgtgtgtgtgatgcacgtatagactttatgatggttcatccatattgtcagcttaactggactgggggatgcccaggacttgagtaaagctctctgttgggtgtctgtgagagcattccctgagccagttaacatgtgtagcagtagctgagaaggaagagcctggctctttgtgtgggtggcatcatccaggaggctggggcccagatggcttccctgcatctgccctacaactgtaaagctaagcttgcagaagggttccgaatgaaaggctatgatggaagcggctgctgtaaatgtccctagctcacatgagcaagcgtgtcttcctgtaaatatttagtcatggcaaagtacggacaacagaaggaatcatagctgattgtctctgacttgaagacttgcactaatgagcacagttgtcttgcccgaggagttgaagtgctcctgtctcagtctgaggtcttgtttagtaaattccagctggcattaaaggtcttcaccccatgatggaactggaacccatctgtggctctcttgtagtgtgcacattgttcctaggtatggggctcctacttcttacgtaagagagaatttgtcatttcttcaaattttctagatgtaagaaaagaaaattaccgagatgctaacactttttcccagtttatccttgtgtctgtcttatgaacttggagatcaattagtaacaaggcattaatctccctttcccaaaaccaggagagtcggacttgaaatttcagcttaaagttataatcatcaacctgctacttacttgatgaggaaaatcaatttcattttatttttctggccatagtaatttattgtctggtctctatcattggtgaggtcatcacagttctcagcgggctttgcaagcagactggtgttgcatgtaatcttagctgtcctgtgtcgatgatgaaaatccagaagggagagggattgggttcattacaactcattgtttcctagatttttccctaagcacattctgagaaattttaaagtcagaagtcagagggaacagggttcaaaactgcacggcacgtcagcccatagaccaatgaggctgcacatacccttagaatacaaggaggcaagtccatttgaaagctcagctctacctgtgtactcaccagactgagaagagaagaggtccgcagaagagaaatctactgtgtcatagaaggcttcccactaacaggtaacactcctgagtaagtgcaggagtgggcgaagggaagacaaagagagcaggctggtaactgcagagcagagctgaacagaagtggtcacggggcccacagcaggcctgtgtcctctgagtcatacagaccccagtgacaaagaatacatacaagcagagggaagggtgtcctgtacagaagacttggcagggctggagggagaccctaacccaacttgaaacctcagcacaatttagctgggtaaccccttccccctagggctactctccagcaagagaaaattagcaaaggcagatagagaaaggggggaaagaagaataagctttatatgtatataagaagcaggagagtctgggtgtggtggcacattcctgtcatcttagccctcacaacacgcagacagaggatcaagagtttggcagagtaagcatagtgtcacactttaatctcagcactcaggaagcagaggcaggcaggcttcacaaagaccctgtctcaagggaaaaaaaaaaggaagaaacaataaaagagagagagtgtcaaggtggagtgacagggactagatctctataaccctcacttaaacaacaacagaaataaatatggaaaagatgtttacaaggcctaggacatcaggcaaggtcagacagtgcttgctggaaggtaaaaacaaggcgagtcctgggcagacaccaggccatggtgtagaacacaggactctccctgaggctctgggtagcctgaggagactaggccagcaagtctgaagatgaaagtgccagagagaagatgcaaggtctcataagacccgcttaggcaccccaacgagctaacaagtgtgtgatgaggggacctcacagctagggaatggcacccagagagtgacaggcaggctgggcaccccacagtcacaggcctttgtgtcaggagaccttgcctcaggaagagaagtactactggcctgatgaacagtgcttctgtagcagctactgtctggtaaatcttctaagctaagcccacctgcttccgtagaaaatatcctggggcagatctcattgttatttataagaacacaaaaatttcacaaccagtaagatagaattcatgtttgacatccaaagattaccaggcatacaaatggcaagaatacacaacccacgatttcagacatttatgagttaacttgaaacagaagacaagggccacgtcaattcagtccattgctcttcatcaccgtcttcttgggggagcttaagccatccagttgctggcacttccctccatgtagtcccacactaaccacagctcaggaaataagcccttttctttcacctcaccctgaacctgttattcctgcccctccccgagcatgcgctcgtgtgtttcatgtgacctaaagcacctgaaggcagtgagggagcctgggggtccgtgggctaagcccgtgctttcccatggcgctacacccccggcccagaagatagactttaataaagcgttttctgaaaggtaaccctcagattcttcagggctaaggatggagttcaggggtgagggaaatgcctggaagcacagcacatcagactcaatccccagtatacacacacgcaccaaaagatatccaactcatggataaaccatcagaacagatgccacccaggaacatccaacagaaccatgccggctagtcccagctagagtccacggatgagaaatctctaaggtcagatgcgtttgggatatgccagtgaagccatcaggtttgcctcctgcaggacttctcagtgcctttcttttcacacaagagtcagtaggacagcaagagcactctgttgatgcaaaggcatttctgaagtaggagggagggcaaggcacggtcggaatggtatgtgtggctagccacgtgtgtggacacagatatctccttatagagacaaactccacgtctaggttagaatgcacactgggagctggacattgcctcatgtctattaccccagcatgtgggcactcctcctcctcccaaacatctgtattatggtaggaacactttttgttgcagcgtccttacttagggtgatatgctccgtgtatcttgatgcaccttgccttttttcctactaatccaacatgtacagctacaggtataagtagacatatacacatgtagctatcccgaaagctatgcaggaagcaggctcagcctctggagaaggaacacctcagctctgggagaaagatggcactgagacagcttgttcactcactgccagcctttgacaatgagtttgctaccatacttttttcagttaatagatggcagcctggttttagcattttatagatggctctgaattctttcatatgctccttttcctgattagagaagtagaacaaaagagctgtctcagcaaacgatgtgctttatgatatttctgtatcttgatcctcctgctgttactgctgttcccaatctcccccgtaacagggacacagggaagctgagctttctgaggcttggaggcaaggtcagccacaccagtctgcttacaggcagtagacacagtggacctgcctcttagcctgcaattcactcggcagtgactacctgccagtaatgaggattctgcccatcaataaacagatggtgtcatcttggcccttcctaacgaagaagtcaccaaaaaactgcaatattaagctgtcaaaggacccatctgccctatgcagctgtccaggcatttgcctgtctggatgctggaaacctcagtatagccccagtctcagacatggaaatttcctttttcctgttctgtgtctacggtgaaagcagaagttagtgccatctgctgccttgcatcttagaagctgtatctatatctgcttcagtaaaggtaaaggggcactgttgctgaatagttgaacacttgacctgcttctcagatggagcatgctcgctccctgtctgattgtctgtctgtctgtctgtctcagtctgtgtgtgtgtgtctctctctctctctgtctctctgtctctctctgtctctgtctctctctgtctctctctctctctgtctctgtctctctctctctgcctttcctttaactctccatcaaactgttaggtagactgtcacttcccaggtaggacaaggagagtggcacggagagaagcacctcctgaccatggcgggagaaacagaagaatgtcacatcccagccacctcacgtcatccctcccccaccccatcctcgcccaaccccttccagatattccctgtacctccccgctccttgggaaacgttttcgtgatccgtggcaggcatttctagactacttcccccaaatagctggatactcagcaatgtaatttatattccaactaaaaatctacaagcaaaattaacacagttgagactaaccagattgccagccatagaggatttgttctttctttgttttttcaagaaagggtctcactatatacctctgccatggaactcattatgtaaaccaagctagcctcaagctgcctcccaagtgctgggattcaaggcatgtgtactatgcctagctttttcattaattttgacccatctcagtggaatatatgagtacttcctcccacctccagggtcttgccatatagcccaaattggcctccaatttactgtctttgtcctgtgtcaccctcttgagtgtttggactgcaggaacctgtcaccatggtcatcttgggctatttagaattagtgaagtagtacagtttaaaagtgagtagtcatgggtcacattgctttgctgccagtagagatgcatatggaaacagggaaggagagacactttcctcagtgtatagattggaaattctactcaaacactgacctggtggcagagatggccttcccttgtggtcctgtcaccttgtaggccttcccccgctgccctacagggagccaggcttccatctgcatccgacccgacaagcctctcctgtgtgtgcttactgcagtactctggctggcatacgagtccacgggacagaggctttgtttccgctcttcacagcagtcctcatgtggtaagcagtgccgggcacacggaagggtctctgtaatactagttgaaagctgttaagcagttagctgccatgaatgagagccagctggcactagggtgcctctggcccttcctcacagacatttgtaccttgcctaccagaaaatgtgaaagacgggaagaatccctttacagcgccctgcccttatgagcacctccttccctgcactgttcatagtatagctctaagtaatgcaatgtattcagagaccaagtgattaggtatttcaagatataaagtcagcaactaaaaagtttatgcgctggaagagccgcgggtatgtgatgtgctgagggctgcagcttctccttcactcttccttaacaactaaacaactagacataatttcagactctccttgtcagtgagctgtcgaggaggcaggatgcagagagtcctgctcacatcagcagttccttaataagtaaaagactttgaaaccacactggcggctgtgcacatgagccggctcccagcttaaaagctgagctggggattctaactacaaacaggtggactggaaggggaacccagaagcctccacatgccccctttcatgtgaggaccccagggctgaaagatgtcttctttgctatggggcctataaggacagatacgaacaacaggaaagatatacataagagctataagaaaagcctatttctgaaagaattgtaacaggaaattcatattatagaagctctctgcttcaagaagtataggacatatggagatgaatgaaagcactgactgagaaacagctaaaaatgttcaggtagccaaatcaagccaaagattttaaagctgttaggtcagtgttaaagagtgaaaacagcagtcgatgtcacagaaaatagatttgaaaaataatgataaggcagtatatagatgagagtgatgatttatggtttttaattatatggtatgtggggtgagagggaacatttacacatgcgttgcaagtaccagaagagaccagatgcccctggagctggagttataggcgatctgtacctcctgacatgagcgttaggaacagaccttgagtccctgcaaaagtagcaggtgtttctaacctctgagcgtctctccagtttctaacctctgagcgtttctccagtttctaacctctgagcgtctctccagtttctaacctctgagcgtctctccagtttctaacctctgagcgtctctccagtcccaagaacaatgatttagaaaacgtcagagaggaccgagaacaaaggtctcacattcaaatggcagctgtgcttgaaaaggacgctgtggaacaaaagtgattgtggattctcaaagatctacctatatgtatttaattttaacctctctgaaatttagatgggacttataattgataggttgccatagctacaacaggcaattatatgaaagaagatgcatcttacaggatggtgttttatactctgtaaaacatgttcatttaaagctttaagaagaaaacttctcgctgggcgtggtggcgcacgcctttaatcccggcacttgggaggcagaggcaggtggatttctgagttcgaggccaacctggtctacaaagtgagttccaggacagccagggctacacagagaaaccctgtctcagaaaaaaaaaaaaaaaaagaagaaaacttctctatactccaagtattttatgtggagagctagtgaatgtctgtgtgttaccataatggctttgaatttaaggattctctctgtctctctctgtctctctctgtctctctctctctctctctctctctctctgtgtgtgtgtgtgtgtgtgtgtgtgtgtgtgtgtatgtgtgtgtgtgtgtatctgtgtgtcagtgtacacaattagaaatgtggacaattcccttatgggggacaaaaaataagattgcttttccagcagcagtaaatatctcaaccccctggagcaacatcttcagtcttttgagaggtaaaagttaggactcaaaaattatatgcccaaccaagctgtcatttgtgtttagcagtcaaacacctcaggaagtgtatctgctcctggcattcgttggcagagggacaactatgatgagaaattcaaagcctgtcacaacctccatcttttgtcttctgtttaccatctttactgtccccaagtggctccttctgtatgactggagacgtctgcaaataattctcagggaaagtaagggcattatctggggtctgttgtccaaaaatcccagttcccagcagccagagcaatgagattgtcatagtgtgggtatccagtggcagtcacttcgagcagagaaatgggtgttttttatcgtagtcttcaatacagagaggatgaggtttgggagaggatgaggtatatccaggtaggagtgctcggaggtgaagtgtgagaagctggtcctgtctacaaagagcagaagtggactggagaggcggcttactcggtaaagtgcctgctctgcaagcttaagaacctgacttctgacccctctcaaagccagccactgaggctcgtgctgcccagagatgggcacgtcgtgctgccagctagcaagctccagattcattgggaggtcctgtctcggaaaatgaggtggaaaacaacagaagaaaaacctgacatcaacctctaatgtgcacatggtcctccaaagtgtgcacatgcagacaaccatacctgcgcgcgcgcacacacacacacacacacacacactccgcacaaacacacacagagtaaaaatgatcctagtcaggaaagatagtatagcttttttttttaattgtgaatatgggggctggtaaaatggctcagaggttaagagcactggctgctcttccagaggtcctgagttcaattccaagcaaccacatgatggcttataaccatctataatgagatctggtgaccttttctggcctacaggcatacatgcaggcataacactgtatgtatacataataaataaattaaatctttttttaaaattgtgagtgcattaaagctataagagagtccattaagactttacatggttaagtagactatgatatttccatgcagttaaacagcatgcatccattatgaggaagcagtgatgagcttcctctttgtgccaggctccctagagtcctttgcattgacattgttgagaatatttgctcattgggccaggtgcagggtccatccaaggctgctaaagcaatacaggaatccaaatctctacacacaacaaagtttatgaggcttcatagctgataggaagggatcaggctgagcacatcacattttaacatggctgatttgctgaattgagaccacaaaattggttgtttggggtttgtttccgtcatcttgttttattgggttgggttgggttggttttgagataagatctttctgcataatcctagctatgctagaacttggtgtgtaaaccagtctggcctcaaactcacagagatcctcctgcctctgcctcctgaaagccaaggttaaaggtgtgtgccaccacacacagccaaaagtagatttttaaaaaataaaaccactaaatcttcagattttaaaagttattttcaagtaaaatgcaaagtaaatatcccctaatctgctgaaaagaaaggccaggctaaggggagggtttggagggaaagggggtagagggtaatggggattagaaatgctactagatagaggaatcccacagcccagccctgtctgtaacatctgcttgtcacaacgttgcagggcccacccaaggctgctaaacaccaccaggagatgtcagtcctcataagcaagaagtttgcagtggggccccacctgccccttcccagataggaaaccccatgtacaaatagcagacctctacataacaaactcaagctatttatacatatgctcagagccatctgtggaaacaagagcacagagagaaattttaaaggttttctgtgtgactaagccagggcccaaatcaaacagtaatgagtgctgtctcctgtgaacactgcacctgctcttctcaccctctgtgctgggcctgtagaccctgagcctcctgcttctgaaatagagctccctctagggtgcagggtacacaggcttcctcctttgtacccgcctttatgatggaggctttctaagggcatttttgtgcagatcaaagctatttatttgctttgtgacgtgtccatcattccctttcatgtggaaaaaataaatcccaaagtgcatcctttcagcctctctgcaggtagataatgtacatttagaatagtcatattagtttttgaaaggtcataacactgaacttttcaaagtaggtcaaaatggagctactgaggtattcccaaattcaccggataattagtagataacaccgtggttcgtgctgttttgcgtttttcctaacatgaatgtcagctataactctaatgggattttaaaaagctttccttaatgtgtttatctcaggtcctgtgagctatgttgggatcaggatcttatataaccgtaacacacgtaacctagtggtttatctgcagcaaacaccgctctatttcatgccattactcagcaggcatttacaggacacacactagacactgggttgtgagtgggtatagggggccataaagatgaactactcaagtcaaacgacttcagggaagtggccagctgcaggcacggtggagcaggattccccccagagaagagagcagaaagagaaatcttgatggagggcaatgtcctccatcagcgcagagggagaaactgggagattgcaaggaatcaaaggaagactggaagaaatgagccagagcttacaaactcctataactatgcatttgaactttctcatataaatactgtggagtcagtaagtataacagcataaaactggaggctggagagatgtattagcagctaagagcatttgttgctctttcagaggacctaggttcaattcctagcaccgagaaggtagctaacaccatctgtagctcaaccaagagaccacactctcctctagcctctgcagtcactacacacatgtggtacacaggcatgcatgcagacaaagcacccatacacataaagtaaaaataagcacatctttaattcatacacacatatatatgtgtgtatatatacatatacatacatgcatatacattggagatacatagagatagagatatctccaatgagaccaagcctaatgacatacacattaccgcaatgcactgcttgagaatcaaattgctgtccacttaaggagagtgggaacttagagaacacgtgtgtggggtgagggtgtgtgtgtgtgactctcacaaatcaaaaaaggaatcactccacaaaacactagcatgggtagaggttagaaagacagatgaactctcagtattaaaacacagtgataatagtgtgataaaatactttctcctttctaccttgtcttagttgggattttaatgctgtgcagggacaccacgaacatagcagctcttataaaggtaaacatttaactggggctgccttacaggttcagaggtttaatccattatcatcatggtgggaagcatggcatcgggcatgcaaacctgttgctgaagaggtagctgaaagttctacatcttgatccaaaggcagccaggaagagattctgattccacactggctgaagcttcagcctaggatacctcaaagcctaccaacacaatcttccagcaaggccacacttacaccaataaggccacccctcctaatagtggccaagcgctgaatcacatgaatctatggggtccatgactccctcctgtgcataagctggcagaactagagctatggctgagtgtacttccaaaggtgcagaactactctcaatgagagggaccaacacccagcccacaggcagaaaccggaagtggaccaggacctgactccctgagcccaagtcagcatacaaggcagaaagggtgcaagagggggaaaccgcattgcaatctcagagtagatgctgtgctgatttaagaactcatacaatcagaagtggggctatttgtcaaaaacacagttcaccaatgtgcattgcatacggtctgtatacttaaaaattgacatgggttaaagtcatacatatttttcccttaatagcatttaaagaatgttcaagttagagaaaactaaggctttttagttaatttagtctttgaaggaattatagcagaaaagtatatcatgttcagacttgtgtctgtcatttatgtagaatggtcagggaaggacatccttctgtgagatggtgtgatatctgtgagatgaatctgtgggtccttctgagagatggcaccttgagaggtgtcatgcactcaaggcaaagaagtccacatagctatttccaaagagcagtgctaggccctggggtatggtttccaaaagcattgacctaattctaggtcatacagatccccagcctagaaacggccactttatgctttccaacccagacttgaaactgtgaaacagctggaaaagtccataggtcttcacgttcactatggaaattttagtccaactgaattttaagatcttttagtcattacctcttaatatttagtatttatcaaatttgcctgataagtacttcatctaacttaccaaatttacctatttaccaaaagaaaatatcttttgacaggtttgcaactatttaattttgtaaagtgacagttaatggctttgggatttatttatttatttatttatttatttatttggttttctagataggctttctccttgatgtcttggaacttgctttgtagaccatgttgtccctgaattcagagacccacttgcctcttccttcccaagttctggaattaaaggcatgcaccactacacccagctgggagattctacagagttctaggagaccaattttcatttattctctttcttttttaaaaaagatttatttatttgttttatgtatatgactacactgtagctaactctcttcaggcataccaaaagagggcatgggaccccattacagatgattgtgagtcaccatgtgattgctgggaattgaacttgggacctctggaagaacaatcagtgctcttaaccactgagccatctctccagccctttcatttattctcctaataatagtttaaaacagcctattccaggctgtgatgctccaactgggagtagccagaactaggagataaggagagaaagagaagagtctgcatactagctgctaagtacactcagggcaataggggctggagggcagcaggagcaaaagatgagggaaaaaaaaaatgagctgaatgtgatgagcaaggttctgaaggccccggagcatgtattcagagcacagctcagagagtgcacacgacaaaaaaaaccactttgataagtatgcaaatttggtaaatttggcaaacttatcattcaacagattgaaactttgatgaatttgccatttgatccaagaaaatcctaaggtaatgagtcttgggaaaataataacgaaaatggaggagcagtgttgcttgtagagtgggcgtgaaaagacatcacctcagcgccaagggtgtcatataaaggtatcgtcttacacatgaagagataagtctggagctgaacctatgcactaagggggtgtaaagcccagcgagggaaacaaggacagctgggtgctttgttagttcagaggacacggggaggcgtgtccaactgggccttcaccttccaaaagctgaccagcagtgtgaacggagcagctgaagatgtccccatttggctagtgtgaactaagatcccaaaatgacaagtacatcagctggacatggtaccacatacttgtgaccctagtacttagaaggctgagacaggggcatcatgggttagaggccaggctataatacataacaagggtcaggccattgtgagcaatgcagcaagaccctgtctgtggagtggggtgtgcacatcagcgacagaacacttgcctggcatgcccaaagccctgtgtctccactccaagtaccattttttaaaattacattgttgaacctaatataaaatttccacagatttctaaaatagctctaagacgttttagagggaggaaagctataaaagtcagcataagtgtagtgataattaattgggaaaggcccacatgacagtcttcagaaacttcaataaagtacttctcactgaatttgccaaggacacagccccagaagaatggctttcattgtggacagcagaatcaggattcagaacatcttgtcaggctagactcattaaaaaacaacaacaacaaaacctgcaaggtaaatatgaagttctgcctttaggctcagcatgtcttgtgcacgtgtagaattagagcccctgggccatgtgtgtccctgagactcctctgcctgtgattctgagtcacacagcttaggatacagataggaaccactagagacaagagcataagatggttccttgagatgaacttttctcactaagttctcacaggactatggtacagatgtggttaggacagtaatactgacttagttgtccctaggtgctgtgcactcttggcctcatcctgcaggtcccaggcttttctatgaaagataaccataatcctttgcttctcttggacacattattattccagcttccctttctacaaaagaatttacaagaaaaatatttttgcatttgattattttaaatttatgtattttatgtgtatgagtgtcttgcttgcttgcatgtatttccatgtgccatgtatatacctggtgccctcagaggttagaagagggcatcagagcccctggaatttgaataatagacagttgttatcattcatgtgtgtgctgggaatcaaacataggtcctcttaaccatcagccagccctcctaacaactaaccatctcttcaaccctacatttatttaatagtccttactttgagtcttcttttaagcttaggtccaaacaaaggaatgtcaatttttctataattgtcatgcattttgtaatcataggaaaattattcaaatgttatgagattattttaggtctaatcacttcttccaaaaacaaagcaactaattaatcaggaaattcacacaattttcctagtggaaaaaaaaaatcagcttgattcctgataaaacagaatcattgcattcaaagtggcaaatataaagacaaggcagtactcatttgagaggtgccagtgcccagcacgctaggacagtgacagaccctgtctcaaaaaataaaggaagctgggctgcagatggctccttggaaaaagccacgcaaccatgaggaccagagttcaaaaacccagacccctcagtgaaaggggcaggaatatcagaagatgatgcagcaggtaaatgcacttccaaccaagtctacattcaatctctaggagccacatggtggaatagacttctgtaagtcagccatagctgggccacaccctcatatatacatccaacataagtaagtaaatatcaagaaaaaaatttaagatggatatagtagtgcttatctctaatcccagtacacctacaccccagctgggaggcagagacaggagaaaacctggaagctattgaacctggtgtatgcaacagtaagcaagagactgtccaaaagtggagggcagggacctgtactgaggttgcccacaccaacatacacatgaatatgcataccccctaaatccacatcattcacacacattaaagaaagagaagaagccagagcagtggttctcagccttcccagtgctgcagccctttaatgtagttcctcatgctgcattgacccccaatcatataattatttttattgtttcatcataactataattttgctatcattgtgagtcataagcaacccctgagaaagggttgttcgatgcattcccaaaaggtattgagacccacagattgagaaccactgagcgggagagatggttaagagcacttaccactctttttattttttaagatttattatatttatatgagtacactgtagctgtcttcagatgtgccagaagagggcattggatcccattacagatggttgtgagccaccatgtggttgctgggatttgaactcaggacctcttaaccttactgggcatctctccagttccacttaccactcttaaagaaaaccagagttcagctcccagaacccatattggacatctcacaaccacctctaaccccaactttaggggatcaaacaccctattgtggcctccttaggcacctatgcacatgtgcacatacccatacacagacacataattaaaaataaagtaaattttaaaaaactaaagaacatttttaaacaaaagacaaatgatatactgttgtaaatactattagatactctgttagttcttaatatgccctggccagccccgcaataatcaacactgagtcctgttgatttctttaatcagttttagcccaattactgggtgattacccctaatgtatttttccacactagactgcctatcttcccaggtgcgctccccaagttacctgctgtttgagtctcaacagggctgtcttgctccatcagtctgttctcaggtgccatgtactcctggtccatcctgtttaatggaagcctcctgctctctccatctttctcctctccctctccctctccctcccccctccccctcccctctcccttcccctcnnnnnnnnnnnnnnnnnnnnnnnnnnnnnnnnnnnnnnnnnnnnnnnnnnnnnnnnnnnnnnnnnnnnnnnnnnnnnnnnnnnnnnnnnnnnnnnnnnnnnnnnnnnnnnnnagaggttaggtttctattgctgttataaaacatgagccctccccctcccctcctttctctccctctctctctccctctctctccccctccccaaattgtatagtttagaaccttggagtttattatatggcttcaataaataataagtatattatatgcttcatataaaaataaataataaataaaatataataattaagtatattatatgcttcaataaagccataaataaaagctactgggatctgggattcggggaggaatgtccaggtgagacgggacaatgcattgtgggaagaagaaaacagtgtgacaaaatcagagtaggtatttggggatagtctgactgtgttctgaaagcagtgggtcatccttgagggcaagatcagaggttaaaggaaggaatgtggccaaaaatgtcagagatgtctagacttaaccacaaagccaaggagcttcaaggcacgtagatgaacttgagttcatgccagaatggaagtcagcaaagagagaaggcgtggtaaaaggagaaaccaagatagaatgtaagcaacacctagagatgatcagaaagggaactcagaagaaaaggaaaatatatccaacagannnnnnnnnnnnnnnnnnnnnnnnnnnnnnnnnnnnnnnnnnnnnnnnnnnnnnnnnnnnnnnnnaggagaggagaggagaggagaggagaggagaggagaggaggagaaggagaagagaagtagtgctactctattggtaaaaagaagaaagaagaagaagaaagaaaaggaagggagaacaggaatcagcctctttctgaattctgtgatgcagactcacaagtgtaatttttatattgtgcaaattcatgaaaatcagctctaggtgtgtgatctgtaggtgagaagctgcaaatgaggtgggagaagtgttctaaatgtggcagctgatgctaagtcccagataagaaggtcccgtgccatgttgggtggagacagtcctctgtagctgagtggtggagaatcctgagaagagacagtaccattttcaaaccctattatacatgtggggatgcatgacagccacactttctgtgtgaccctgatttggttgcaagttaatggagctcttatggatttttaaagggaaatcaccaaataccctactttatgagtttccaaagccatatcctgttatccttttatttacagtttctgccaaccatgacttgccttttataaggccaggctctctaatggctaccactggggtctcttcaaagcctctttctgaaatatggaagttccagctattggattcttccttacaccatacttttcaactcttactaatagaaggtaaattccaggctacgttgtgtgactgtccctggagtccttgataaatagatgcatcattgttaaacaatagttatgtattcaaaagagagaaatccctgagcagtggccacacacacacacacctttaatcccagcacttgggaggcagaggcaggcagatctctgtgagttcaaagccaggttagtctacaaagtcagttccaagacagccagagagaggtggcggaggagggagagagaggggggaatctacaacttcaaccgaatgaaagggctaaaagtcattatctgggccctgacaaatctggatgtgttactagatagtaataactagaaagtaggcagaaaatagcctttctgaaagagaggaagtaggaattcaatgctgatattaagttaagaaactatgatgttgggcatggtggcttacacctataatcccggtaatcaggaagctagggcagaaggaccacaaattagaggccagcctgagccacaaaactcaaatctcaaagaagaaaatccagggcgacctcagcagcctgtttttaagcctagaaagtatcaccatatctaggcagcttttgacatgcatcagagaattgtccttaaaatgattgccttctttttctaacagattagagtcagaaggtcagggttgtcctcagtcagccctggcaggtgtccttaatgcaaattcctaactgccccatcacttgttgcacctcctctgcataaagcaacaaggtcggaagacccaggttcctttataaacatgtagccatgtggttgatttaaactcttgccctcagtcatcctgcttaacacctgagcagcaagcaggccaggattgcagctggcaagagccacagaactcttcacagagacagatactttaataagccttccattccttctcccaaactcacctcgatctacccaaagaagagctcatttgattacagtttactctcaggttcttttggtggattcgctagagtgagtagtcaaaaggcggcagctaaaggctgctggtggctgtcaggtttctggccaccttgcttttgcaaacgttcactgtcttcacatctctctgtcacaggagagcactgatttactgcaaagcaagataaaaagtactgctggagatatgcagattagggacctgcccttgcaggatcctgttttcttccccattactgtggggatgctgacaccatgaacagatcttgggaaatctagagactgactgcatgatgaattttttttcctgatcccctcaacctagcagttatccatgcaaactccaaagaagaaacaggaatcctaaggaaaacagtcaggagaagctgaccccaccagaactgattggcaaagaccttgggattcccccactaaagcggagagagggagctcaattatcagaaaggctccccgtgctgctgactttaatagcatggctagttttccttaggttgtccctggaacattcctttccttgttgtatgtaatattctgcatgtacactttgtgtttaacttacttcaacaaaatctactataattgaatggacttacaacaaaacactcttaatttccataggactcattcatagtttccaccagtacagtgaaatgcttcaagtaggtctggggatagacctcaggtggaaggatgatggtctagcatacataaagccctaggtccaatccctggtactacacaaacctggtatgggaaagcatgcctgtgatcctagaattcaggaggtagaaacaggatgatcagaagttcaaggtcaacctcagctacatagtgaatttaaggccagctgggatatatgtatcaaatagaacaggttgaagacagctagagggtttagcaggtaaaggtgcttgccgcgcttgccactaagcctgaagatctgaattcatctccacaatggtgagacagaacaatcaaggaagacacctaatgtcagtctcaggaacttacatatcatcccatactcatacacgtgctcgtaacgcatttgaacttgaatacatacatgtgcatgtgtgtactatacacacacacttacaggtgggagggtgagataaataaaatgtaacgatttgcagccccagatgtctgcctcatgattttttaattttgaaaaattgaagtacatgtacaaggtcagtttagagtactgggagtggtggagctacaggaaggacaattagcctggaccaaaaggaacttcagatgctggttcatgctaaggacgtgtgatagaaagtgagctttgggagaaggcatggaagtgctgaaagtgcactgaagatacaggttatcagtagcaggtacgagcccacttgcctaaaacctgtccccagcaccaccacaaggacaagaactggaggcaaagaaggaatgctttaaatattcccagttaagaaaatgggcaatgaaaaaaattagtttacagtttcttgtaaaacttaaggatgttatttgatataatcaagataatgaagctaggaggctggagagatggttcagcagttaagagcactggctgctcttccagaggtcctgagttcagttcccagcaaccacatggtgctcacaactatccgtaatggaatctgatgtcctcttctggcatgtaggtgtacatgcaggtagaatactcagatacataaaataaataaatctttaaaaaaagaaaatcttacttcacaagattataaagaaatttcatttgaaaaacattcgagaaggtgcacgtggctgtgctgccagtgtcagaagaaaaggttaattcctttcttgacctaaagacagttcaggttttttggtttgatttggtttggtttggtttttggtttttggtttttgggtttttttgtttgtttgtttgtttgtttgtttttttgtttttttgtttttgtttttttgttttttgagacagggtttctctgtgtagccctggctgtcatttctaattccaaccctgttccttgtcctgacaccttctagagaagaggaaatcacttatcccagattcccagagtttacagttttctaggccattctgccaacttaatggaatcaagagtggctgggaaggtggaacgcttagaacaggaggagttccgcaggacagtagagtcccagctgaggctagactgcatcgatttcagctagaaccctgggatctatttctcaactgcctttctccccacctaccccacgcaccccacctcccttccatccctgctctccatgccaaccagtccttgaactctccagtgtacctttgcaacatgggtggtagaaagaccccaaggagccaagcatagtggaacactcctgtaatccacactcaggaactgaggcaggaggaaagcgagtccgggttttcacagacccctcttaggtcttttctgagcactgttccaagtcacacttcatcaagagccccctcaacactcaacaggggggtttctttcccttcctcctgccctcgcagccttgctgtctgtgctgtggtctctgcttcccctgttgctcaggctttttctcttgcccccctccccaccttagccagccagccttttccagccccaggtcatcctcacctcatcctcatccatgtacgtgcatggatgtatgtgtgtatgagtgtatgtgcaggtatacatgtgtgtctgtgtgagtgttataaacaggaatattatgttaaaaattcacccaagttccatttctaactctccaatagttaatgccacacaccctaaactttggcattacgtagtccatccaggcatagagaatcatgtggagccactgcggagttcctagagcagggaatgtgtggtgttccaccttgcagtgttatgagagtcggtaggaggaaatgacctcgctccacattttattttatttttttaacctttgtattatatttgcactaaaaatcaaaaaccatttcccgttatattaatcaacatgtaattaaacattttgttgatgaatttcatctcaattgcaaccttgtggatttgaagtacacaaattgatgcaggatgatatcacagatttgctgtgagatggtgtctactagtgatggcaggacacacccataaagtctcaccatcatgatcacctacaactcagtggaacaaggatagctccaatacatatgctgaaccagacagggaaaaatccatgaagcctgaaacatacccaaagaactacaggcaactgaggaaagctggtagtggaagaggttgtcttcccatgggaagaagacggttgtctgcccagtgccaaatgcttagccctgaaaacacattttataaccaaggaaatctgattagactatcaaagactgattaaaggatagaggacttcagatctgttgttcatccttagcaatagcataaaaatggaaaagtagtttagaggaagaggacagatacctcggggcaagatgccaagttctgtgccctggtaactgcagcggcgtggggtaaggattttggcttgttcagcatgggttagatataagtgcaactcatctctgactgcttaattacagctgtgtgtgaagacctccagaggaagatagcctaaagtccctcagggatgtgtgtaatgacttcaagtagctcagggagctggagagctttggtcctatctcaacccagaatcccctgctctgctttgttctggttctcaggacctacggaaaatagatgtccactcttgtgactcacccgctctatactctgatcttctctctcctatattctcagactttgatttctggttccctactagattcaaattatgcatactacagatgcgcagcagttgagaagctatgagagtgactacagagttgtatttccttcctggctctgtaaggaactggaaatgcagatttagaaagataagagagttcccagatgtaacccatcctgcttgggaaaggagaaccctgagaaagtgagctcagcttcctgatgggcattgctcacactgcacactgtgggtgctcagcttcctgggagggcattgctcacagtgaggaaactctcttctgggaggacagctttaccagtgggaggtggcattctcgggcaggagtctgggagtggcctttcactccctggggaggtcaccaccttaggaaataggttagatagggaagggctgcccaggaaaatcacatgtatgtcttttgtgccaggtgctagtgctggcctgagagtaccacattggagttaaatatgggagcctgtggcccaatacagttcagaacactcctgtgattagtcactgctcagcaggttttggcctaaagcaacgctgtccctaccaaacaatggaagtgaattatacttgcctacccaatgtcttcactcctaagagaacagattgctcacagaatgttgtgtcttctgcacatacacatatgtggaaatgaatagaagtttctgtgataccaggacagtgagagtctctgtcatcaatgcttacttacaacacagacctggctttgtcttttaggtcatctagtcatgattgtttcattgtccaatgacatttgccaagcacatagaacaaaaaatactcttctacaaatgggggagagtcaaggggtgacttaaaggcctcagccttaggagctcacatgtggaaagggtgacctgcataaaagcatctacaggagtagagtacacatctatgccttaaggctgcctggagatgggtgtaagtcatccacgtccggcagggaactcgggaaaggcgaggcctggcccacactcacctgggtggcaagattcagagcaggaaagttcagtgttattgtcaggcccttctgtgtaagtgactgccaggaacaacccaacacaattaatagaactatctcctttagtgacagtgtcccagacatgacaaatgccatggcaaaccaacttgtacactgcactgaggaagctagctggtaggttatgtaaggtgaagggactaatccaatgtgtgttctagaaagagaactctctaagtcatgaggaagacagcttgcaaagggatgaggccagagacaggatttctccaccgagccttgtatagttaaatgttgcttgttttaaaaactaaacatctcaacacaaacttgcctaaatgttggtcagaaagatgtctgtttccaataagaattgttttgaactgcatcaagttgcataggtttctgaacataacctagctttttgttgatagtgtgtgtgtgcgtgtgtgtgtgtgtgtgtgtgtgtgtgtgtgtgtgtgtgtgtgtgaacatgtgtactcatacacctcatggtgagcccttggaagtcaggacaactctgagaaactggttctcccctgctctgctgccctcttgtctgacctggggattgagtgcagacctgttcacaagtgtctacaaccactcaaccattgcctgtatcttagtctctttaacttcttagtaattttcaaagatattggctgcctactacctatcaacctgtcaatcattctaagaagtaccgaaggcaaggggaacctggacattttcttgagaaaaggtaacaatgccaaccatctctgctcgcccagatttaggctggaatttgcatgatcatcatctaggaagcggctactggccaccactgcgacacacccatcaccgtgacgtgccttttgaattgttttgttagctctgcagacaggttttaccaagccacccacacttctcattggagtctgtgaaacttgtgaatgcatctctgaggcgtctgacttggacaggggtgtagtctctgaagctcagacctgacctgcccgtagcaatggaaacagccagggccttcattacacaaggtgcactcagtagaacacacattttaggtgtcctgtgatcacccacgcctggtgcacatgcctttttacagggctgtatgtacttgataactaacagcaaagacagagaacagaccccacaatggccaaggcatcttgaaggggctagccatggctgaagccaagccagtggcatattcatgctgaaaaggcagtgtgacatgtcatctgtctgcccctgtacttactggacaagagccctttgtgttctgtttccctgtgataaactgaggcttacaattgctaagcaccagggtggtatacccaccataggtgttcaactgatgcgggcaagttttatcatagttaccactgaacaggctctgtccaggcgcctcactactcagcagagttcctttgctgaacaatgctctctgctccgaggtgacagtcaggacaaaacagtctaactcagcttccttctcattttcttctcgtgttaatttctgtctacctccaccttgaggcccttcccagcagccccttaccttcagccagaagctgccatttccttgacagttgtacctaagacaccccaaagccgatagcccaatcatgggccgctcttacatctacaccaggccctgggaaggagaccaagcacaggcctgctgctccgaaccccagactcagaatcacacgctccttgtctggagttctggaaatatcaggtgtctcaggggcctggtatagcacatatctgtgttggctaaaaggtcttaaaggagaaaaaccaaaagagtatgactgcttttctttctttttctttttgaggctagcccatggtcctcctgcctccaccccccaaatcctgaggttatgacgtgtgctgccgtgcttggcccacggactgcctttaatatatatatactttaatatatatataataatatatatactgcctttttagacatgtatatctaaatgaatagcatttatcagaaatgctgtctgccattaaggtaacaaccacagcctctgctttgttattattttgagctgacttaattttgtttccaatgacttaaaaagtattttccaccaggcgtggtggtgcacgcctttaatcccagcactcgggaggcagaggcagccggatttctgagttcgaggccagcctggtctacaaagtgagttccaggacagccagggctatacagagaaaccctgtctcggaaaaaaaaaaaaaaaagtattttcccaaataagtttggattcagttaaatttgcaagtggctcacatgtccatgtcatcaggatcttttttgaaagaaaaattgttttgttaggcttgtttatttgtgtgtgtgtgtgtgtgtgtgtgtgtgtgtgtgtgtgtgtgcgcgccacccacttcagtggctcttaaggtatgatctgaagtcattccaatacctccacagtgagccagcctgctctcttcggcctgtggagtttcccctattcccccatcattcccttcctcagggtaagggctaaaaaaagaaggacaccacaggccccgggtctccgtggttctccattacagctgtgatcactgttgtgtttcctctggtttataatcatctttagcttgtcatttccccgtaagtgagccacatgttcatggagaacgtggagtgtgtcactttcatttgactcatcgtggagcgtagcacagggcagcagcctctcacctacgttgggagacttggaatttacctggctaagctcagcgctccagcactaaactactaagcatggggtgtcggcttagagaggaaagaacaagacggggttctcactcacatttcccagggtgatactgggcaggaagctgatatcattctgtcttcaaaatgcaatgagtaactagaaacttctggctggcagcccctgctcagcctagtgtgagtgactggcaaagggagccaggtgagaggcaagaagaatcacagcctgtgtcagctcacagcctcgcctgtgctccagggcctgtggcagtgcccatcatgggaagccagaactgcaacatggcacattcttccccatgtcgtcgtctccagatggcctgcgggcaggttggaggcaacacaccagcctccaggtcctgcagcgaaagtgaagaattgtagataacctgaacacacctaagccgaagagaactaaaaaatccaagcacactaaagtgacattagactgacaagtagtggaggtgtgattgaatgtcacatgtgcagtgaagggacaggcaaggagctcctgaatgttctatgccttgcagctcttcctgcgggaaacaaacctttgatctatgaagtctgacagtttgaagtggcccctgctgctgatcaggtgcccatgctgagtgggggtacaaaatgaggggctcatgtagcccatgctggccttgaactgtctatgttgccaaggacaactaacttgcgatcctcctgcctctccctccctgattctgcagacacgtaccaccatccttggctgatcccagctttttaaacagtagggtctcagaaaccttagcaaaggaggcaggagaatggttccaaaggtaagagtacctgctgctcttgcagaggaaccaggctcaatttccctgtcagttctgtgctgtgtacaatgtgaacactctgcagagagcatgtcatcacaacatacaatgccaatgaatgttgcctgcaactctctggacacaagacttggctgtaatgaattgcagcatttctacagcaaattttctgctctttgagaaacataatagagccaggtggtggtggcgatggtggtggtggtgacacacacatgtttaatccctgcacttggaaggcagagccaagtggatctgtgagttcaaagccagcctggctatagaacaagttccaggacagccaaagctacacagagaaactctgtctcaaaagaccaagagagataaagagagaggaatattagaaaaacagatactttcatatattttcctaacattatttatcagcatatattatatatcaaattagtatatctttggattctgttgcactaaaatgtttgactttttttaattggtatttaagttgatgacttaaggggctagagagagagataactcagcagataagagtatccatctactcttcttgcagaggacatgacttctgttcccagcatacatcataagctcctgcaactccagttccagggaatctgacaccctcttctgcattcatgttcttgttctcatacagacacatatgtgcttaactaaaatgtagagtatgtgtatctgtatgtggatatatgtgtataagtgcaggtgctgtagtggccagaagacaggaaatgaaaaaggtgggggtgccagacttgaaaatggcctctgtgtgtaagtgtagtacctgtggaggccagaaggaggcagcagatggcagaccctctggagctagagttacagataattggttgttagttgcccagtgtgggtgctagaaatcaaacttgggtcttctgcaagaacaatgcacactcttttttttttttttttaatgtatatgagtatgttgttgctgtcttcagacacaccagaagagggcattgaattccatcacagatggttgtaagccaccatgtggttactggggattgaactcaggacctctggaagagcagtcagtgttcttaaacctctgagccatctctccagccccaaagctgattttgttaattatagtctattcatgagaatgcagtaagaagtgaatacctgaccagcctgaaggtcaaattgaagtgcacactcattcacacacagacacattctaaagcacttagaaaacctgtatagagagatgatagtagctaatactgtgtttgcttcagtcatacataccctaaaactggagcaatacagagtatgaacccatgcaaggtccctgccaggatctaattatacagtacctgtattaatttatataaacctcacaggcctaggaggtgaattttatccccattttatggctaaagaaactgaggcatagagaagtgatgtcacttgttcaggtcatagctaatcagaagagaccagaactcagtgggtctggctgcagccttctgaacttggcattctatgaaagactgcaatctctgggatatggactggtattcaaagcagagtaaaacatgtggaacagaagtgcgttttaaatagaaaacgtgaaagccaggagtgccgggcttggaaatgtcgtttcctttggtctccttgggaaatcattctgtagcaaacaagaaagtcttggagcgtttcctttgtgaaagcagtaggtgttgggctccttgctgtagacagtgcggtcactgacagtgagtcctcaggtggagagcagtctgctgttttcataccacaggtgtggccctgtgatgacagccacaccttgcttgttctctctttatcctctgtgaaaaagcactagtaatatgtgcttctgggcagtaaaccacctcatcagacttgaagggaccctctttgctcctgagagctgccacaccggccatagatgctgactgcctagcacctgtggtttcctccagcctggacatttccagggttgaagcactcagggctggaattttctcttagagtcaggaaaggccttacctccaagactgctgctgctgactgtcccactcagacaagctgtgttaagccacacttacccataggctctaactcccaatgaggacacatcttcattctaaaaaaaaatgtgctgagaaaagccagagagatggctcggcggttaagagcactggctgctcttccagaggtcctgagttcaattcctagcacccacatggcagctcacacctgcctgtaactccagttccagggtatccatcactcttataagacatatatgcagacaaaacaccaatgcacataaaataaaaataaataagcattgaaaaaagttttttagtttgttgagataaaaatatcaaaataatgtttttggatacctaaaaatggtatagcttacaagccttgcgcccataggtaaaatattatgggaaggtagtagagcccccttgtatatgatccaagagtctgagctagggcgagtgactgaaccagaatttgtccaaccaagcatcccagaccctacccaggcaaaccaccttcacctggcgagtaaaaggctcaccttattttactaagtagtaactgcaatgcttaaaccccaggcttggcattctgttctgtagttacttatcactccgacagcatcagtcttcaactgccttcaccagagtgactcttctgtataatttctgtgtgaactatttgaagtctctaggagcaccaggccacattggaaaacaaacatcatcaagacactggctacacaaggagcctataaatgcctgaacttaagactcactttttgccgggcatggtggtgcacgcctttaatcccagcactggggaggcagaggcaggcggatttctgagtttgaggccagcctggtctacagagtgagttccaggacagccagggctatacagagaaaccctgtctcgaaaaaccaaaaaaaaaaaaaaaaaaaaaaaaaaaaaaaaaaaaagactcactttttactgtatgtgtatctgtgtgtggacatggtagatatgtgcatgtgagtgcaggtactcacagagtcagctccctggagccacaggcagttgaaagcgcccaacatgagtgctgggaactgaacttgggtcctgtgccagatgtgtgtgcctgttgcctgcagaggccagaaaggggcattgggttccttaaaactggagttacagatagtttggaagagcgcccagtgctctcctgtgctttaaacctctgagccatttctacagccccaccaaagctgattttaagtcacctgtcctgtatctgcatagtatacaggacatagtctgtggcagacttacttgactgaagatgaactataataaatgggttttcatcatcttggtgaccacagcaaatgcttgggcctggctgtttcccctaacaatacaaaaacagctccagaaaatgttttcctgtgtcactaactgacctcttcctgaagatgtttaaaatgtattatttaaccagcttctatcactgagcatccagagtcctcaggtttcagcattctggcagtgctatgaattagtctcagatatgtttattcctattgtagttgtttactaaaaaaaacaaatcctagaaacagaattgtgagattaaaggtatgtgcttcttaaggcctttttgatccacattctagatctgccccgggaagttactgcgtgttttgtgcgtctacaggctaggagcaggccccagctagcactctgacagggaagaaacacttccccccattgtttagccaacattcatatggatctatctactagttccttgtgttttatgaattattcataagttttgtctcttattagcatgtcgttatttggtactggtttctttttatgttggtatggatctactttttttctttttttaaaaaatgaattttaaatacagtttatatgttgtatgtatatgggtgttttgtctgagtgtgcatcggcacaccagaggggagggcattagatctcatggaactacagttatagactgttgtgagctgccatggagttctgggaatcgaacccaggacatccggaagagctgtgctcttaactattgagctaactctctagcccttggtactaatgcttaagagtgcttcttgtagaggtcatgcatgttgaagacattttctttgtcttttcaaattgcattatcttttctgtgacagttttgtggtttatgtggtcaagtctttcgttttctttaacgtttgcatgaaaacatttttttaaagtccagggatggttgtgtacaccttaaatcccagcactcaggaagcagaggcaggaggtctctgagtgtgaggccagccaagactacacagagaaacactgccttaaaaaacagaaacagagcctggcagtggtggcgcacacctttaatcccagcacttgggaggcagagtcaggcagatttctgagttcgaagccagcctggtctacaaagtgagttccaggacagccagggctacacagagaaaccctgtctcagaaaaacaaaacaaacaataacaataaaaaaaaaaacaaagacagagagacagagagagaacttcctcacccaaatataccaaatattcacttatatttggtatattttcactcttttatacttctgtgaacctcattttcatctgtttggttttgtatggtgactcggacccagtgctttgcaaatactaggcagtcattggctcttcctctaagctacattgccttctcttttattgtaaatttcaatgatacgttggctttagtcagacttcctacttaatagacagttgtagaactgtggagcacactttgaggagaaggaacttgcaagagggaagccagttaactgggtattcagttgaacaagaaggccctagccatgcctgtgattcggacctgtttgctggtgtccgccagcttattataaagcagtcaccccattgtaattcctctgctggtagcagtgattctcagcctcggggaggggcaagggaaggaactccctgtcagttgggaagcccaagaggaactttcaggaaggagcatgtttaacaggatctggaggcttactgtagatctggtgagcagatgatctgtggagactgtagagatgggggaggtggagccttgggcaggagagaaactcagaccaaggattcagcaagggtgtaagtcatttgtattgagaatccaagcagtgagcggcaggaatccctcaccttagggactgaatggagcagaaagggtaatagagtagaagccaacactgcaaaggcaccggaagtagtaggagtgactgatacaagacacacgatgataattaaaacaaaacagcagaaaagctggtcaagaagggactcaggcactccagctcagaagcaggaggaggagacctggaaacgggcaggtcagcaagcaaacaaagctatcaaatgtgtcagaactcagaatgacagtgacccagggaagaagtgtcaaggccagagtgctctggtcactaaaacattgtagcaccctacatctacttcctgtttcaagctacagttggctgttcttgcatatcaggtccattcccagctctttagctaaacatagcacttcctgtactgttgccaaatgtccttccaccccgatgagccacttgtctgtcaggagctacctcaaatgtattccctgtctagaagcaatcctgtgcatcactgcccagaattggccattggttctcagagttggcacccctggcattcctacctccactcaaaaatatttagtcacatagttatcaatgcttttgtgacttctaagaaaggtttccccaatgacaatggcttaacacttcctggagtcgtgtccaaaacatacttgtttttattttttatttgtttacttattttttaagatttatttattttatgtatatacactgtcactctcttcagacacaccagaagaggccatcagatcccattacagatggctgtgagccaccatgtagttgctgggagttgaactcaggacaggacctctgtaagagcagtcttaactgctgagccatctctccagccctttgtttacttatttatgtatatcgttattttgcctttgtgtgtgtctgtgtatttcatgtgtgtctggtactcacagaagccagaagaggttgtcaggtccccctgggactggagttccagatggttatgagccacggtgtgggtgctggaactaaaacctgggtcctctgaaagagcagtcaatgctcttcactgctgagctatctcaccagcccagcaagcttctttttaaagtcttgtgttgccactgtgtaatagcagtgctgttccaagtcaaatgtttttgattattagacatttcctattacttctttggtgtaaagctgattccatagcaaaagtctctttattccatggcttttcttactttagcctcaaagtaaacttggaccccagaagcttgagtgacataaatgcatcatccactaagcgaagagcaggtccatatagtagagactgcatctttaacaccgtcttgtcccagctaggtgcctagggcacaataggcattcttataataagagatgggaggtagagcgggcatgcagaagggagggagggaaggaaggaagaatggatgaatagacatcagaaaaagaggaaaggacaagcatgcagaggcatggagagatgggagagaagggaaggattacaatagtaagcaataagcagggcagaagcacgggtgtttatatgaatcttaagttggctgtaaaggtaagagagagaaggcagtaactacaagtagcttggtttgagggcacttggtgggatatgaggtacagcaggatgtgaagattggttggtttatctaatggaagagatttgagcatgcgtacaggctaaggaaaaggcagaaaagaaacttaaagaaaaaatatttctttaattactcaataagtacttactgagtaccagtaatgtaccgagcacatgtactgagcactgtaccaggggaatgagcaagagggactgagctcgtgccatgcagcttgcatcccaatggacaatgtcctagctggtgctgtctcaggaagagccaaacatggttatgtgaggccaggtccaatgtacgtgtggtctgcaaatgcctgaagaaaagtcacccacttcccaaagcctgaagcaagctgtctagagtcttgtctgcgtgtgaggggcagtgggcaggagcaaagagggattggctgctgtgttctctgctgattcaggcaaagtggtgctctcagctgtcacagtgaaacaggcagcaagacaaggctgagtctctgtctagccagctagcctaagccttgctggtcttcctaagtgactcacttccctttggggtggttttcctaccaaacaccatataagacttatatccaaaaggaaataaaatatgtatctgaatatgacctgcaacttgacttaattcacttctgaacattataccatagctctgtgcttcatgatggcaaagaagacgttttctctataacaacaatagaggtagcttggaattctagagtcagataatattacataggtaatattaagaaatgacagcagattgaataaagagattgtttttagccaggtggcagtggcgcatgcctttgatcccagctctcaggaggcagaggcaggtagatctctgagtttgaggccagactggcgggcagaggaagttccaggacagccagggctacatagagaaaccctgtctcaaaaaccaaaaatcaaaacaaccaaacaaaaaactattttgaaacttcttcacttttctctgttcctcaaataataggcaatttcctaaagttttataaataggaaaggtataaaaacatttttaaacctaaaaaacaaattacagggtatgaacattgggtattggcttatgatttgcatcttttcaacagtgttgctagaggcctttctaatcctcatgattcactacagaaattttgttttaatctttctgagacagcaaatacacacaacaaaactagaacactgtagtattaaaaaattaatataacatattgcttaagaaaggaatcactgtttaatatagaaaaatcatttatttcataatattcatcataaactagatttcccctaacatactattgatcctacagtctgtattacttcatttctattaaagagttcttagcgcctgggttggacacaattccagagtagtgtgcctttcagggacattctctctcacatggtgttcatgtccctcttcacggtcccgcacgaatctaacgtatgaaatcagctaacgtggccttcatgtgacaccaaagggaagggcgtgcctgtattgaagagatgtaacatccatacaggtcattgacaaacctcaacaccaaagaacaagctgcctccctttaaaggctaaagcgtataattactttttaagccatgcagttaatgttatacacagacagtcagacagcggagactctctgaagtcatacatgcagcaggtagaggtcaaggcaatgaagagctcctattgcagcctgccctctgcaacacacacatgctctcgtcgtcattttgttttgtgtgaggcaggcccttgtatggcccaggctggctctgaatgccttctcctccacctccctgtgcaaggtttgaaggcgtggaccagtgcactcagctggccacatacttctaggataaattttcaatagccatagagttttcggaccataagcccacaaaagcaggttgggggctttgtagaaactctgtccatggtaggagcaatccacagagtagtaacctagcctgtcctaacccagaatgccacgcctagaggtctacaccccaaaacctgacagtctcttggaatgtgtggaagtggtggttggtggatcatggtaatgatgaaggacctttcccagtctgcttatctgtgtttctaagaaccacgggctcctgacttcacagaagtcacctttcagcgtgaggacacagcccacatgatatgttaacagcaaggcaggatggggaagcatggcatttattctgttcccctgatcactttgaatgtcacatttcttatctgtaaaattgggataaaaatacctgcctccacagagattaacctaaatcgggaaacaatgtgaactgcctcgtgccatctctgtcaggtacttggtgactgatatgtttgatgttccactgtatagagcgtgctggaaatacacaagggaaagctgctcaccgtgtcgagcaagacaaatgctcctttttccacagtgtggtcagtcttcagcaatggagcagatcggaaaacctccagcaaacctacacagacacatagccagctgccctcagctttctggtctctggtctaaataagcctttgaccctgtctgtctgtatgacagtggcattgcaggatgtgaactggccgagttgaaatgccttcctgggggctgtcctatgggcatgtgaacacattttccatatgtaggagcataaagatttaggaaagcagtgggtactcttaaatgattatccccaagctgtgtgcaccccaccacaacccccacccaaagctcctttgtctgaaactcagaaggttctgggaaggagccagcatgcaggaatttaaaagacaactgctacagaacaaaaatgtgtgctaaaaatactaaaaccaacaaggattcatcatctgaaagcagagcagactgcatgtgcccctgcttctgggccccgctcactccttgatggctctgtgctattcgggggtgacagtaattatggagctggagtgctccttggcagaggcagacagagcttggagcagaggaatggtttccatggcaatggcatcagcatctgaatgacttcctgtcacaacaagtttgtgatttaatgagttcatcaccgaattccaaaggaaagccagagtagatgagctactgttgagagcttggagtggctcatcccagtgtctgtgtgtgtgtgtgtgtgtgtgtgtgtgtgtgtgtgtgtgtgtgtagggggagggggcctcccgtccagtgcagcatgggaagggaccaggtgctctgtgtgggattaggagccctgtggcagtgtaccaagaagagggagtctagacaaaatctgttctaggagggctgccttgctgttctctgagttgaaagaatcacagtcctcctgcgaagctcacccttctcaaacctgaggaaagggatggatcacaggagttcagttcagagcttcagacacaggtcctttagaaagtaaaggcataagagaaagacctcaaattctagcattcttgttgtgtgtgaccagaaggaaaggggaacgaacgcagggtacctggtcacactccgtcacagtacagggagaagtatttaacatggagcagaagtcaatcactgagacccctcccagaactgaaacctcatctgtggccagtagcatatacaacttgaattgaggggcttggggcatatttcctatgcaagcatgaggccctaagttccatcccaagaacttaagaaagaaaccaggtgtggtggcacacagttatgttcccagcactggaaggtgaggaaataattagattttaaggcttgctagacagccaacttagcccagcctgtggtgagccccaggtccccgtgagagaccctatctcaaaacacattgtggaacgacacccagggttgacctctggcttctgcacaaccctgcatacatgtatacatacacagattttatttttaaagatttattttatttatatgagtacactgtagctgtcttcagacacaccagaagagggcatcagatctcattacagatggttgtgagccaccatgtggttgctgggaattgaactcaggacctctggaagagcagtcagtgctcttaaccactgagccacctctccaacccgtatgcatagatttgagctgagaagtaagaatgcattagaatgtactgtccatacttcagcatccttactaatagttgggctggtacaataatgccacattagcctagtcaattaccttgggttagatgaaggcagaaggtagtgatgcccactcagtcctgttagtaggaggtgggacagcattccatgcctcttgtgtgcctttctctatgggatctcaatgggatctttaagccatttaccatggtttaaagaagttcagcctctctggggactacctcagaggcaagggttttacatgcctctttctcatgtaacctagcattatcctagggtggagaatattgtctcctatcttttccttttttgtttttatttttgctttgttatttgtttgttttgtttcaagacaggatctcactatggctgtccttgaactatgtagatcaagttgtccttgaagtcactatgtagcccagactggccttcacagagatccacctgtctttgcctctcacagtactgagattaaaggcatgagccactatatctggctatttgttttctttccataaaaaagaaaactcagccttggagagagtgtctggctggagacatccacaggtagtagatcgatagcagaatcaagatttccgcatgttctccccatctccttagttggtctctttaaccatgcagccttcaagcagctgtaacggggcgggctttcggcatgcagaaggaagagaatgagaagacagctgcttgatatagcactataccttggagggtgattccacctcgctaccttccttctgcctatagtaagcaaggaagaactgcagaccagaattacaaggcaggtgtccaggtccgtgctcagttacaaagcacagagatgcacttaaactgcaaagcaccaaaaacatctgtgctgtctaccttctatgaaatataccagattaaccaacgtggtgggcaggcttatttggtcttacactacacgtatgatttttatccttaaacagcatacaaagtaagatggatgtgtgtgtgtgtgtgtgtgtgtgtgtgtgtgtgtgtgtacatgtgacttgctaggtaaggctggtccttttctgtaatcgtgaatataaagggaaatgatcgcctgatgataggcaaatgtactgactttcaaaaatgatgtctggcatattttcctggaattcttgcagttactggcttagtcttgcttttccatccctaaccagtcaaatgcagcagagaaggctgttttgtaagcattttgctcaggacatggccagtactgatgccagagcttctgaagctgtaccagccccgacatcctcctgtacagatccattcaagacatatccgtgttttctccagctatgagtacagttatggcagcgttattctttttttttttttaaataataccagcgtgaaatgtgaaaaagcaaaccctgtgtgttttaatacagatgggattatctaacgaagcttcaacaggctgcccctcctgcccacccagtctgctgcagcacccacactgccgctcctccagacaactctaggcttcaacagcctcacagccttctttaaaataacccataaccaaatgatcaatgaaattccttgtaatcacacatcccagatcagatcagaactcaggatcaccgaccgtttcttattttgctctgcccaccagctagccttgcccttgctcccacacttggggagtttgcctcccaggtgtaagaaggcagttcacacaagcccccttggattttccactaatctgtgagcgcatgtgaggcagtctgtataaagtagtcactgcttttggtccccagctgctggcttccttctagccttacctcccactgagtttgcaaaggcattttccataagcggcaagttgtaaacatgacagtttttgctcattagatgggccttcccattaggtctacaggtctggacatgcacatcaatagagtgttaataactgacaaggccacagctgaaatagggcttgcctggtgtcacaagacagacagtgtgcctcacctccctgtcacactgtgggaagcagacagtgggcaggtctgcacatgtatgtgtctaagaccagatacagcccagctgtccagagcagcagagcaggcaggtccttagtctgggagtgaaaagaaatggttccttctgtcccctgcaagaggcttcccaatatggctggggctttcttcttttccttctccaagacattgagcaaatggaagagtaaggccgaggaggacagagcagtgccaccagaggtggcaggtgctgtggtgggtgtcttttccagctcagaggctcctggaggagcctggagctgaccttccagaaggagaggacagtcttcagagcctttagcaaaaaaaagttagcaagtgggggttattccactaagcacaggagtgctaagactgagttagcctgcccgtgggaggccctggagagtcagaatgaggcaccccactgcttgctgaatcctctgcgtcccaagtccctcctcgagcttcacaggagtcgccaggagcaagtcagaagtgctttcatcgcctctaatggaaaccttcaatatcccctcaccccttctaagctctctttggctctcaaagaaccatttattttctttccctatagatttgcctgttcatataagtggaatcatacaatatatgatcctttgttgttggcttctttctttcacttggaacaatgctttcaaagtttatccatgttgtacagtatatcacagaactttattatttttgatatgcccagccatcagtttcatagctgcaccttccgtttgtttctttggctggttggtttttggtttctaagcagccttactagcctgacacccgtgagcctcctgctgaggtatctgagtcaccatgcccagattaatattcctatttttatagaccatttatttaatccctcaacttaaatccctcttctagacctgatatcaacaatttttcctgtaaagaatcaggtaatgaatgatttatgttttgcaaatcatgttcactttgccatagtatttggtttgtccattgtagcacaaaagtagctacagacaatatgtcaacattcagacatgaccatgttcccacaagccttatttacaaagcggccagccaaggagaggaggctgctgtgactagagttgtcaacccctcgactaaagaataaatgatgtcattcattcctatgaatactgtaaaattttcaaaaggaaggttattctgaattgattattaattaactgactgtgacctgggtcatacaagaccaaaataagtagctggatatgtaaaaatgtggagacactgttaatatgggtcacccgagagccctggaggaatcatgcctgccgaggctgtaccccgcacatctccattccttgaacaaatcaagtaagacagagctgaagaagtggcttttatccaaccacacatttctgggtcaaaggtggcctttcaactacaaaaatagaatttctacccaaaatctacttcctgctgacaagaagtgagaacggttgtgtctatgactgtgaaaggaccttttcctcgagcattggaataaaatcttggcagtacacttttaaaaggcagtcagtaacaattgctggagcccagccagtgcccgggggcatcaaacaaaaaagtactgctcagtacccactcagatccctagagacgagacaaacgaaagcaaaatccacactagatagcatctctgcattcacagtaattccccccacctccaatctaacttcaagaaactaaccacttagaattgcctgctggtcggtctgggaaatgaagattccgcacctgagattcatcagccttggaacccaagcagcagtagttttgattcattgatcacaattttaaaaatcagcctggaattcagaaaggtcccgcgcagggctgtagagatcattcagccattgaaggctcaagaccaaaaaggcaaagcagcctcatgcgtacggtagggtctcctttttttgacttggaattcacattggtttccttcttcccagacctgcagcataagaggaccagagtctatagccaaggagacccataactctagtctccacaccagccccgctgcccagccatgctgtcagggacagagtccagcagggaaagagaagctggtcttctccctcaggctacacagtccttctcctacaaggaaaacactcagctttgaaagctatatatgtattgggggctcaagaaatggctcagtggttaagagagcggactgctgtggtagagggcctgagtttgggttcccagtaccaataggccacacacagccacctgtaactccagctcaagaggatccagcatccacttctagactccaagagcacctatacacatgtgcacataccccagcacatacataattaaaacatatttttcagatgtcattgagttttatataaatattaaacaaatgcaattaattggggttttttttccttgtcagtgaggttgaagtctttgtttcagagagtacgcctttggtggtttttgtttccgcaaagagtatatttaaaagttacttcgtcagtctgctttgcaacaagtactgtgtacaaggtcataacacttggtgcccatgcttcgctgagtgagaggcactgcgcggtcacctgtctgctttaacaacactttcacatagaccaaaagagagtctcattttcccagagcatatgactcacttggaaattcaggtgggtttaaaactctgaagcaattaacaccagaaggaacagcctctggtggaaatagcacagggcctgattccctgagaaactccctttgtgtacaacattctcagggctcgccaagtgtcttgtgttactttgcaaaggccacccgggtgcagctgtacggacttagccgaatgattttaatttttctacagaacaaaacgtgtgtgtgtgttcgcttcccatcctgcttgtacttggggcgctggcagaggccacacctgttgctccccactgacttaagcgcagcagctgtaaggtcttgagagtgtccgctgttttgttctcttgtttccattgcttgtggctttccagctgacaccaaagcagaagcccatctcaacaggaggcagggagcagtaattcaggaagggaaacccgttcccaaagtgaggcgttcatattagccctagcatgtgtcgggagcaacagaaccaaccgtccccatcctcctcactgcttctgagagtcacccttggtcacaggtgattacactcctcacagtcaagcctctggatatgctgctcattggggatttaaccctcaagcgtcctgccttgaggaatgggacagggtgtccttgagaactttcagactaaccgcacagtgggtaaggaatggtgctttgcagtagatgatacagtagacgtgaggaatgaacacaagtgtgactggagagactgcgcagttgataaagcaagaaggcatacattctgtccccagaacccatgggtggtggtgttgttgttgttgttgggttttttttagttttttttgagacagggtttctctgtatagccctggctgtcctggaactcactttgtagaccaggctggcctcgaactcagaaatccgcctgcctctgcctcccaagtgctgggattaaaggcatgtgccaccatgcccagctgaacccatgtttttaaaaagtactgtgactgtaaccccagagctggggaaccagcaacaggctcgctctgggacccttgggggattgctggtcagcatgctcagcaggctgcaggccaggaagagaccacattttttaaaaacaaggtgaaaggctctgaggaatgacactcgaggctgacctctgactcatagttaaactcatccccgtgcatgcacacatacatacacaagtaaagaaatgcatacataaataacaaaagagtgattccgtcattctgatgggaatattgaggcacaagctgtccctgttcagtaggcaagcaatactgtactctagacatgtcgtctcaggtgcctttccccgtgtcagcaccctgcctggtgtgctccggctgtttcccgtgttgatgcttgtcaggtgtttgaatgacctgtcccacattcatgaatgcttttcgacacttctcaggatatgcgcacatggttatttgtgtgtactttacaaatgaggctgacaatgacaatgccttgagccaggatagagaagggattgacgtctttaaatgctggactgacaccatttatttaaaaaacaacaacaacaaacaaaaaccaccttagagaatcatttctcaacaacgctcttatttccactcccttgggtcctgcggagcaagttcaatgtgtaacgcagaatcttccagatgaagtggcttaaactcagggtgaagctggggtgcagcctgggaacccagctccctggcaggagtgtcaggaatacaaagtcatctattgtgggagatatagtaaatttgagaccagcctggactacttgcgaccctatctcaaacacatacacacacacactcacatgcacacactcactcactcacatgtacccgcaacacaaactcacaccagaatggcctggaaggagctgacagcctgtggactgtgaagccctagaacaggaattgggaaccatcaagtcctttgcttcctccctcctgcctgtctctccttctccactttccatctctgtgtatagtgtgcttccgcatagggaatacctaggcacacttgcagccagtttaacagcctaaaaacaaaaccaaacaaaaaacagggggaacttttctacctcaaaatctatgaaccccaggcaaaggctctgattggcccagggtatattaaatgccttccaccaagcttatataagtgaggctgcaggctagatccttgaacctgaggagcaagtcctaagataggaagcttccccggaacgagaaggggtggatctggtcacctaagagactggatggagatagaacagtacaaggaagagcaagtggaaccccggggcggacagtcgagcacccgagggctcttctgcagcccttggttggatggagactgtgttcacgtgcccgttttaaagcagaaacttgtatcttaccccacttactgtaatggtgggggctgggaaacgacttcagcatggtgctgtgtatgaagccagtgtttccactggcttgtgtctggcatggtggaggttgggtagagaaggaggtgcaccagagaatgtagacacaggtgtgaactgcctcgctgccctaagaggggctctgtgagaggcagctgagaacagcgccacaaggttaatgggaaagtcgtcttgatgggcaaactccttgtcaagaatgccttgggaacaggggttcaggcttctcaacccacagaaaagaaagtttcaagaggctggcgacaaaggctcagctagccagccccgctcttctctgtttacctgtgtgtgtatccttagcccaaatgtgccttcgagcccagcattttcatacatctcttctctgaagccctttttctgacagggaattgacaaaggactcagtttgaatatattgagatcaattgaaaaagaggcaatttgaagaacagaaaattggagactggaaatgtagctcagtttaccgagcattggcctagcgtgcacaagactgtgcgttccgtccccagtgaagaacatttgatgtcaaaaaaaaaaaaaaaaaaaaaaaaaaaaaaaaggcatagatgggggagggaggaattcttggggagtccaagacatcatcagtcagctatctgccgagcctcactatgtgctagctaaaagggtttagatttataaagaaaatagatgcctaaaagtaatgttccatacagccctcggagtaatgcggttaagggacaagtgaggctgacatgggagcaagaaaaagctcccaaattaacacctagaagcaggtctaaacgccacctagattggaaacagtctatgcagaagcctaaaggcaaaaagctgtatgctgtagctgaagaccctccagagaaaggcaggcaggaggtgtgtgtgtgccaagaagcaaagccatgcaagagagcagaggagatgggatctggaccagttctcctggatagcgtacgcacatcagcctggtacctgtctcatctgatgctggctctgaagggggctccaggcaggctagtgagctgcctcattctctctgcattcttttgtgacatcagagtttgcaggacagaagttctgtggcgctccctcatcttagaaaccctgtgggagggcccctgcgtcacacctggcgtttatgggtcagaaacatttggaatctccctttctagcggaattctgcacatgtcccccaccagagcaggtgatcggacacacagatctgatgtcatccccaggagaaaagcttgtgagctcacctaaagaaagggggatcttagaactcacatgccgagagctgtcagataataccggctagagatcaagccgcggcagctgccttccacagctgccgccttgcagctgcctctcaagcagttagtggggctaaaaataaccaagagctaactcgcagcaagctaccaagccttagaaagaagtgtggggaaggagattgcgggtggcagtctgggccctcagagtggatgtcagaggaatacccacccggtggcccaggcggcatcaaaggccttcagagtccatgtgtctgtgtagatcaaacctcctgctgccacttcacaactggtagcccaggctgttgcctactgactgcttccggtttctaatctcagctgtaacccaagttgtgttgatgcctcgggaaacagaagtaacgaagtaggaatgaacagtttcctgtttgtaccctaaacttgaaccggtggcctgagcagcaagtgtgcaggggcccggatactcaacagaggtgtgtgtgtgactctctttttaattgtgaaactaaactgggactttctcaccagcaaagcaaaaaaaaaaaaaaaaaaaaaaaaaaaaaaaaaaaaaccctgaggtgacatcaaaaggaaacacggtccatcaaaatcagaaacgggggtggttatagcgtgggaaactacacagataaatatgctcatttagcatcggagagaatagatgtgctttcctgagcatatgaagccattgatgcttttttgtaagaaaaacgaattgacccctggttgtcgcagctctgtggtcatcagcacagcgatcacagggtgtgctcgtgaggctgttgtggctctccagccatggtgctgagcgtactctgtcctggatcgttcagtttggatctcccctagattcccattcatggcccaggacagaggcaagcagaggttaggaaatttgccctgttgatcccgacttgtccagggccagaaaagactgcccccccagccatttttccctcccacaggatggccctgaaggtctagttggtcatgagactgacaggagtgactcctgacagacctgtgggtttcctgtggactcttgctgtggctctcgtgtactcccattagaggtgctgatctgtgctgcctccctttctcctatgagtgaattgagtgggcgggcagatgggtgggtgggtgagtgagtgagttgggttggtaagtgggtgagggtgggtaggtgagttgggtgcgtgggtgggtgcgtgggtgagtgagtgaacttgggtgagtggatggtttggctgaatgagtgagttgggttggtaagtgggtgagtcgggtgggtgggtgagttgggtgggtaggagagtgggtgagtcgatgaacgagtgggtgggaatcttgggtgtgccatacaagtgtcactctgccactaaccacctatgtggtttgagggcattttgttggcttggttgggtgggtgagttttttctcctttcctggtttattttggcagggtctcctctgtaacataggctaaccttgaactcctcatcctacctgcctccatttccctagtactgggaccgcaggcttgcaccactccagccagctcaaggcatagtatctctgaaataaagccgttcgattataaccaaggtccctcctgtgctaagtacctgtttttcctttccttcctccctggctcttcctggtctttcattatgtacagtgggcacacagtgctgctaagtggctgagggcgcatctcagatagtaaggagaccagcaatcactgggatgtgggcatggaacacacagcaatctggctcttccacaaggaaaccagaaatatattttggctctggcacctccctagccctgttctcaactgccttgtccatcctcacactgcttttaagtttcataaactccgcccgcaccgagccatgctgaccttctccctactcctcccaccatgtcctccctctgccctgcatctccctcaacactctgctgtctgtttaggaggcagcagatctcatctgtcaagagtgctgaccacgtgtaccgtaataatgctcattaagtcagcatccagcatctaagaaggtctggttcagtgcccagcacccacatggtggctcacaaacatcggtaactccaggtccaggggatctgatgccctcttctggcctccacaggtaccaggtgttgctgtggtatgcacacctacatgcagacaaacactcatacacacaaactaaaaaataataacaataaagtaaaaagcacaaactgattttctctcttaatagctcatttctttgcatctctgtactatggaggggatttttggttactcatttccaaagagacatcagtatcaaattgttgcataagtagttgttaaacaatatgtcatatttattcatttatttggtgtgttgtgtacatgtaattttatctgggagaagtggggaagaaggccttcagaacactgcagtagtttagagcaaagttctttcattgctcaaaaacctctaactcaaacatggtggtttctactcaacattggagccaaaattagattgtagcagtagggcaggcatagggacagtggatgcggtgataatccatgtagagtttgtagtgttgttgtttttagtgagctattatgtaatcacagaacataaagtatttgaatcctcaggggagtatgaattttatcatactggggtattttaagcatgtgagaggaacctagatggatataacctagattgactaggaaggattatatagacccagaagtaactataggcaagtcagcgtggcccatgcctgggtaaagttatgaacttcactgatatttgtattgaactgtttcctaatccaatgccatgggagggatttgtatgagaaattgaaattctcttaaagacaagacctctcagtatagcacaggctggccttgaagttttcagccttgttagtggaatgacggatgtgcacgatcacacctggctcagagcgctcttcacttcctctggcttctctccatttttcacaatcatgttggcctttgtgggcctttgtcccacacaggtcagcactggaagaatagcactcccctatcctggcatgtggttagactgcaggatcagtgtcatggctgggcctcatccctattttaggtgtgtttctaaggagtaggctggttgtcatggtttgcaaaggctttcctcaccatcaggatgcaagaatattgcagtaggcagcaagggaggcacaggccatctgtccccaggggatggacgtgtctagaggaaataaatagccttctagccacgatgcgttgcatgtgtccttgcccaaagttgaactcacagttttgttctaggatcctaagcttctaagctgagattcagtccttaaggaagcccactgagaggagctgtggtggctctcagtccttccaggtcactttcatctcctcctgctgtcattccaagccatcctcacatccccaccccagcggccaggaagatgagctctgtccttcctgtggggatggaaagactaagctctggaatccaggacccacagaggttgacatgtgtcatttgtagttctcctccacagctgagggaaggcttggcgagaaggatgcgcaaccctgggcagccatgaaacacatagggctgttgaaatggacagagcttcggtctaaatagatcactagtgtggtttgcaaagtagcacttcagacagtccctgccctctgacactgggaaccacagcagtgtctcacacacctgttattcatcagagtgcctctttgtcatctgacaaagcatgatgctgcagatccagatgtgtcataagggggacagtgcctgtgtggaaaggcagactcattgccccacagtgctgaggtttcaaaagagactccccagtcatgtccccaacactgtgacttcatagcaagtcactcatgccaccagggtgtttgtgggcctcattgcactgggaagcctaccttggtgacttccgtggcctccacctgtaagttgcagggctggtcaccctcatcagtgcaaggcaagtcccaccacagccgagcagttagagaagaaccgagtgagctcagctgtgccagctgtgccagcccaagagattgacaagcctttcctgttggtgctggaatagttagagagataatagcactaggtccggaaggaagacaaaaaaggatacacattgattttctttttctggaggaggagtgtgagcagagctgtcctgtgaagtccgtgcagcaggacagtcccccagggcctccagccttcagggtttcctcacagcctcacagctgtctggaggggctgcttaccttttaaactctttctgcctaacagttgtctggctcatttgtttgtttctttgtttcctgttgcttaaggcttttctcttacactaatcatatgcccttatcttacccaaagctgtaaaccccttccctttgggcactcagtgagctcattagtatgcaagcagacgatccacaccccaaatcatcacctcaagaaagacaaagcagccatgggaaggagggcagacaggctaagaggaacactataaatgatgcatagagtctcaagtaagccactctgtccttctgtgtgagagagtgtgtgtgtgtgtgtgtgtgtgtgcgcacatttcccacccacagctatagcacccgctctctcagccggcagcagcattttaatgtcaaatggaagcaccaggcctgtgttaccatggcaaccacagagtggcagagctaaaagcagcaagcagccttggctgcgccacctccctgcagcccaccctcctcggaggcaggcgcagattccctttgtctccatcaggctcccttgccatccattccctgcccccttccctttgtggcctctactaagctctgcacctgcagcacccaggccagggccaaccgcaaagcttgtgggagccagggacggagaaagccccactgccagttcaagcttggggacctcatgcctcacttgagaccagcctttcgagaagtgagggttagagcccagcaggaatactcgccctcaccaatcactcatcgctggcctatgtctggttcattggccatggcttcgctggcctgaagggatggaccaggcacctgcctatcccctgcctgggctcaaagtggtcacagctgcccatgagagatccagagagattgcattcggatcttttacttagtgagaggtagccaagagaggtggtatctgtgaataggtgggcttttgcaggccctggggcccctggcagtggctccatcctatccctggcttgtagatagatgcatctggtctctgagagctctataaagtggaactgcaacccagctcagaacttccagggcctctggagtgcgacctcctggttgaaaaggaggaattgtttcaagagagtgcgctagctttgccatccgcttagaagggggacacagagatggcccagcctccaactcttcttcactttggcctgggcaacactgagtttcaatacgttgcttttatgtactattctgatttacccaggaggctaagacaggagagtctcctgagcatgggaattccaggccagcaacatctaaaacaggagagtttgtatctccacaaacccaatcataaagttatccaacacacgaataggcatttgtttgttgtttggtcttcgttggtttgttctgtgctacagtctcactcagcctgacctccaggacactctaactaaagtcctgacctttctgcctgaacctcctaaatgctgggattacaacagtgcctcccaggccgggttgatgcagggctagggatcagaactagggtccctatgtgtaggcaagctgtctggcaatgacccatatccccagccctgggcatttgggtgatggtgttgcttttgatgtttccctcacatattgttctagttattctttattattgcatgaatttgttcatgtgtgtggtcacacacgtacatgtatacatcccacaagtgggtgtagaagtcagagacaatttgtggggttggttctgccctcccagtatttgggttctcgggtggtggcaagtacctcggctatatgagctgcctcgatggccctaggtttttgctttgtggtttttgacagggtttctctgtgtagccctggctgacctggaactctcatagactggggtagcctcgaactcagagatctgcctgcctctgcctcccagcgctgggattaagggcgtgtgccaccacatccagctcaaggcatttgttttactactgagttttgggaggccctctggcatgcttgggaagttatacctgattgctcaaggtgaagctgacttagcagccagaacccctgagctgttcctgcatggccctgaatcaatgtctagtatcttttgtaacagcccacaatctcctaccatttatgtatcagaaataaacataaagcctgaaggtgggcgttctagcttcacagtcatctcacacagacacagacacactggtgcttgtggacattatacctgtgtatttaatattcttgctttttttcttcttgttttgttatgggagttctaggttggcctagaactagctctgtaaagatggtgaacttgaactgctaattctcctgtccctacctcgcagatgctggaattacaaatgtgccaccacacctagctgctgcttcttcctcctcctcttcttcctccccctcctcttgtttgtttttttagcataattttatttattataccctaaagactcacatatcccaagtaatttgggtaaatgtgacttctagacagcacacagagtccccctgaaacaggctacgcattcagaacctatgagagagagctctaggctgtggcctgtgtgtggacagggacactcaaaacatcttgtgtaaatatgcaaatccagtctgtttcctctcccatgtagccccatctcctgaagctgtcatctaaatgtcttcctggacaggggaagattttcttcttcctcctctcaaaaattcgggggggtgggtggggtgttgttttgtttgtttggttggttggctggcttggattttggattatttgttttttttttttaagttttgggttttggggtgttgttgttgttgttgttgtttgatttttttgagacagggtttctctgtatagtcctggctgtcctggaactcactctgtagatcaggctggcctcgaactcagaaatctgcctgcctctgcttcccaagtgctgggattaaaggcacgcgccaccacgccgggcttgcactaaaacattttaaataaccacttcgtaaaggaaaagtgtataaagctagcctacacccttcattccaagtgcccatcacattatttgagacagagtagggagagtagacattggaggccagcctagattgcaggagacttacctcaaaaaaaaagttttaattaaataaaaaggtccagaaataatccatctatatcattgttgttttacattttttaaattacacttatgtatgtgtttgatgggggagtatggtccacagtgtacaggtaaggagcaggggacaacttgtagacttggttctcttcttccactctgtgagtcccaggatcacactcagatcctcagctcggcagcatcttacccctgagccgtccctccagcccaggacttttggttttgacttttcaaggttctccgacagtgcttctctttctttttctttgtgtatgtggaaggcagggtacgtgcacacacatgaacacgtgtgcatggatgcccgtgaggatgcagaggagagtgttggacgtgagcgtcccaccccatcactgtctggtgtatcctgtacagtctcttatgaacctggcaacaagcccatcagtcctgtccctgcccccctccccagccctaaggttacagacacacatgatcacatagatttttatgtgggatctggagatttgaacctcatctcatgttgtcagatattggagacgttacagcaagatttttatgttctgagccatcttccctcccttctataagttctaaacaatttttattacaatattctgttggcaagtattgttaatctcttgtatgtctatgtgaggctgtcagatattggaggagtttcagactgtgcgtgctgggaattgaactcaggacctctggaagagcagccggtgctcttaaccactgagccatctctccagcccccgtcgttaatctcttactgtgacatatgtataaatcaaatttggttataagtatgtatgtgtaggaaaatgcctttccatgatttcagacaaccagaggatcttggactgtgtcccccagcagacaagaggagatgggcacaggtaccttgctatttgctgagctgtttctcaggctggtaactagggcattaatcggaggcgaagccagactagctcctctcccatcgctcccagggcagtgatgacatggagaaccctgcaggtttcacccaccacccagagcaaagcagactttgggggaagggcccgagcactttcaggaccactatttctttgctgcgtttcagcatctaaggtgtagtcaagtgtagtcaaggtagagagtgctgctgtgtagtctctcccagaagtgggagtgtagtagcagatcagagccttgatttcagttgtagggttgaggctagtgtacttagggttgagcaagaagataatctggggcacttcataccctcccaggactgctcaccgagcctctcctccttcaaagcctctaggtcccctcctgtgacagccatttaacacagacatgcgactgtctaatcaggacacgcaccattttccagacttgccccagcagcagtgacctaaatattactcggagtgtctaacatctagccccagaggaagagagtctttggtttgattgttttcatgctaatgaagttgggccagtaattccaagtcccctcaaagatggctgagtcacttgaggctatgtgttagctctctagaaagcactggtgcagcatcattattgaattattcactttccaatagaatcactggcacacccactcgctctcattggtcgtattgttttttaactgagatatgagataaatgagtaggaatgcaggggttggtggaaatggccccaaccacgcatgccagccagccagccagagagaaatgtgactaacccacttccaaaccaagagatgtaacaaacgcagtggctgactgttcagccctctctcctgatgaccctgcaggcagtaaataagacctgacttagactaaagccataaccacacacagcagggaactgcccacctaggcagcagctgcaattggccttctgctagaagtctatctgcactcaaggtcaaaccaaattgagtaagaagccacatgaggacactccacattaaaatctctctcggggagggggccagggcaagtgaaagctaagcttctcttgggtccttaaatcaagttagtgatcattgagaaaatgagaatccttcatggcacacaggaaaagcacacatgtggcttgaggaaacccacattccagcagcaagttccagcctatatctaaacagccatttctgggaacttaaaaatagaaaaaagaacacacccacatatgagagtggtcagatggacttgagccctgaggaccggtgatgtgtccaccctcagcctcagcagcatggccagtggcttctatgatgtgggattcctgagtaagaaggactggacctcagtccctgccccaccccccattattgtgccagaaatagatgccccatcccaggaaaaaggaagcgagactgcatagaatgtgtcctccgttggaatactgctcgtctccgcctgccgccatcactgtgtcctcattctgtagcagagccattaggtcagaatctgaagattgatgcattttgtacttgctcaaaatagcagatgcagagcagaaaaggcagagctgccaggcggcatgcagagcacagtgacaggaggcctgcctagcctcttcatagcagcatggaagtgtgtgctggaggagggggtatttcccatgaatggcgctcccgaggcagaggctccccgaccacagtaagaccaggcacatgtttagctgacaagactgagtgcaacccttctccattcccaagcatgtggcagagagtgggcagctgttccctttcttctcagcgtcctggggttgctttatgagctgttcttttttaacctccttgaactcccccttaggacagaaatccccagttacttgctctctaatgaggtacccatgggttatgcttgcctaggtgggcatcagagtgtagtgacaatgaagtggaaattttacaaaaagtaccagattgctaatgctgagaagaaagtaccattctttgtcagcttatatgggattttaaaatccccaagaacaaggtacaagcctcttatggaacccacacacttccctaccaaaatagcatatgacaagttggttctcgggccagaggtggtcaggaagaggcctgcgacaggatggcaccgcaggggcagcctcagctttctgctgggcacggaaccctgtcgggccttgctcagcaagcactccagcctgggaatgtttggccatcattccatccctgactgcaaccctgctaaaacaccatgccacaatagcagccagaaacgggacacgtgtccatgctgcactgtgttagccgcccactggcagctactttcccctttaactttcaccaagtcctgtgtgaaagagatgtgtctgtagccttagtggactccccagagcaggtgagctggaaggtcagacctggactaagtgatttaggctcagactccacatgttctctttcaactcagaaatacctagaaccaggaaaaccctgtctcacctcctgctggactttggtatattttaactaaagttctagaagttagtataccagacatcttccaggctgtatacagacacagtggcagcccttaaatagcactcaaactgtctttcaataaatcctaactagctggttgtcaacggacagcctccaaaccctccagctccacaaccactttggacaacttgcaaagcaggcactataccaccttcgcttcctctctctccttcgtaactatcccgtcactttcagaagcagtgttttgcatgctcagacactttcagataaatgctgagcacatggtggtggcacacacctttagttccagcactcaggagacaaaggcaggctgatatctgtgagtcctatgcctgcctaatctatgtaacaagttccagccagtgtgctacatactgagaccctgtctcaacaacaaaaaccaaaatagcaacaaaaaattgcagatgaacaatagcgaaaatcataggctacagaggcagctcggtggttaagagcagggccttgcagagacctgtgttcacttcccagcacactcctcagggacctgacagctgcttgtaacaccagcctttgtactcgttcacatgcacgtgcatatgcgtgcatgagcgtgtgcacagacacatacacacatctaaactgagtgaaatttgtaagagtttgaaaaggaccaccaggtgacttggagcacaggccctgcctgcagtttctctctctctctctctctcttctctctctctctctctctctctctctctctctctctctctctctctctcaaccaagctgttttcttgggacatggtttcatgtagccttggctggctttgaacttactgtgtatctaaggataactttaaagtcctgatcctcctgtgccacatcctgggcggtagttaggatttcaggtatgccaacaccacacctggccctgcctttcatacacagcacaggccactataatatcttatgctgtctttctaaggaattacttaaaacacagggaggcagtccctccatgagatgcagttgcctgagtcacacctcttcctgtaagggagaaaggtgtgggttctgtgtcctcctgggtctgtatgatgcagagggaaaccctgtgggttttccagagctgtcctcagcactttcacaaccaaggcttctttctctccagctccctcatcaccacccaaactgaagatctgcatctggagccatgactaactttagatcctgtcagctgccacgccctcccttttgggtgtctctctgttgatgtcttgccctttcagtgaccttggccctgtctcccaacttgtttcctaacttgcctgtctccctccaagtgccccattcacctacttttcacattatttatcttgtctctgtcaatcccctggattggtgatgctgttgagaactaactgtatgccaggcagccttttggcacaaggtctccttctcccatagagctttctttgaaaggggatggaagccagggaaggacatgacagccaagaactcagacagtggtgagcaccggaagggaaaagtcttctctgcgcgaggtcctcacttgaggattctcactgcccggattccacctggacgtctcgcctctcagctgtctcagcctggctggatgcatctctaccacaacctcccgaacgcgcatgggcctggactcaccgtccatctaaatcctcatcccctcctgaggcagaggaggtccagccaaagccaaggggagaaggggagttggaacttgagggatattattagtgactagtgggtgactcaccatcagccctggcacaccaggctcagtgtgtgtggcacccacttccgtagctgcatcttgatccgtgcccatagggagtctggtacagaacaggccctggtttctccccctcaccaaaggctgagttactgggaagatgtatctgcctataaagcctcagggtccttagcacatgtcctagactgctgtggtggggtcacaccctccatgagaattctctcttgcctatttgcctccctccccagattgtaagcttccgaagaagaaagaactctctcctcactgtgtagagcagcttggcgaggccatactgcaccagtgcctgggagtctgaatccagaggttgaggtcagcctgggatgtaaagtgagagcctatctcacaaaggagaaactgagcaggactgccaggaacccctgagttcctagcaaacttatcttgttcttagttcccaaccttgttcaaaagtgccatctttaacctgggcctagtcaaaagtcctatctgtttgttctcttggcaagtgtcttttaatatctctgacctgtatttgtgtgtggactgttttaaatattctcaggtggcagagactggaactcaacagacttagactctgaccgatggtggacataacacatggttttgagcagcttgagcttgaataagctcacatgtagcagtattcctgacaggccactgagatgtcagtccagaggagatcgtgggtgctggtcaggttccatccagtgttgtttagcaccttcattaaggatgtgaacagaaaatagacaccgctgtgcccaaatggtgctaactgtggaggtgctatgtgcacaagtgtggagaaaggagaaacagaaatgtaagcaggaaacagcaaagatgtttaaaaaaaaaaaaccctcagtagagcaaagatggaaaaaaaaatctctcagatacaaaaggaatcccacaggacatcccagcacaagcataaagagatctaatgttagaaaggaaaagctgctgcccatggccccgaccttcttaagaaagaacgagctgtagccaggcagccgtggagccgtgcagacctgtgcaccgagctgtggcccgctaggccgttgttccttttctctcgtagcaaaggcttgctttgttggtttgttgcttctgggtggtggtggtggtatttgtaactgagaggaagctatgacagtttggctttgaaagattgcattatccctaatactcagcattcagttggccatttggggagacacagtagcgagccttgagacagtaatatactataaagttaaaatgggacattcccacacctatagctctgacaaaccagagccaccccagagtgaatgcagcctctaggacacgtcttcatccaccttgctggggcagagcagggctcctgggggacacacagagcaggaacctttaccttttagttgacagaaagagcacccaggaatatatacagatcagtgctcttcccaggcactccacgtgggcagacaaaatgtgtcctgaggggctgaatgtggggctcagtggagagggcttgcctgcatgtgagggcctggctctagtcccagcactgaaaagcgaggaaaggcaccctgggaaatcagaagctgcacacagctctccacacaccgggagcacacccttctgacagcctggcaccaacccggaagatttgtcttctggccaggtggtctggaaggagcaacacccagcagagaaaggaagagggtcatggctgcaggtcagggttcaaccccagcctcagatacaagtgctttccctgtgactcaccaaggcctgggccatgctctgagaagggtggtggtctctggagagcagatgttctgcgcatgccatttctcagctttgagaagttacttgatatgaactcctgcaacttcctccatcataaagggaaggtaatggcaggccttcatgacagcattggaagggattaaatgagatgacgcatgtgcagtgtttaatgtggtgcctactgtaagaccccctttcggggacccccactctagtctcgggagtgagagagcacccaaagaaacacgagaatccatcttgctgtaatcacatgaggcagtttaatgacagagctccggaatcacatgcatcccacacaggagataacggatgtcggccacgaggctcggaagctaggggtttttatggggtaaggggcttaggggtgtggaattcagcatagcgacacactattggcttattcaaacatcagcagaaaaattacatgtacgtgcagggtgtcagagttctgtgagttgttgactcagtttagatagccctgttatgtcctcacattcctctttatctttctggtcaagatgttcccaggaatgttttaactacggggcatacccgggtttgtttttcttttttctcagccccaggcaacctctaggctcacaaacaaccagcaatttctgagtactttatatgacttacaggtcttgaaatttcatctttctttcacctacttcgggataagcccttaataaatggatgactttgaacccctaccccaagacccctaacatgctgccaagaacctagccagcagccagcctagtgaccattggaagtattcacaacactctgtagcatacactgataagtttagagagaaccagggtccactcatctccatcaaccctcggaatgtaagaacggcatattcatagatgtcgtgttccaacccccatgagtcttgctgcatgcagtgaccaggggttgggtacttgccggcatctgtgagatccttactcagccttgctgctagggagatctgcccactcacacattctccatcctcccagatacttttatctcccttagaatctcctttagaatcaggcatttctgggcattaaggtttacagggaaagtagctatactttacagaagggtccttcaaagctcaaaaggcaccccttgaatagcgagtgttcctagtgcctcttaatcacacaacatataaacatccccttctatagagcaagctgccagaagtgcacacatacttcccctggccacttctgggtccacacctggatctgatgctctcccaccaccatcttcccaatcaacaaccccacctgaaagttgcataggtgctggcttcatcttctgcttactatctcattgttcagttagctgcagctgctctcttaatcatgtcattaaaaaaaatcactccacagatgctggtgtgcccctaatctgtgtcagacactatagcgggcacttttgataaagcatagacagtacccagtgctccctgctcaggcacagatgatagcgacatcgtattcagaggttaagactcctgcctgggtcactaggtttgagtcctgcctctgttgtgacaccaggcctcgtttctgaagtggaatgtgcctcttgtcatgaagctgtcaagaaccaatgttcacactactccagtgtgctgtgctgctctctgtggggtgggctgagcaaggaaccactcttacttctgtggaagtgtgtgttctcacggcttccgtgatgtccagctcagtcagcacggtgggctctggcaagggtggccttctcaccatctcctccatgatggagagacagagcaagctgtgtgtcttcggtcaaggtgccacttttggcttggggtagagtgcttatctctaaacacgtgtttagggttaagacattgtgttaatttggtacaatccctagcatcattatttgacttgattacatttttaaattatagatttctttttaccaatattatatgtatgtgcatcatgtgtgtttctgatgtctatcagaagaaatcacggatcctctgggtctggtggtacagagagttgtgggctgccctgtgagtgctgggaaccacacctgggtcttgtagaagaccagccagggctctaaccactgagtgcttcctccaccccaactgttgtgatttataggtctctctgaggagcttatggttgcatttttaggtccacctgagagacctctttaagccatttacctacttgaataatttatctatttatatagtttatcacatctgtatattcaagattatctgtgactgttctgtgtgtttgtgtatttttacagtgaacttgtttgcatgttttcacatatgtgtgcatgttaaagaagtccgctctctcctccaccatcgggtgctggggactgaactcggcttgtccaggctgggcagcgccttcacctacagaaccactttgttggtcctgttttaaagtataatacatatatatgttttaatttatagataatatgtttgttttattttcaaggttataattataatattataatagtatctcgcccttcccttttctccctgcacacatccgtgtagccctcccacactccttcaaacatagcctcttgcttcactctgtcttcttctcacctgtgctcctgtgaaggaagccagaggtccactctccttcttcccatctcctcaaaaagttccctgggataccttgctatcttccatgttctcggcacccaggatctcagctcaacgttgtcttgtttcattgctggggatcaaagttcccagtctctcagctccgtcttgagacggttaggcatgttcactatgactgagaatagccacactcccctgaactgtgtggcctgtttccctgttctgttgctctgctgccccggtccctctagacccaggtgcctacactttgggtccccccgacccccagcctggcttccactcttgctgcaggtcccctcccctagccatgccacccagaggctgtctttttgctcctttaccatcgcactgtggctcccgcgctctctgtagcgccccaaagcactgagccacacgcaggaggtaggcttgccgggcctgtcccattctaggggaagcacagcagagctccacagtccagtctgtgtggataccccagggcctgtgacccggcttgagagcaagggagagtgagcgacagcagggaggggcaggcctctgagtgtctgttccagactctgctcagagcacagaggctgtgatgtgcacgtgcggaatgtgtgtgaagcaagcagggtgtggggcagagaagacagaaacctgtcaggccacagtggtcaccaggagaggctgagacagagctgtctggagaaccggctctgctctgcgtaggcagtggaggtggagcaagctgagctgacgcccacctgtcgcttgtgtgaggggactggactcttgacaggtttgacaagggttgaggccaagagtgtgcgttctccattcctcacgtgaagactcggtcggtcgcctgtggagtattgagggatctcttagaagtggttaagaatgtgctagaacctcatgcttgaatggggacactgattacatcattatctgtcattaaaaccacataggtgggtgctacctctctgtggtaaatacaaaatctagtgaacatgcagcaataattaagaaggagaaaataaagccggggaggctcttgcgagagtcccgttcatccttgagactcagcccagatgccacctccttggggacattcactcagccaacatgaccaggcctcttctgtgtggtccatgcccagcataggatgcaagggctggttcactggcatgcgctttctagaggttctcaacctgtagctcaccacccctttggcaaatccctatctccaagaatattcacattgcagttctcagcagtagcagaattacagttatggagtagcaatgaaaataattttctggtcaggggtcaccacaacatgaggcgctgtgtatcggggcagaagtatcaggaaggttgggcgctgctgctctggacagcgcgtgctcagtggggacagtcaattaggcagggaagatggtggaagcatttaaggagaaagaagggcacagagcgggtggagtgagcctccctgcctgtacaccaaagcagctgaggctagggtggaggcaggtcctagccatgaccgaggccctaggctttcgtgactgctgtatggttttgccctgtcccttaccagctacccagacaggaagtgcagcaccacggtctccagcttacacaggagccagactcctcagctcacttcagaagcagctgtgatgcaaccctgaccaaaacagaagcagcgtttccccagcagggttttgaaagagctgccctctgaggctcagcatcctgaagcagaactcacagaaaagagctacaggcgtgcagccctccgtgtgagctagggcgagtggcatcccgtggggtgtggctctgggggtcgatgcccagcacgagaggtacctctcatctctctccagcccatatcctgtgaccagacagcagagagtactcactagcttcaccggctgcttctgaccctcccacacacagtcccagttctgcacctcaattctatgccagccagcccaggctgcctgcaacctcctgggtcactttcttggcttggcttcagtctagagactgcatttcccagatgaccgggggcctgagggacattgtttcaggctgattcagctcctggacatgtggttgtcccctgtatgcagtgtctctgggtgcccggctagcactgcgactgcatccaccggaagaggggagtctaggtgaggaaggaaagaagccatttgcctgcagtgatggctgagaacagatgacagagatgaaagtccccaaataccacaatttgctgagccactaaatccgtaacagaatctggggagtaaaggcccctccccccacagccagcctccctcagcagctgtcacttggcttggcacaccatcagagggagacaccctgtctccatctctgttctctgttaactctgactctataaagaccccagtgtgtgctgtggctcaggacagaattgggtccctgctctctgccccaccgcacccaatctcctgtgcctgctaggactgccccaggcccaggccccacgaagcctcttgctggtttgttgttgttttgagacagaatctcactgtgtgagccaacatgttcagtcttactgtacttcagtcattgtggctgaacttaaaataagaacgtcccctaaagctggggggtggtagcacacggccagggagacagacatagagaaacccttctcaaactaaacaaacagaacaaaataaaggaaaggacttccctgttttctcctttttgtcctctacgtcctactgtagaaacactccacaccaagcatcacacctgcggtggccagtgctgtacagccacagcctctatcgcctctagaacacttctgccactccaaaggagagctaagtccctcccctccctgacacccctcacaacagctactctgtccctgttgatgtgtctagtgggtgtatttcctgtcatttacagtatgtggcctattggagctggctcctttcaaagtttattaccctgtattgatactttactgcttttccaacaagtcgattggacagtactatcccagtgaatagatagaccacactttgctgatccatacaaccactgatgggcaaggaggctgcctctgccttctgtcaatacttctgccatggatactgacattcaaaggtctggtctgaacacctgggggtggagttgctgggccagccacgtcgtgattgtttaggacgctggggaactgtgacgctagagccatgcatgctttctgcctttgtgcagggtgtgggtggcaagcagtgacctccacagctgctcctctgctccagcagtcccctcttcttcctaaaccctacggcaacttcccaaagatggctgggcaccggttcattcagggctgggccaagggaggcaaaaaaaaaaaaaaaaaatcacccaccaggcgcctggggacagacatcccatttctcacggtgacaacaccaagcactctttttcctgaggactgcctgcctcctgagactctcccattccacaagccatctggctactttgcctctggaatgagtttcttgagtgggtgattcgggcctaggagaagcacggcgggtgggttgagcacaacgcccccctcattatgaggcaagagtaaccacatgccaggaggagccatccgcagtgtgagggactgaagcctgtgatagcacgctgacccagcaagcccagaaccaatgacctggctagaattgcccatgtgtacgggagcacccctaaacctcctggcagtgtgcaggtcctctgagacccctcaccctccatcagcctgtaggccaaataggcaaagcacatccatgcttatgacatgagggctccaaccctgtcaggttgaaacagaagctgaggatgcccaggctctacctcatcaggctgggggccgttcagaacagaggcagccaggtggcttatgagcctgatggcgctcgctctgtgaacatgtgcagagagcatgcgccaagtctgcaaagcggctctcctgaaccatctctcgtggagggtctcagcacttgactaaagaagtgaccctccctctggatagtgcccacattccacagagctcatgtctttctaaatgactctgtacattcgtctccagaggatggaaaagaccctgtctccaaccatccacttattttctgtatttctgggactcagggccttgaggtaaatactgaaataactcttaacctgccctcaccacagagtaggtgaagactagattctcacgtatactttatggctgtaagagacatcccacaggggcttgcccaagcccaaggaccggaatccaggcctgtagccctagacttgaatttagaggtcccaaatgaatcaaaggcagcctcctgggcttatagtacccgacccaggaatctaggacaggaagctgaggcacaggttcaaggtcagcctgatctatatacagtgagatctcatctcagaagaaagaagagggaggcatgtggaggcatggcatcctttctttcccaagatgtcctaattgcttctcactccatcgagaggaatgctaggaattgagagttcagggtttgacacagacagaatctgcagctgtgggtagaggtggcaggcccagaaacatgactgggtgtaccagtgagaaaagctcctccttgtgtttgtactttgcctttctgtgaccgcctcccatgtcaccagagggccaggacacagtcactccaagcaagctccctggggcaggctgaagcccagcactacccatgaaaaggagaggaggccccgcactttcctgggtcagaaagagagaccctccctgggacgtgggagccagcacaggccaaagaagggggcccagagctgcctgcatcacagtgcagaacaacccaggtccctgttccctgccttcctcccaacagtggcatcctctggaagggagggaggccctgtgctgcaaggctcctgagaaacaagactgtcccttcctccccttctatctgcttcctgtcccgggcagcatttactccaccaggctgggacagaagggggaaaggaaggagagcaggcgagactgtgacaccagcactctgctttccagataaagtcctaccagctcctgggatgctcttcctgcctctcccagacccacacaaaactagagcagttccctaaacatccaaagaaagggaaggctatggctgatgacaccctgttgatgacgctctggccaagccatgactgagaaggcttctatcagcagggcccgcagaagcacgggaacaaggcagggtgctgctgactctccgcatggtggttcctcaagatgacactgaatgagcccctctaggatccatccccagggaatctgagagaacccagtgtacaccctgctctaccagccccaggaggggaggacaggatggctccttgcatctcccctttcctgccctcccaaaagatttaagcagagcaggacacagaagacctggactgacaggagaggcagggaggctaaccaagctggggaaccatcttgttgagaggcatccctagagctggcactgtgcctactatggtccagtgtgaggccacagtggacccacgcataacctgctgcagccaagggccggccacggatctagcctgcagagcccccttggctcccaagggatgggaacgagcctgagtcactgcctcggatgggctctggtatttttgtccaactctagttaaaaataactgtctgagccaggttctagctgcagctgacaagacattaagcgtttggtacttaatgcccacatgtctctcctgtgccatttgctgcctccagtcatggctattgaggcaggcaggaaccagcatctcggcttctccaactctggggccttctgtgagccgagccaccgagtgtccctagacaccatgccttggggccagggctgcaggaagcgcccctgctcagcacattgatccccaggatcatgtcatgcagcctgatcatttgcctcagcaactgggtcttctggaccagccagtgctctggcaagtacagcgagctcttgtttaggctgggtggggcccggtgagcgctgctctcaacccccggcttcctatatggccattcagtactcatcagtcagcgctgggagctccctcagcctgaggagaccagcagggttgagacccagcctgttccccggcatgcagccccagcagccccagcagccccagcagccccagcagccccagcgaaggagcccatcctaactggatgctcctaaaacagcaagccaatctctctctctctctctctctctctctctctctctctctcctcccaacggatgcagcccgagctgagggggcagtgctggaacaggctggcgtgtgcacacacacgctaggtgccagcctacaagtttctcagtgtttataataagcagcagcttagtacattgagcacagggtatgttgctggaggcgagggctcccatttccacaccatccccaaatggccttcctcaggctctcctggtggacaggaagtaagatgccatccacctgcctgctctggagcaggcaggtagtggggccgtctacactcggtgttcggtgttcgttgctcaggctagctgtaaactcactctgtagcccagtaagccttgaacttactcttctcctaactcagctccctaggtaacagggaccacaggcctactgtaccctgggactcagcctcagacccatttttcttttcattattttatttattcactttatttctcagacccacttttgacagccaggctccttggcaaatcgctagatggattcaaggcggacattccttgaggggctgggggaatcctaatctccctgttggcagtcagagataattgtcatgattcagagccctggtgctctttctcctgggacacccaaaccccagatgactcagtccatccagccctggtggcgaatggctcagccacatccacctccctggtccatgggaacacagggttccctggaatgaacaatccttctgcccacagcacacacctcagtgcactctctcctcccccttcctctgggtcccctccaacctctgtgctcacctgagaagagagcggattgaaccctgaaactgccaccctacaggagcctggcaaatggcagggccctgagggttgccaaggaaaccacagcactgtgtctgcccactcactggccgcttggcctgtctgttctactcttgcagtgagaagcgccaccttcaagtgaacgtcaccaacccggtgcagtgcagcctgcacgggaagaaatgcaccgtctctgtggagacccggctcaatcagccacagcctgacttcaccaagaaccgctcgggcttcatcctcagtgtgcccgggaactgactgctgcacatcagaggcctggcccaggggagcaagagcctgagcctggcacaaaaggcaggcaggccctcactcgtcctctgcatccccacactcgttccacctcgatcagcatcccaggagctcagctaatcgctgtctgccctctaatgccactagaaatcagcttgtaagggcctctgctaggcagggctcctctgccttctcatggccctgcccatgagttgtcctacctggctttctgcctctgcctctgccctctcaactttccatacccccgctcaggaaaccaaagaccctcttcagccctctgggctgacagctaaaccacttcccacctcacaagcaactggacggtacctgtagttggcaaaaggccactggccactgctgacctcggcaaagggatgagaggcacagagcccaggatgcagttcctggagcccaaagccacattccttcccctagaggtttggatgctgcatccatgggcgtaggacttagtcctcctctgtgaccccctacctgatgcctccttccccgacatgattgcagtccttgggatctagctccgagcccctcagcataagccctacccccagcagccagccaaagccaccaggtgagcagattcatctgcagagcccaccccccagccatgctcagcctggatccctccttcccagagcctgtccctgggagatctttcgccaccaaggttctaaccgcagactttctaagcacttctctcagagagacgccctgctgctactccgaggagtcggcttcactcacagcccatgcccacagccatcgtaacctgctttcttgcagattgccaggttactaatctgacaccccctttgctgtaagcagtgtcaggacctggtgaggaggtgcaaggagaaggccctgcttggcgtgcccgttcccttaaccctctagctgcacctgcctcctccccactggagacctggaactctcagagagccaacgcacgcaggacccagaggtgggaggtagaacaaagctgcagcaaagaacgtggagtcctggcactgcaggccaggccagggtgcccacctatgccacatacctgcctgctggagccttgcctgagccctgctggcaaagtgcagcatgtttgccagtgtctgcccaggagggagcatgcctgcttcagaggtcttcctgagagccctgctcccagcctgagctgttgaggaggaggcctatgccggcacaggcttgctgtggggaaccctaacatggaaggcttgtaaggggcaggagcgagccacagggctctcagagccaggctcacattctcttcactgttggccagtctctgctccctcatcctcaccctgccaccctaacccactaagtgcctgtgcgcatcctcctatgccttgcccggggcctgagggagtcacctggctggccagggtgggtccagcacctggtctcctaccccgtttgcagagctgtggggatgtttacacacaggaaagtttgcaaccaaactcggttgccgtgctgccctccggaaccgttctcattctccaagcctggtcagctgcccctgcagtggctgctgtgccgccagccaggttttgcggatcgatcgctggtggacctgacagaaccatgtgactgggacctcaccttcccaccccatcactgccccagcatattgctttacactagacatgctcaagtgtgttcatgcacaccagagcaggtcatgccaaaagagttgcaggtcagtgggtggggttctcctcccaccctctgatgtcgtctgggacctctgacccaggccagaacctcccactgaggactgccctgtccatacgcactttcttatgacctagaagtcagtgtgtggccactgagggacctggaattcggggtgtgactgaccacagtaacagcagaggagaggacacagtgattgtatgcatggagtaggggtctcttgagttaatgaaatgcagtttatggtttggtgcatatattcctattttccattaaattaactttatttctaaagcatattttgatttaccatcaagagcaataaagcattaaatcttattttaaaggtgttctgtttctcattgaaaaatagtgaaaatttagcttagtcaactaccatcccggaaggtaggagaattaagcacagattatgtaaaacggggatgatttgccaaggcttttgaacagaaaaattaggaagccagaagcaagaggctgcctcggaatccagccgaggaactctgaagcctgggctctggaatcctaagggaccatgtttctgaaataaacacacagaggacagcacagatcgccgcggaagctgttagcccagcacagcctcttctaagagcaggagccatggataaggtggaggccccagggcaccctagcacccaggggctcagcactgcagggtcttgcagtcactggcagaccacgggacccgcctggacaaggcgaggagccctgatcacagggctccaaacagtgggtgcagagccagccagagaagattcctgctgccctcttcccagctgcaggcagaccagacacagaagctggggtagcagcacacttgggagaccccgagctagatccctctaaagctaaactgttggagcaccaggaacctgcccacccctgctggccttggcttgacactgagcacgaaggcccaggggaaagtgggagcggcagccttggtgccaagacaacacagagcctaaggctagatgcccagaaggacttacatggccggtactgaccaggccttccctagacctgactggccctctgtggcttaagctgccccagggagaacctatcaggtcactacgccaaagctgacttccctctgtgctgctttaatcacctctgtctgtcccagtcctttcccctaactctgtccccttctccctgcaacccgatttcccacatacaaaccatgcattaaagctgcccccactgcatttccaaatggcggggccacaaacaggatgtgacggatggtcagtgcattttattgaatcagcacagtacaaaaataaataaaaataagggaaggggaattaaattacagccaaactgagcttcatgactcatcagattataaaccatacatactcacaaacacgccatacatacatacaaaaagagacaaatataaattaatattaacagtatccacagtttggtcaaagaatagctacagaagaaatttcaccaaaaaaaataaacattttaaaaaacaaaacaaaacaaaaaaaatcaacaaacaaacccaaaaacatcacatgtgtgtaattagcagtatcggatgtacagctatggataattctgggcaggggatggcacattttcttctcattgcaagtttaacactgctggaacaaaactaaattctaataactgcatggaaagaatacatcaacccttcacggttgtaaggaaaagagaaaaatccaatcctgaactatgctcctcccgtggctcctcctcggcgctcgtgattctcacggccagccatctgctctaaggttatttttcttaagacacaaaattctcctggttcgcatgcacggtaccactgtaaaagcaacaagaataaaggggtttttgtagatttttttcacatttttctttttttttttttcttttctatcttgtgtgtgtgttctaaaagtgtcttcatagcagcatgtcagataggttctttgctcgaacacttaagtctagcggtcgttcctttacacagtactgagagccagcgcaagcagagaggacacgggcttcacaatggaaccaaggaagctctttcctcagttgccgaccacttctgaaatatgcaccttctcaaaaaaaatgttttgttttgttttttaaaaattaagtacaaagagaaggaaacagtcagcaaagctggaatcctgttaccgcagctcagtggaccagcgacagcggctggcaggctatgaggatgagcccgctcctgcttagactggacacctgaaggtcttctccctactgccccatggggctccaggcgcggtcaccgtggcagcaggatgtgaggatgggctgcagcgaggcctgcactcagcaagccttgcagggctttccagctccgtgtcagaccatctgagggcccaggatcggctctctaggaacccggatgaggggccggggaaaggctctctagtctgtcaggtccgcttccccacctctgtgagtacgtcgtcggctgaaaggctctgctccgggcctcttccattgagacctcaatttcacagctttatctttatatgcaatttttcagtagtgcttgtgcaagaagttggcagtcacctagaacctaatcctatgcaagatgacctccgccttcctcactgtagcccccagccccagccccagccccccacacccccccccgggggtgggcagcaggagaggaagaggaaaccctccgcagtatcttcacattgctctttgttccccaaagctggagtgagggccatgcaagaagactagctcccttctcttggaccacttccaaaccccaagccaccagtctgggaaaactagaaagaaaaacccttaaagttcagagtgtgttaggcagctgacagggataggtgggcggccacaccctgcagctggaagtgctcagctgcacagtcaccaagcttccaaactgatcaggggtcacacttccatcgtgtaattgtccccaaatgcatctgtctcagtaggttgcacagagcaaagcctctccaggaagagacggagctgcctggaaacagcttaaaattaacaattggggggggggggcagggatgggaaacagcaacacccctattgactgatctcacctccccccaacgatacagaacaaagatcacgggcaccagcgagaggccttagcatgcaagtgggcaccaacctgatctcaggcatagacacccacccgcccagaaggcaatgttgttagtgggtccccggcgctgttctggctttgtacacagggtacaaactgtgaaaagctcgctcagggaaggagctgcccctagcttcacctcatcctttagctgggacccaaaacgggtgaggaatctaatgagcaaaccacctcattaaccagcactaacgtgggagcagagacaaaaggatgggaggggagctctgtcctgccaggaaaggaaagcccttctccctaaaaaagcacgcagcaaaccagggccgtgcatggtcaacagtcatcagcagtctctgcaggctcctgcactgatgccccagggctgtgcagatcttgcctcactcacaacctcctggatcctgagtcaggacagccagctccaggagccttcaagagaaacaatacccagaaaagggctgattcctccagggccaccagccatgggccccagctccgatcatgggacagtgggaagcctcatctaccctggatccatcgtgggtacaggtgacatgggcaagtcagtcccttgagtcccggaaagtgagtggtcagcagccgaagtggctctgaatgcatcttttgggttcgcgcaaggttcatcagttcgaaagtccccagagttcttgaaagggctaaaaaaaaaccccaaggaaagaacgtgggaagaggcccttggtggctctgctagacacatactgtacacaaaacttgattcttttagtaataaaatttaaaaacaagtggaatccttgagccaggataccggctacaggggctcaccgatccagccccaggaggagtcgcttcttgtcctcctgaccgctctcattcttcaagtcagagaacacttgtgtgaaatagtgtgggtcggcattgatctgcagcatcttggagctcatgaggttgataactgagaggcaacggtcccaaaaggcttccttacagctctctaccaggaagggcttgagcgggtaggagatctcattgcccatgtaggaataggagaggtacagacaggtcagcaggacagcctggagctcatggtcggagcccacctcagaggagatgacatccctgcagagcatgtagaggaagaccacattggccggtgtgatgaaaccctggtcctgccagccctgcagaagcagggagcggtccacgctgcgcagccagagcacggggtccgttggggacaagtgcttcaggcggtagcaccggcggcagagaaactcacccaggcagcgcagcagctcactagtggacgcctggacgatgacccgtttgggtgtccctgcagaggtgatggcagggtgcggggccttcttgacagaagaggagaccccagtctgggagccagaaagctggctggctgggggtgcgggcggctgagccggcgggggctgggcgaatgtggacaggttggcacaggacagcgacttcttcaggttctcattgttgagatgcgcgatgttgctctggtagctgctgttgggctgcgccttcttggagttcttcttcttcgctgacaccgccacgatcctcttccaaggcagcaccgagatgatggagtgccgcttcaggttcttgtccttggcgttcttgctgttctgcacggccgtgtagtggcccacggtggccgcgccatcctcaaacagtgtggccttccgatagctgggggatagggacagcaccgtgcccatggtgccactgcgcgcccggcaggggccggcacccccgcgcgcccagcctgccggctggaggggggtaaaggcttaccgagcctgtagcggccgcagagagaaaggaggcgctcccgggacacgacgcgtttagtcctgcggatctgcgtggaaaacaagatggttctcagccccgggcggggctccacgccgcgcccctccgctcgcacttccgaggcccgaacccccgggctgcggccccgtcgagccccagcctgtgcttccactgcggcaccggtcaaagagccgcagtggcctccgcagcaggaatccaaccaggccgcgcacacggccccggtccgcgcaggcttacccgcagtcaggcaggctcccgcggcaggcgcagccgctgcgtcccaggccctccgcaatgcgcgccgcggcccgggtgctcgactcggcgcggcggcggctccctgcttctgtccaaggttctgcagacgccgcggccccgcccccgcccggcccccgcctgcgtatccgccgcgagcccgccggccccgccccgccccgccccggcgcgcgccttgcaagnnnnnnnnnnnnnnnnnnnnnnnnnnnnnnnnnnnnnnnnnnnnnnnnnnnnnnnnnnnnnnnnnnnnnnnnnnnnnnnnnnnnnnnnnnnnnnnnnnnnnnnnnnnnnnnnnnnnnnnnnnnnnnnnnnnnnnnnnnnnnnnnnnnnnnnnnnnnnnnnnnnnnnnnnnnnnnnnnnnnnnnnnnnnnnnnnnnnnnnnnnnnnnnnncttgcaagccgcctctccggatcgcgcgcgcggtccacacgcccgctgggtctcgccgccaggtcgccgccactcgcgtccctcagcgcgagcggcgcacggtggcgcctctagtgggcgcgcccattacgggacacggcgcgggcggcgggaacgcgcgaagccgggtctccacctggaaggtgcctgcgccgcgcgcggagcccggcctcgtgagctcaggagccgcgcagcggagctctccaggcgggagggcgggcgggagggcgagggggcgggcggggcggagggcgggccccgcccagacacgtgctgcctttgttcccgccgcggcccccttggcagaggctgcgggcggtgcggagagctggcccgggcgctggagaaaggaagagccgcaatcagcatcagcgtaaaagcccggcacccattaagactctaggaaagccaggccagaaggatgagggcggcctagagatcctatcacggaggctgtcaaaattgaagctgctgcgcctttaggccagtttcttatttgcccattttaaaacttgatgacagtaaaattgcaagaaaatctggttctgactaccgacacatagttcacaatcagcctccatgtccttcacaaaggccactgccgaattacaagtcattcattctggactggttctggagacccaaattgtcaaataagccaacctgtatcttaactcagactcccaactccgaacctgagagaattcctgaaaacacccaaaacaagaatcttgttgaggtcattaggcttaagtacttccaggttagggaccagggtgaccagagaggtaagtgccctgccctgttaccaccccaccccaccccccaaaaaaagtttttccaggaccttaccaagcacacaggatggctagcttcgctgtggccccttcctaacaatgtttctcatagaacagagtggtacctgctattactagaacacagcacctgacactgggtaacctataaacgaaataatgaagtgttagctcacagctctggagtatggtccagagccagtagtaggacgtgctgtggtgaggatggagacttcaactcaaaccgggaagggggagagtaaataattacattgggggacggggaatgaaggccagtgtcacactggctttctaacaactctgctcaaaattaatccatgacttggaacctttccttgagacacaggccgccagcaccttgccatcctcctgcttcaatgttcagttaggattcaggcatgagccaccataccagctccaacgaaaaccctctccaagagcgctctcaacactgacactgagaccgagcctcaagggtcagactcaaccccctagctgctcttcagtagggcggccctgggtctcttccttttcatcatagtaggctgtaagccatcttcctaaggcctttcagaccagctcccccaatgtttcttctacctggaaaggcaaccgctaaaaaccagcctctgagctgacttcatgcttatggtccccttcaaattccaggattaagcaaaagttaaatgtgttctacttccctaattatacacagccctccaaaggcagagatccacccattagaaagacccgggcctgctgttgcctgcaactgaattccagcttttacaattcaatcctagaggtcacgggccttctccagcacggccacatgcgtgttctctcttgtcttctgtctggccaaccctaccccattaccttcgaaaacctctgccaactaccccagcctcctcgtgtttgcagaacagaagcaggatggcactaccatactacatgctgaggtgagaggttgtcaggaaccctactcacctaggccacgcctggtacgcttgcttcacggaagcagtcagggcagcggaactcccaacagtggctagtttttgggcagaaagcctaagagcctggcaaagagcaaaagctcacttctttcatgtgcttacataggcttccttccaacagaaggtgtcgcccaggttaaagaacgcagattaaaggcccaccgcaaaacctggattaaaggcatgggtcttctcacctcaagatacaagtcagagctcccaaaaataaacaaacaaaagcaatcccttactgatgtgccctccatatttgaattttagttaattgcagaggtagtcaagttaacaaccaagagtaaccatcacacaaggcaccacagtgccctgcccactcaaccccacctctgcctcccacacccagagaaacaatctgtccaacatggcagaatcaagaggagcccagaaggcagagccagctgagtgttgcagggtgttttcttcccagtactcacatagatccaggaagatgtctagttttcactgtcagccagcctacttcctcccaagcctatctctagctgacttgcaaagagggatgtccatgctacacctcagtagacatctgctccacacataccacttcccactctggcccaacgacagaaggccaaaggactagctggctacatggtgcacaaagggttcaacctggagctacagaaccctggttcttgaggaagtcttccttggagggcacagagcagcatctagtggctcttctgagcaacacagattacataaccagcacccagcagggcaccagagcagccctcttgacggctgctctcaacaccagtctcactaatgaacaagaaagccccagtcccttgaaggctagtacctaaaaagaggctctcggctagacagccagaatcaggccagccttgggggctgtgtgaggtggggggagagaaccaggctagctgtaggagacctgggaagggacactgtggtacaacccatgatggtttagtgcagcacagtccagaagtacccgagagccacatgagtgatgtgctatttcctagtaattacatttaaaaagaacaagtgaaatttcttaacatttatttatgtatgtgagtacactattgctctcttcagacaccccagaggagggcatcagatcccattacagattgttgtcagttaccaagtgcttgctgggaattgaactcaggacctctggaagagcagtcggtgctcttaacctctaagccatctctccagcccccagaacaagtgaattttatattggccccaaacaaccccaatacatatataaaaattagtaggatgctttacactttttttcattctaagcctttaaaagacagtttgtggttacacatctgaactagcctcacctcaggggcctgacagcagcattggggctgctatcctgagccaaagataggtccctcagaagcccacgcttgggttccgagggcggtgaaaggagctgctattgaagagcacacaagcacacaacagcatgctggccgccaggactccgcaccttcactcctgcaaaccctcaggaacaacctgaagactacggcccattccccaagtcctcacagccaccctgccccaaaagacaactgaactccatttctgacgccactcctcagttcaacttccctttcaaatatggacacccagaatggctacaaggactcctagtaggcagtgaggtaagatagctctggccaagccagaaaaggctttatggagcacctgaacttgtttggaaaccctccagcactcaagaaaggacaccttttgaaaaaaaaaattattttattggaactcatctgaacatcagatatacctggtgttggtcagcaagaaccgtttgtacatttgataatgatggtgccaaaaccaaaacagggactggacatgatggggagagaggagggttgagaacaaaaacctgattttgaaaaggaaaataaaagccagtcagattcagtgaagatgcaaaacctggtacaacaaaatccttttacaaaatagaaatttattaccaaaacctggaaggataatctgagaaaggttctaaagaatgagaaagaggccagcaggaaggaggcgggagatgggcggagggagggagggagggagggagggagggagggagggagggaggggacagggacaaagcacagtgggcacagcaaaggtgcaggcgcttacctgcccacaaggcatcaaagcctgctgctaggtaactgcaccaaaaacagagcatgctaaaacagcgccaccctgtctgtcaccctttcaagaggcagagaaagacactgggaaggagacatgagggtgcttcaaatgcaacaaggaaaattaatattttttaattaaaaaaaaaaaaacaccccagtctcattcctaatgttcactatttaaaaaggaaaaaaaaaaaaaaaaaaagaacccaaccaaatccatctgacagcaggaaagagtgggagagggaagcagcagatggagtttagacagctcaactcctctagaggaaaagagaaaggacatggctgagaggaaagaggagaggaaagcaaagagggtggagagggatggttaaaacactgagtctaatctagttacagtgttaaaaaaagccacatgcacagcaggcccccgagggctgtgggccctcactgctccccgtgtggccatg

SEQ ID NO: 2848 - DNA, 5332 bp, Mus musculus
gtctccgtctcgccaccacggcccccacacaacccgcagccaccgcgggaggagcggaagccgccggcctcgcccgttcagagccgcgccggctggagctctgaggagtggcggccgtctctctcgctctctctctctctccggcccgaccccgcccaaaggtgccgagcacccccgccccaacccgagcgctcccacctgagccggcgccatggcggagcaggagagccttgagttcggcaaggcggacttcgtgctgatggacaccgtctccatgcccgagttcatggccaaccttaggctcagatttgagaaaggacgcatctacacattcatcggagaagtggttgtttctgtgaatccatacaaggtgctgaacatctatgggagggacactgtcgagcagtataaaggtcgtgagctttatgagagacctcctcatctctttgctattgctgacgctgcttacaaggccatgaagaggcgatcaaaagacacctgtattatgatatcaggggaaagtggagctggtaaaacagaggccagtaagtacatcatgcagtatatcgccgccatcaccaaccccagccagagagcagagatagaaagagtgaagaatatgttgctgaagtcaaactgcgttttggaagcttttggaaatgccaaaaccaatcgtaatgacaattccagcaggtttgggaaatacatggatatcaactttgacttcaagggagaccccattgggggacatattaataactacttgctggaaaagtctcgtgtgattgtgcagcagcctggagaacggagcttccattctttctatcagctcctccagggaggttctgagcagatgctgcactctcttcacctgcagaagtcactctcatcctacaactacatccgtgtgggggcacagctgaagtcttccatcaatgacgctgctgagttcaaagttgtagctgatgccatgaaagtaattggattcaaacctgaggagattcaaactgtgtataaaattttggctgttattcttcacttgggaaatttaaaatttatagtagatggtgacacgccgcttattgagaatggcaaggttgtgtctgtcatagcagaattgctgtctactaaggcagacatggtggagaaagccctgctttaccggacggtggccacaggccgtgacatcatcgacaaacagcacacggaacaggaggccagctacggcagagacgcctttgccaaggcaatatatgagcgcctcttttgttggattgttactcgcatcaatgacatcatcgaggtcaagaactatgacaccacgatacatgggaaaaacacggttattggtgtcttggatatctatggctttgaaatctttgacaacaacagctttgagcagttctgcattaactactgcaacgagaaactgcagcagctcttcattcagctggtgctgaagcaggagcaagaggagtaccagcgggagggcatcccttggaaacacattgattacttcaacaaccagatcattgtggacctcgtggagcagcagcacaaaggcatcattgcaatcctggatgacgcgtgtatgaatgttggcaaagtcactgacggaatgttccttgaggcccttaacagtaaattgggcaaacatggtcatttttccagccgaaagacctgtgcctcagacaaaatcctggagtttgatcgggactttcgaatccgtcattatgcgggtgacgtggtctattctgccatcggttttatcgacaaaaataaagatactttatttcaagatttcaagcgccttatgtataacagctcaaatcctgtgctgaagaatatgtggcccgaaggcaagctcagcattacagaggtgaccaagaggcctctgaccgctgccaccttgtttaagaattctatgattgctttagtagacaaccttgcttcaaaggagccgtactatgtgcgttgcatcaaacccaatgacaagaagtccccacagatatttgacgatgagcgctgccgccatcaggtagaatacctggggctgctggagaatgtgagagtgcgccgggcagggtttgccttccgccagacctacgagaagtttcttcacaggtacaagatgatctctgagttcacctggcctaaccatgaccttccttcagacaaagaggctgtcaagaaactcatagagcgatgtggctttcaggatgacgtagcttatgggaagagcaaaattttcattcgaacaccccgtacactgttcaccctggaagaacttcgtgcccagatgctcgtcagggttgtcctcttcctacaaaaggtgtggcgtggcaccctggcccgcatgcggtacaagaggaccaaggcagctctgacaataatcaggtactacaggcgctataaagtgaagtcgtacatccacgaggtggccagacgattccacggtgtcaagaacatgagggactatgggaagcatgtgaagtggccaaccccaccaaaagtcctgcggcgtttcgaggaggccctgcagtcgatttttaatagatggagagcatcccaactcatcaagaccatacctgcatcagaccttccccaggtcagggcaaaggttgcagccatggagatgctgaaaggtcaaagggcagaccttggactccagagagcctgggaaggcaactatcttgcttcgaagccagacacacctcagacctcaggcactttcgtcccagttgctaatgagctgaaacgcaaggacaagtatatgaacgttctcttttcctgtcacgtccggaaggtgaatcggtttagtaaggtagaagaccgagcaatttttgtcactgaccgtcacctgtataaaatggaccccactaagcagtacaaggtgatgaagactatcccactgtacaacttgactggtctgagtgtctccaatggaaaggaccaacttgtagtgttccatacaaaagacaacaaagacctcattgtctgcctcttcagcaaacagccaacccatgagagtcgtattggagaacttgttggagtcctggtgaatcatttcaagagtgagaagcgccaccttcaagtgaacgtcaccaacccggtgcagtgcagcctgcacgggaagaaatgcaccgtctctgtggagacccggctcaatcagccacagcctgacttcaccaagaaccgctcgggcttcatcctcagtgtgcccgggaactgactgctgcacatcagaggcctggcccaggggagcaagagcctgagcctggcacaaaaggcaggcaggccctcactcgtcctctgcatccccacactcgttccacctcgatcagcatcccaggagctcagctaatcgctgtctgccctctaatgccactagaaatcagcttgtaagggcctctgctaggcagggctcctctgccttctcatggccctgcccatgagttgtcctacctggctttctgcctctgcctctgccctctcaactttccatacccccgctcaggaaaccaaagaccctcttcagccctctgggctgacagctaaaccacttcccacctcacaagcaactggacggtacctgtagttggcaaaaggccactggccactgctgacctcggcaaagggatgagaggcacagagcccaggatgcagttcctggagcccaaagccacattccttcccctagaggtttggatgctgcatccatgggcgtaggacttagtcctcctctgtgaccccctacctgatgcctccttccccgacatgattgcagtccttgggatctagctccgagcccctcagcataagccctacccccagcagccagccaaagccaccaggtgagcagattcatctgcagagcccaccccccagccatgctcagcctggatccctccttcccagagcctgtccctgggagatctttcgccaccaaggttctaaccgcagactttctaagcacttctctcagagagacgccctgctgctactccgaggagtcggcttcactcacagcccatgcccacagccatcgtaacctgctttcttgcagattgccaggttactaatctgacaccccctttgctgtaagcagtgtcaggacctggtgaggaggtgcaaggagaaggccctgcttggcgtgcccgttcccttaaccctctagctgcacctgcctcctccccactggagacctggaactctcagagagccaacgcacgcaggacccagaggtgggaggtagaacaaagctgcagcaaagaacgtggagtcctggcactgcaggccaggccagggtgcccacctatgccacatacctgcctgctggagccttgcctgagccctgctggcaaagtgcagcatgtttgccagtgtctgcccaggagggagcatgcctgcttcagaggtcttcctgagagccctgctcccagcctgagctgttgaggaggaggcctatgccggcacaggcttgctgtggggaaccctaacatggaaggcttgtaaggggcaggagcgagccacagggctctcagagccaggctcacattctcttcactgttggccagtctctgctccctcatcctcaccctgccaccctaacccactaagtgcctgtgcgcatcctcctatgccttgcccggggcctgagggagtcacctggctggccagggtgggtccagcacctggtctcctaccccgtttgcagagctgtggggatgtttacacacaggaaagtttgcaaccaaactcggttgccgtgctgccctccggaaccgttctcattctccaagcctggtcagctgcccctgcagtggctgctgtgccgccagccaggttttgcggatcgatcgctggtggacctgacagaaccatgtgactgggacctcaccttcccaccccatcactgccccagcatattgctttacactagacatgctcaagtgtgttcatgcacaccagagcaggtcatgccaaaagagttgcaggtcagtgggtggggttctcctcccaccctctgatgtcgtctgggacctctgacccaggccagaacctcccactgaggactgccctgtccatacgcactttcttatgacctagaagtcagtgtgtggccactgagggacctggaattcggggtgtgactgaccacagtaacagcagaggagaggacacagtgattgtatgcatggagtaggggtctcttgagttaatgaaatgcagtttatggtttggtgcatatattcctattttccattaaattaactttatttctaaagcatattttgatttaccatcaagagcaataaagcattaaatctta

SEQ ID NO: 2849 - protein, 1004 aa, Mus musculus
MAEQESLEFGKADFVLMDTVSMPEFMANLRLRFEKGRIYTFIGEVVVSVNPYKVLNIYGRDTVEQYKGRELYERPPHLFAIADAAYKAMKRRSKDTCIMISGESGAGKTEASKYIMQYIAAITNPSQRAEIERVKNMLLKSNCVLEAFGNAKTNRNDNSSRFGKYMDINFDFKGDPIGGHINNYLLEKSRVIVQQPGERSFHSFYQLLQGGSEQMLHSLHLQKSLSSYNYIRVGAQLKSSINDAAEFKVVADAMKVIGFKPEEIQTVYKILAVILHLGNLKFIVDGDTPLIENGKVVSVIAELLSTKADMVEKALLYRTVATGRDIIDKQHTEQEASYGRDAFAKAIYERLFCWIVTRINDIIEVKNYDTTIHGKNTVIGVLDIYGFEIFDNNSFEQFCINYCNEKLQQLFIQLVLKQEQEEYQREGIPWKHIDYFNNQIIVDLVEQQHKGIIAILDDACMNVGKVTDGMFLEALNSKLGKHGHFSSRKTCASDKIFDRDFRIRHYAGDVVYSAIGFIDKNKDTLFQDFKRLMYNSSNPVLKNMWPEGKLSITEVTKRPLTAATLFKNSMIALVDNLASKEPYYVRCIKPNDKKSPQIFDDERCRHQVEYLGLLENVRVRRAGFAFRQTYEKFLHRYKMISEFTWPNHDLPSDKEAVKKLIERCGFQDDVAYGKSKIFIRTPRTLFTLEELRAQMLVRVVLFLQKVWRGTLARMRYKRTKAALTIIRYYRRYKVKSYIHEVARRFHGVKNMRDYGKHVKWPTPPKVLRRFEEALQSIFNRWRASQLIKTIPASDLPQVRAKVAAMEMLKGQRADLGLQRAWEGNYLASKPDTPQTSGTFVPVANELKRKDKYMNVLFSCHVRKVNRFSKVEDRAIFVTDRHLYKMDPTKQYKVMKTIPLYNLTGLSVSNGKDQLVVFHTKDNKDLIVCLFSKQPTHESRIGELVGVLVNHFKSEKRHLQVNVTNPVQCSLHGKKCTVSVETRLNQPQPDFTKNRSGFILSVPGN

SEQ ID NO: 2850 - DNA, 407622 bp, Homo sapiens
  misc_feature (1)...(407622): n = A, C, G or T/U
tatttcctgaatctgaacgttggcctgccttgctagattggggaagttctcctggataatatcctgcagagtgttttccaacttggttccattctccccatcactttcaggtacaccaatcagacgtagatttggtcttttcacatagtcccatatttcttggaggctttgctcatttctttttattcgtttttctctaaacttcccttctcgcttcatttcattcatttcatcttccatcactgataccctttcttccagttgatcgcatcggctcctgaggcttctgcattcttcacgtaagtctcgagccttggttttcagctccatcagctcctttaagcacttctctgtattggttattctagttatacattcttctaaatttttttcaaagttttcaacttctttgcctttggtttgaatgtcctcccgtagctcagagtaatttgatcgtctgaagccttcttctctcagctcgtcaaagtcattctccatccagctttgttccgttgctggtgaggaactgcgttcctttggaggaggagagacgctctgcgttttagagtttccagtttttctgttctgtttttttcccatctttgtggttttatctacttttggtctttgatgatggtgatgtacagatgggttttcggtgtggatgtcctttctgtttgttagttttccttctaacagacaggaccctcagctgcaggtctgttggaataccctgccgtgtgaggtgtcagggtgctcctgctggggggtgcctcccagttaggctgctcgggggtcaggggtcaggaacccacttgaggaggcagtctgccggttctcagatctccagctgcgtgctgggagagccactgctctcttcaaagctgtcagacagggacatttaagtctgcagaggttactgctgtctttttgtttgtctgtgccctgcccccagaggtggagcctacagaggcaggcaggcctccttgagctgtggtgggctccacccagttggagcttccggctgctttgtttacctgatcaagcctgggcaatggtgggcgcccctcccccagcctcgctgccgccttgcagtttgatctcagactgctgtgctagcaatcagcgagattccgtgggcgtaggaccctccgagccaggtgtgggatataatctcgtggtgcgccgttttttaagtcagtcagaaaagcgcagtattcgggtgggagtgacccgattttccaggtgcgtccgtcacccctttctttgactcggaaagggaactccctgaccccttgcgcttcccaggtgaggcaatgcctcgccctgcttcggctcgcacacggtgcgtgcacccactggcctgcgcccactgtctggcactccctagtgagatgaacccggtacctcagatggaaatgcagaaatcacccgtcttctgcgttgctcatgctgggagctgtagaccggagctgttcctattcggccatcttggctcctccgtgaatcagaagttttaatgcaaataacatatacaaattggcaggtaacaatcaaggctccatgggatggcactcttcacacggaatggggaaatgggaagagttgtgccaggagggacgtaaaccagggctttatgtcaggaggaggctggagagcattcggggaatgggaagaagaaatgtgatgctgcagtgagggtgtagcacagagggaattcactcattcaaatatattcaggaagggccaggtgcagtggcttatgcctctaatcccagcattttgggaggccaaggcaggaggattggttgagcccaacagtttgagaccagcctgagcaaataggagaccctgtctctatgagaccagcctgagcaacataggagaccctgtctctacaaaaaatttaaaaaaataaataaataagccaagcatggtggcatgtgcctgtagtcctatatagtcctagctactcaggaggctaaggtagcagagttgtttgagcccaggagtctgaggcttcagtgagctgtgatcgcaccactgcactccagtctgacagagctagactctgtctcttattttaaacacacgcaaacacacgcacacacacgcagaggaagttttgatcccttactaagtgcaaggcccagggctatacatgtaaatggtaataaatcaacaggaatcataaaactcacatagaggaaaatcacagcgtgaccagaagctcacaggcatcaattagaaatctcagtctgctaaaaaggacatgctacaacttatctgcttctaataattccctattctgaagataacagaagcaattgcactaatagcaatgctagcttgtatttactgagtgcttactgcccgccttaaattacatgaagcactttatagatgtcacctcacttcacacttcgaggtgggtttttctcatctttattaaaggtgaggaaactgaggcttacgcagatgagctaatttgttcaaggtcatacagacctaggacttgaactccagtgtatgacaccaaaattcccctcaatatttctccaagtttggttggccccctgtccacctgcagcagaatctcctgggctgcttattaaaattcagatctctaagcctctggtgcaggtacccaaagtttgggtaccactgtgccaccactgcctcctgagtatggggaggatgctactctgaacagaatcctattcagttcaggagagctaattagagacttggaaaggatgagaacactaagagaaagtgacactgtgaggagataagcaaagtcacactgagacattgagacgctggacctcaaaaagatcggtgaaataagagttggaattttatggacagaaactctaaagacaggtcaacttgagaaaagtaggaggctcctttctacctggccctgaccttggccccccagcttgattacaattcacttcaagctggtcctaccttggtggcatataagctccaaaggacaaatcaagctcataaatagggataatgaggaacaagaagatgggacagttgggagctggttggcatacagggcatgcagcgagtctgggcagtggttcaggactaagagtgagtgagatgtttgtttgttttgttttgagatggagtctcgctctgtcgcccaggctggagtgcagtggtgcaatctcagctcactgcaacctccgcctcctgggttcaagtgattctcctgcctcagcctcctgagtagctgggattacaggcatgcaccagcatgcccagctaatttttgtatttttagcaaagatggggtctcaccatgttggtcaggcaggtctcaaacccctgacctcgtgatccatccacctcggcctcccaaagtgctgggattacagatgaatgagctgtttttatgtagatataccttctgggcatgagggaggcctaatgaggcaaatgtcccaggtaggtgcagacattgtggcatattacagaggggattcaggcattggatgagatattgggttacatgacctctgggatctcctagattgaaacttttcccctgtataatttcttcagggttcaggttgtcagatttggatataagcatggctcacattatttatacctctagatattctgaagaattaatccagttggttggaaaaagtcagagggtcatgctatgcattttatttcaggatcttaaccctaggagatggatactgctgcagcttaccagttgagaaactgagaaactctgggtaaaaggcaggaggaaagcagtttgggggagcagattatccatcaccctaaatatgatgttgcactcttcctggaatgtcaattctgcagatactgacccaatatgaatgctaggtgaaactagtactaactagtactaggtattagatattgtagtagtagatgtatctagtactagttattattatcgtatcttgtactagttactagatattgttgggtttgaaagaaaaccattccaattcatttcttccctccacctgacaaagtagcaaagtacttggaattggaacggttttcttccaatcccaacaatatctcctctttaacctctactctaaacttttaggagaaaaaggggacagagaaaatgaagacatcatcccaatatttacaaatgggaaaggaacagaagttctgggggtacccagagaagatctagggtgttgctctccctcacttctacttaccttacctcctgaacttcatctcacgaagtgcaatttctctctttttaaatttttttaaattgtttaattttttgttgttgttgttgagacagaatctcactctgtcacccagggtggagtgcagtggcccgatcttggcccacccgggaacctcggcctcctgggttcaagcaattctcctgccccagcctcccggcgcaatctcttaattgaatgtccatgctggatagtggaaactacccattacatgacccaaaccacatattttgagttctggtctcagctctaccactgcctcactttgatctagttagtcagccactcttcctgggactcggtttgtccgtctgtaaaggaggatgtttgatatgaccaaacatatcctcctttacagatatcatcatacttaaacatgatgttcaagtaacaacattctattccttagaatcttgctacctaaagtgtggtctcagaaccagcagcatcagcatcacttgggagcttattagaagagcagaatttcaggacccagacctactaaatcaaattctgcatttttgacaagatctctaagtgatttttctttttctttttcttttttttttttttttgagacggactcttattctgtcaccaggctggaatggaatggcacgatctcggctcactgcaacttccgcctcccgggttcaagtgattctcccgcctcagcctcccgagtagctgggactacaggcacccaccaccacgcccagctaatttttgtatttttagtagagacggagtttcaccacgttggctaggatggtctccatctcttgacctcgtgatccgcccgcctcggcctcccaaagtgctgggattacaggcgtgagccacggcgcctggccccctaagtgattcttctgcactttaaagcttgagacatcctgccttaagacaccatcaatccatgaatagattgtgatatgtctttttgttttccctctcatgggttcctatcacactcccaaactttctagctctaggactgctttcaatggcagaatagcttgagatttagtgattatttggtttggggcttaaggaaaggccatatggcccttaaaatggaacaatacatctacacacatccatttactaattaacttgctaattaattcacctactacactcaagaaatacctgttgggtaccaggcacagtttgaggggttgtagatataaggatgagttgggcacagcccctgtcctagagagtttagggatatgcctgaacagccaactccaacccagagtgataaacacttctgtaattcctaaagaagatgcattccctttgaatgtttatagtcagaaactacgtcatggcaagcaggaataattctggaggcagttccaggttgtccgcctccaccctctgattctatctttcctgtggccttacatctgtggcttgtctgcccacacagggggatgagttattgggacagtccctgtctggtgactcacaggatactgacagtgatggcttgctataattcttctccattccaaaataatcaggaattgtggtgtgatctttcccttagctcaggagtccttaacttggggcccgtagaagagaggttacttccaggggtggaggtgaattggtggcccgtgggcaaactgttctgtgtatgtgcttaatatatttgtctcaagagaaaaagtccacaagtgtttttgttttgttttgagacagagtctcgctctgttgcccaggctgcagtgcagtggcacgatttcagctcactgcaacctccgcctcccgggttcaagcaattctcctgcctcagcctcctgagtaactgggactacaggtgcgtgccaccatgcccagctaagttttgtatttttagtagaaacggggtttcactatgttggccaggctgctcttgaactcctgacctcatgatccatccgcctcagcctcccaaagtgctgggattacaggtatgcgccactgtgcccagccggaagtccacacgtttttattaaaggatgatgaaacctaaaattgagaagtagtgccttgctactctcctcttgctgccgacacccttgtagtaccggctccttccttctcttcctcctctatctcctcccctcttcagctgacatctcccaacaccctctgtgcttagcctgattagttaaaaggagctctgtctgtggtatcacagtcactccagtccccaactcaacaccatcacaggtaagcacagctggaccacaggaacaatggagaaaagaagtgtctagaactcaaagccaagtcgttagcaattggcttgctagtcttctgtctttaagagttagaggtgagaagatgaactttaaaaatcactttttggactttcaggatggttcagggtagtgatccctgccatgaaaactccctttcctttgtcctgtgagatgtctagagtgtcaggttgggggttaggggagagaggggactctacaggtgggtaaaagtcattaatgacatcagagaggcaactgtcaggtctctttatacttaaagaattttttggcttcagaagccatgaaaagtacatatgctatttctgatgtatcattcttagttcaaatccaggctcatgcagtaaagaggaggaggtatgttttggatattttctaaggcagagttccaaatcatttctatatggctgtaagtacgtaatgaagttattttgcaacatatgtttgcctttctacttctgctctgtgataatttgggattataaaataaatttataaaatgccctttgaatatgctgtgtgactattgttgttgttgtttttttcctagctgtcttatttctgtcttgccagactcatgctgaaagagttgtcttccttggatgcaaagcctctggtaaagggagggagggcagggcagcccagaaacattctgggaaagttgaatgggaataaacatttgtggtggaaaattcagggttgattttcgtggatcatcaagagtagaccctctgcagtggctggtaactacagaagggtttttggaacagtagcttttgttcagtgtgaacacacagtgtgcaggcctggtcccaggggagaaataaacacagccctgagatctgcttccggggcaggagatgagactgaggttaatgttgtacaatgactaatttgcaatgcagaaaactaccaaggggggtggatttacagtctcacattttatgacccataggttcacagaccattccatattcatttatcaagcaacagtttattaagcacttcatctcttagcactatgctaggaggtgccagaattacatttacatcaaaaaccagaaaagacagcttccagccctcatggcccttacaaacgagtgagagagacagacagtaggctcaagggcatttagtactgtaatgggggcagcacttccaggatgctgcaggaggcacagaggaggaacagccaattctgactcaggagattatggaagccttcttggaggaagtgatgttgagactgagagcggagggatgagcggaagttagctaggtcataggagtgaggggtggggtggcggggagaacttcaggcagagaacaggatgcaccttctcaggggcatatgggtatatttgacatctaattatttttgtttttagaattacctgttcagtgtttataatctcctagcacatctatgccaaatagagctaagaggtaccctggaccagggttttcaaaaatatctgctggttcttcagttctggaaggtttgcaaaattctgatgtgactttgatttctaagtgttatttaatatttttaaattaaaaatttttatttagcacagttttagattactatttaatttttaagtttaaatttcaggccgagtgtggtggctcacacctctaatcccagcactttgggaggctgaggtgggcagatcatgaggtcaggagcttgagaccagcctgaccaacatggtgaaaccccgtttctactaaaaatacaaaaattagctgggcatggtggcatgcacctgtagtcccagctactcaggaggctgaggcaggagactcgcttgaacccgggaggcggaggttgcagtgagccgagatcgtgtcactgcacttcagcctgggcggcagagcaagactccgtctcaaaataaatgaataaatttcaaactaattgcaaagttacagaaaagttgtgaggatagtacaaaagaaaatcccctcaaaagtcccatatatttttaatgactttaccacttgttagtattttgcatcatttgctttaatcatttatatgtctaccaatatatatgcacgccctccttccacctcctcatcttattatttttattattcttgccaaacagttcgagacatcattttactcctaaatactttagcagatacctgctagaaacaaggacattatcttgcagaatcccagtaaaatgatcaagttcagaaaaactagcattgatactatcctactatctaacatcgcgtctatatttgaatttcaccaattatcccaacaatgtcctttacatttttctggttggagatccagtccagaatcacccattgcctttaatagtgatgtgcctcagcctctttgtctttcacatcattgatatttttgaagaatacaggtcaattgttttgtaggatgccccttaatgtgagtttgtttgatgcttcttcatgattagattccatttacgtatttttagcaggtaaatgatatgtgtctttttcaggagaccatatcaggaggctcatggtgtctgtgtgtctcatgattggggatataaacttttatttgttttattttttgtatattttaaactgtaacaaaaacatgcatctccaaatgtgtttctattcaaattttatcacaaagaacattcataatgagctaatctgctctaggttaccttgactgaatgcagaccagagtattcagtctctcctgccggctgtgcatatacctgaactttgctcaagtgtgtcattgattaataatgttgtaactgcacattggcctagaaatgctgaatgtaaagttgtatgggtaacaaattactgcttagttatacaaacaagaatttgcttgacacagtacaatgaaaacaacatacaaaagtaaactggaatcctgaggctaatagtgagccccattgagcagatttgggttcatcatgagagcatcaatgcctaattttatactaatttggacttatacaagaaattaataaaataccctttgcatatgttgtatatgtgttttatatgttgggttcctatataagatgttgattaaaatgaggatctcttactttggccatttggaaaccacattgtatcccaccatagctcctaaccactgtacaatttctgcaactctctcatcatctgcaagccgtgatgtttcttttcctggtacctgggattttgccctaatttttaacacctacagagctcagggaacacacatatataatttaccaaaaggttttggggtgtggtccctggatgctccaaagtgcatacagtttgagatttctttctttccttcttgaagttcagttctgcttatgttaaaacatgccaatacaaacattaggaatacaaccatacgctatgcaataacctacttagccactgaccgacacctccacaaatgacccaaccataggacagtcctaccttattccagagcttttattccacaaatgaggacactgatatcgagacaggtggatctcctccttctgaaggacagctgctaacggtagtcagatgcaacccagctctgctggtgccagggattggggtggttttctgatggcagaggcagtccctcaggaggtgacaaagctcctttcctttctcttagcaagtgtgggtggctggcagctgaagcaggccttgggcaaggtccttcagtctggtttactcatctcaaactcagccagagttgaagcccagccaggtccttggaggcctctagatttcctcgtagattttgtaatagaagatgtcctaacagaaacacaggactgaataaatgtagataccttagaaagtcatttatttaaaaaaaatagctgggcatggtgtcatacacctgtagtcccagctgctcaggaggctgaggctggaggattgcttgagcccaggagtttgaggttgcagtgagctgtgattgcaccactgcactccagcctgggtgacagagggagaatttgtctccagaaaaagaaaaaaaaaaaaaaaagaaagaaagtcatttgtagtatattttctttgggaaaatacattgagttcaaaaagaattttccaagctcaaccaatgtatcaataaattggagactacttacaactcacttcattccactgaaccagtatggatttcatatttatatatgcaaagtagtacaatagttatttggtggatgcaaaaagaatggtcccatgctcaagacatccgcaataatcctggagagatgatacaaagatatattaaaaacttaataatcatataaggtaatgtctgatgacatgctcggatgagtggaagagaaaatgggccactgaagaatggaggtagtcagacgtggttgaacgctgcggctcctaagtcaaatgacctgcgtgaaaccgcagctgctccacttcctagtcgtatggcaagtttcttaaaagttctctaaggcgctgagaacagctctgggcatttttggtgccccaaaaatgttagccattattattacctctcagtctgtgcttgaaccaccacttcaagaatgggcagggtgtgagtagagaggcgggagtgggttttggagcagggtgacagaatcataatgaattgtcctcgcgaaaagctccacgaactacttttctaactttgttggcagctaccaagtgtgggcggcaggcggccatcctcttggccgcctgagatcccagcgcctgtccccagggggcgctgccacccagctgccgccgcccggcccagcgcgcgtccccgccgcccacccgcgcgtgcgcgccgcccaggtgaagaggcggcggccagggccgcggctggggcgggctcctcagtgggccgggaggggcggagccgggaggcccgggcggggcggagccgggacgagccccaggctggaggcgggaccagccgccgccgtctccgtctcggtgttccggcccctacagcgcccggcagccgcggcgggaggagcggaaactgtcgggtgcgtcccgttcggagccgcgccggccgagaaggcgccgaggagcagcgaggcggcctctgtccggcccggacccgccgagcggcgtgcgcgccccctccccgtagcctcgcggcgcggcctcgccccggcccctcccgagctcatcgcgggcccacggagcggccccggaggcccgagcgcgcccacctgagcccccgcgctggcgccatggcggagcaggagagcctggaattcggcaaggcagacttcgtgctgatggacaccgtctccatgcccgagttcatggccaacctcaggctcaggtgagggcggagcggccgcgcgcaggggcgcgaggctgcgctttcccgagagggggcgcctcggggcgcggccggatccggggtgtcgggagcgcccaagctccagggatggaggcgcggccgggctgcggtgtccgggggtctgccaagctccgcggctgcgctttcccgagagcggacgcccctggggtgcggccgctttggggtgcggggggcgtgtcgagctcaagggccgcgcttccctgagaggggagccctgggcgctgtccggggtttaggtgcagagggtgtgccgcgcgggagggcgcgcttccccgcgccaggtgagggatgtgggcgggccggtgacctcatggaaactgaagggaaataacttgaacgagagttgcggtggccccgaaggccctaggaggactggaggattattttggagagaggctggcgtctcatcccggctttacacttgcttcttttctttctttcttcgcccttcttttttttttcctcctggcgtagttccatcctgtcattcaggatgctatggagtgatccctgagctgtctgttccgggacactggctatttttttagttactctctaaacgtaattagacacgtttccagacatcgaagagactgctgtacttgccagtgccaagataaactgtctgaatttgacaagacgttcatggttttggtttttttcaaggagttagtggatggagctcttgtgttattaacatccttgagaacgtagtcacaactcaacgccccaaaatgggcttccaagatgtggatttgttttagaaagccctttacatgcgattatttcacccttgatagagtaatatgtaaacagttttaaagtagtttgacttaaacattaaagtaagtggaatttcaaaatagctgagttttggtgtgcgtgtgtatgtttccctgcaagctttggctccatttcttctaaggtttatagctaaacatcattccttaagcttataaagtgaaagtcataatctaggcttgggtgcttaaccctaatttcattattaactacccctgtcaatccagttgacaggggtcaatcaggttgattacataccagcataatgataggatgttacatttctgatcaaggtttggatgtacaacttttatagaaatcaccccaaatattaatcaaaatgatatacctctacatcagctataaccaatacccattatcatagtgattaagagtcagactgttgagattcaaattctagttccactgcattcttgctgtgatctttgagcaagttacttaacctctctgtgcctcagtcttcccgtctgtaggattggggttgtcctgagggttaaatgaattattaataatatgtgtatacatacttcaaagattagtgcctggcaaatccatattagtaaaactgttttaagttttcccaagtgcacataaaatagataaaggggtaagttacatagcaatttcatagattaaggttgttttaaattaagagattctactcctctcccccacaggaaataagttgtgtgctttgagaaatgcctttataattttgtcactctcagttataatcatttcagtttttcagacattggtacatttattatgtacatactgtatacaagaccatgtagtaacagttgaatatgaagcctttcattttaacctccatctttcacctccagcaaatacatgggcttagccagagcttttgcagaattttcagaatttgaaattgaaggcatagagtctaacagggctacattagtttgtaggactactcctctgtaatagaattaaaactcttgtggtttttaaaaagtaaattgagggaaggcacttagaatttctgcttttttttttaaagcattaagtctcttaagtgtgaagtttgaatctcaaaatagattactaaggtgagcctaacaactcctatgtgtacagaagagaatgctgcaatttatttatatttatatttatattttttagagatgggcccttagagttgctatgttgagcagactgttcttgaattcctggcctcaagcaatcctcccatcttggcctcccaaagcactaggattataggtgtgagccaccatgcccggccgaatgctgcaatttaattctactgtgtgcaaggtactctaggagataagctaggagtatccaaagaactacaagatgtgctgcttacctctcgaagaggtgacatctcaatgaagacctggagaaaggtggaattttctattgatttaaagaatagttcaagaaaacaacatcaggaggctgagacagaaggattgcttgagcccaggagttcaaagctgccgtgagctatgatcacaccactgtactccagcctgtgtaatagagcacgaccctgtctcttagaagaaaaagaagaaagaaaacagagagagacagagacacaaagagagagagacagagacacagagagagagagagagacagagacagataaagaggaaggaagggaaggaaggagagaaaagaaaaaaagaaaggaaaagaaagagaagataaaagccttataaagcttaggtgattatttgtcaagtaattatagaaattgttctggaagttcagaagagagagagataccttaggttgactccaaaacaccttatagaggaagagaggagttgagctgagttccaaaggatgggtaggatttgtaaaggtggactcgtggctggagagcattccaggtggattaagcagcatgagcaggggttggcggcatgaaagctgactctgggtgacagtgaataagttaagttgtttggaagggaaggggttggtgttgtggagaggtgggaggaatcaccagctctccatatggccattggctaaggcccaggtttttaggtctacctttatacccaatctccacatcattcaaaatcctgggtgtacagatgtatatgtatttgtatgtatctcatctgtgtgtccttgatgactctgagaactggctgtggttctcattgtacagatcagtgattgttcatgacttacttatacattaaaatagttggttccctgtagccataaacacagtgccagcaaagggtagcacccttaccctcctctgaaactataaattctgacccagacagaaaacagtcctctctttcctttcactttgcagaaggtgaccagaaacccaccactgcgtaatccaggtgctgttctgtgatgttgaagtgtttttgtctcctggaatattggtggttgggcacatatttctggttgtatatagctgaaattgagcgtgtttggtccattggtatatatggatgtgtgagtgaaattcccatgtgtgcttgtacctcatgactcctgccctcccaagctgtagttcctgctcttactccccagtctggaatgtcctgtcctcccttcccacctggctcttctgcaaggcctgcttccttcctttaagtcatgtaatagtcaagcactcaaggctgcaggtgcttcatgggtctgtgttttctcaacagcagcacctagcataatgctgggtacagagtacattccttcatgacaacatttttttgtagagagggaaaaatgcttgttacttttttttttaaaagcttatgtggcattgtccttttagaattatcttcttgttttgctattaatctggccttctttttccctcttggagctaaagcttgatttttagacaactgccacaattgatgcaactttctcctaccatttttacttttaaaaattgacctaggccgggcgcggtggctcacgcctgtaatcccagcactttgggaggccgaggcaggtggatcatgaggtcaggagatccagaccatcctggctaacaaggtgaaaccctgtctctactaaaaatacaaaaaattagccgggcgcggtggcgggcgcctgtagtcccagctactcgggaggctgaggcaggagaatggcgtgaacccgggaagcggagcttgcagtgagccgagattgcgccactgcagtccgcagtccggcctgggtgacagagcgagactccgtctcaaaaaaaaaaaaaaaaattgacctagatgtgtgtctggatggggcaagagtaaaagagtgatgtggattactgcgagttaggatatctgagaaggagcttcaacttatatttcttgctttataacaaaacctgcggccgggcgcggtggctcacgcctgtaatcccagcactttgggaggctgaggcgggcggatcatgaggtcaggagatcgagaccatcctggctaacaccgtgaaactctgtctctactaaaaatacaaaaaaaattagccaggcgtggtggtgggtgcctgtggtcccagctacttgggaggctgaggcaggagaatggcgtgaacctgggaggtggagctggcagtgagccgagattgcgccattgccctccagcctgggtgactgagcaagactccgtctcaaaataaataaataaataaaacctgcttgtgttctaacaaaaccctggaatatctgagaaggagcttcaatttatattccttgctttataacaaaacctgcttgtattgtgagggctccttctttccctcccagaagtctcttgttgggggatatttcttttgactttttggtggagatggaggtggtggtgataagttcctcattccaatttccaagggtctctgctcaggcgtaagacctctgtatgagtcctgcctgcttccatggtcaggagcagttcctgccagcaaccctgatgaccacttgaagccctaaccacaacatccctgtcctaccatgttctgctttctctgtagccacttcctttttggatgtggagctcattggttccttttctccttacatgggccattcctatacgtgagttcttccagcattaacatcagctttgcaccctccctctgagagtcctgccagggcaagctgcttgcatctgctcctcggcgtgctccttactccgcacactcctcactctcagccatgtgcgtgaaaggaagaatgcaggctactgctcaggagtggacttgagccacggacggtgtccttgacagaaatgctttccattttataggacaatgaaatatacgttagacttccagaggtccagtttcttaactttatttgttattggttcctgttttgagaataaagcatctattcagtctgatatcttggcttctcagaaatttaatttttcaccctctcttttcttactgggttttgtcttccataaaagcaatcatctgaagcactgtgcatgccaaagctccatgcaacttctcttttttaatctaacacagtatgtcttttgtacctttgcttagacctgggattttcagccttgtcactattgacattttagacattttagactttgttgtaggggctgtcctgtgtgtcgtaggatgtttagaagcatccctggcctctactcactagatgtcaacaactccactcctctttcatttatgacaaccaaaaatgtctctagacattgccacaagtccctgggggggttgtgtgtgggtgggtgtctttgtgctcacatgcatgcaatattatccctagctgagagccactggctcttgctgttttcaccccctggaatgtcctcctttcctcatctctgccctcattccctgcctgccatactcttactcatccttcaagaccagatgtgagaaatctttcccaatcccccaaaacaggtcaatgtcacattctcatgtgctctcaggatacatggacatttattcataacagagaatttatcatattcatattcctcaccaacctatggaatcctcaaaggcagatagcctgttcagaggtagatccaggttttctggtgctttgaacctcataatgcttgggggcaaccacctttaagaaaaagaatgtaaatcatgaatgcagaataaaatgcaaggctttggaaggggaaggtgcaagtgagtggctgtgaagcaaacctacctttaatccttttgcgttttctgtgatgctacagaatttgcccttccccatgtttaatacatcttaaaatgaattaactgagtactcaaatgttggctgattggtcttcaaccaatggaattatttcttttttttctttctttttttttttttttagcagacaatcttctcaaaatactgtactttaatagaacttaactgtgtgttggggcagtgagttatagattagaagaaaggcaggaaacagacacacacatactcaccacaccacccctgtattctttctctgtggctgtttggtcatttggaaaatttggtgggacaaagggtgtctcttgcttgccagggaaaaaaacccatagataccctgggtggtcttcaagtaaatgtaaacctgccattggttcagggctctagttagaaatagctctagttagatttataggagaggtgaatggcacactaaatctttttggcttccatgtgaaattctttggcaacctcttttgaaggcctttggaaaaggacagtttgctctctgcctgttttgtacattggcttcatattgggacaaaaatgggaatttgggttttggagctgccatttggagtgaatcaccctgccgcctggtttcctttcctactccgtgacagatttccgagactatttttattcagggtcatttcttgaccctggagacttctgctgaatttagttcccaaatagagccagatgtgggtggaatcaagcacttagaagttgctactggttcatttcattgcaggttctgatgggatctacttttcttttttcttttttttagacgaggtctcactctgtcacccaggctggagtgcaatggcacaatcatgattcactgcagccttgacttccccagctcaagcaaccctcctacttcagcctcctgagtagctgggactacaggcgcacaccaccaagcctggctaattttttttttttatttgggaactacttttacattaaagagatacactttggctttttgcttaactttgagacaaaaatgttgaatctgatatagctagaaatgtgtttatttagtgatctccatattagctctatgtggagagctgttcgttgacattctcacctaagtgtgagtcagctaagcaaaatggacactatctctaggagtgacctcatttaatgataattctctagtacccatttgtggtgctgccactggaactggtttgggtcattgtattattgcccagccactgctaagtcggggaactttactgtcagcagtggctccagctccgctgggtagattacctgttcatgagcctcaccgacatggcctataaaaatgccaactatattcataatggggtcagagggtaacagcattttaaaatatgcattgtatgtctctcctttatcatttattagatgccttgatttggatgacagttttatttcctgtaggaagcaggcttctttcagttcaactgcaatgtaattactggctagatctctttttttttttgagacagggcctcgctctgttgcccaggctggagtgcggtagtgcgatcttggctcactgcatcctctgcatcccaggttcaagcgattctcatgcctcagcctccctagtggctgggattacaggcacgtaccaccactcccagctaattttttttttttttgtatttttagtagagatggggttttgctatgttggtcaggctggtctcaaactcctgagctcaagtgatccgcccgcctcagcctcccaaagttttgagattacaggcatgagccaccgaacccagccaagatctcttgaatagaacaatgttttccaaactttagttttgagcatttgtgggaaaagagaatcaaaagtatgcttccaatagggaatcatggaaagagcacaggctctgagacgtaaatgaccaagttcaaatctcagcttcagctgagcatacttctcttaccataggcttccctaagcctcatttccttatatgtaaaatgatcgccttttagggttattgagatgaaatcacatgttcagcaagtgcctggtatataattctcactcaactaatgctaactcttcctgaatccttcccgaatggcctcacctccctaccctgaccccataactgctagagagctagatattttcatctcttccttgtcatttcttcctccctcactaagacaaagttttgtcttttttgtttgttttgattttgtttggggggcaaggatgaaagtttgcaatggcgcaaactagggaattcagattacctagcagagagtgcaagaacacgaaatagacaaatctggaccttaatcttgtctttgttcctttactaccacctgtgtgactttggacaagtgacttagcttctttgagcctcagttttttcatctataaagatgatgtgttcttgtgaaattatagcacatttaaaatatgtgtcaaatacctatggtggtggctgaagcatagtagatactcagtgggtacccctctgtctctgctccattccctggtccagccctgtgaaccaaaaatgcccttgctattcccaattcactctgtaactatcaccctatgcattctcataatcacattccctccaggtatcactatttaatttctagaaatcgttttagactctttggaaaatgaaatatattcatatttaagagatttctaaactattttattctgcatgtcactgttctcagcctccgtgaaggtttgtaacatctaggcactattgctaggtaatagactttaagtctagagttttttttttgttttttttttaaatctataaccaatttcctcattatctatagaccctatatgtttttcatataatctcctggtattaaagctagcaactacttgaattctttttttttttttttttttttttttgagacggagtcttgctctgtcgcccaggctggagtgcagtggcatgatctctcggctcactgcaacctccatctcctgggttcaagcagttctcctacctcagcctcctgagtagctgggattacaggcgcctgccaccatgcccagctgatttttgcatttttagtagcgacagggtttcaccatgttggccaggctggtctcgaactcctgacctcaggtgatctgcccgctttgtcctcccaaagtgctgggattacaggcgtgggtcactgtacccggccaactacttgaattcttacagtgtgcttagtgctgggttgggtactttggtgggggttacttttaataaagttactctttgagggatagcttaattgggagtaagagataccttaataaatggatcaatataaagtgaaatatgattgagctcaaatgaatagcacagacaattctttttttttttttttttgagacagtctcacactatcacctgggctgaagtgcagtggcgtgatctcagctgactgcaacttccgcctcctaggttcaagcaattctcctgcctcagcctcccgagtagctgggattacaggcacctgccaccacatccagctcatttttgtatttttagtagagatgggatttcaccatgttggccaggctggtctcaaactcctgacctcatgattcacccgccttggcctcccaagacaatccattcttttaagggcttcctacagagaaggaatcaatatatcatatttttagaaaagagaactgatgacaatataattaagagctgtctatatgtatgtactatattatgagggaattcagaaaaagaaaaaatggcattgggagtaggtaaaaaatgccctatggaagaggtagaatgtcagcagacccttgttgaagtagagatagtctttcatttggaaacagtccttcctccccctgccctgtggcctgagccatcctggccttcttttcttctctctccactcactttaagcatgcgtgggctggctgtgctgctagccagcttccattgctcaaaaatattttcccccacattgtctgcacttctttcattcttgtcttatgctgccccaaattctcccaactagagattgagttaggttgataagaatccccttagaaagtcaaatacttctaatgcagcacaagcatgttagtgtaaatctgctcagtctggttaatttctttctcatgcctcagtggcatcagttagaataaggaatagagaatttcatttttgagaaataactttacagtatgttactgttcagggatacggcagacctgggatagagaactgaacccttgtgggaagggacgggcagcaggtagtataaggttagttcattcttggggaggcaggtcctgatgacagagaggggagggtacctgacgaaaactttgctcaattaaaaattgtgtctctggtttatctttgggtctagaagagagagagaatttttttttcttcttttattttatgctcaattacagaacttccaagacacagcacccagtgtgtgtggtgaatactgtggccctaacatttgggtttaagggacattactgaggagccaggtgcaatgacccatgcctgtggtcccagctactggggaggctgaggcaggaggattgctcaagcctatgggtttgacactatggtcacgcctgtgaatagccactgcactccagcctaggcaatatagtgataccttgtctgtaaaaaaatgaaaaataaaaagagagaccctagagagccagactatgactctaatcatggttttcaacattcttattgaaatagaatggtctggttttggaaagtagatcattttttaagtgaagggttccagtaagtgacttcagttgatggagaagggaatcaagaacatctgctagttcctcttgatattttgtccaccttccaggctcctcattgtcctagcctcattcctgaagatatcccagtttgtattccaggcacagctgcccacatgggactagttacaattatcccagcatgggattgcctttattttcccacatttctgctccttgatacacaatatagaaatggatttcactttaatgagattaaagcattaactctagtaaagctattctgctttaataaaaagattgtttactcctgaacataggtttttcagaaaaagccacaggccagttcagagttctaaaagaacctcctggaatagatggataaacacaccaaggaacaaacacagctttccttttattcctcctctcctcatatctctcacagttatattgttaagtcttgggaaaaaacccattaccacttactgtatattcacaaggttcacatatgcagaagaagcaaatgaatttgtcaaaaaaaaatggcttaatctaaaacaatgaagcaaacaaatttcgcctctgaccacaaagtcggctttgagtaacttgtacaatagaggatcatctgtagcaacgccgggttatcccaaatggttctatctcagactgttgctttgtgtccagtataaagtcaagataaattttatagtcaattaaaagtcaaatcccatgaaaaaaacccaacaacatatttattttggataaaccccatcattggtcatatatcagctttgggttttacagatatttaggtcattttaagtttattataaggatagtccttgataatgagattgagttaacctgtttctgccatcttatcccgtgttccgtcttattaagacaaaaacctataaacaattcaaaaaatgtctagaatagtttaaatgtcagtgagtacaactgttttttttaattgcattcaacctttcctatcggtttatatttatgtcctacctctacactcaaagttctaagggcaagacaaagtcttatctcccaaggcttatttccaggcattaaggagaaaatactttcacctctatcacggaataaacaaataaatgcatagtacttctgcatctttgattcttggctgaactatgcatttactatattttatgtatgctttttaatgtattctattttatgtatataatctgatttttctgtaataactccagtttttggtaatgcaggaaaaatgaaattaccattgctcttggaaaaaccactaaaatagattttgggcctttgtgaaatggtagacatttctctcctttttttttttttttttttttttcattcgtagaactcagacatgtgaagctagacaccgtacaacaaagcaggaaacattagtggtgctgtaatcttgagcagtctcatgatgttgcttgccttagccagttaactacattttaccatactaccaaacttttcacagcattgtgatgcctttatatagctttgtgtcatttgctaagtgtttctaagggacatgcctttacacagcaaatctagggactaagcttgtttagattggtgctttaaaaaaaaatctgtaatctgtcgtgtcctgggtcatggaggtgcctgaggagcagtcttggattacaggtagaggtggagtagggcttcaggccctggcactctagtgcttttaacagagcagctctgctcctgcatagtggggttccaaggaatatgtcatttgggaaaaaatgctatcacattggaaaaacagcttgcaaacaactgttttagatgattttttttccagaaggcttttattcttgcaaacaccaaaaaaaaaaaaaaaaaaaaaaaaaaaaaaaaaaaggaagaaatgtttgtaaccaaaattattttaaaagtggcagtatggtataaaataatgagcaaaggaaatatttcagttattcaaagttcaacatggctatggctaccttctacagtaaaacttaaaaaatctacttcagttctctgagcctttaatggctcagtcttaaaatgagactgatttctgcactacaagattattatatcaaatgagataatagctgggttgtttattgttctttacacatagagggcactcagatgttcgtgccttttcatttttgcttccttaagcagaatataaagaatgtgatttaattctttttcttaatgacttagatcatcatgactgtagttataaaaagttgttttcatgtccttggtatttactgtcatatttgtaatgttttgttccacactaagttgatctaaattaacttttaaaaatatatggttcagtttctatcgttgctttctgtgtgcctccccgtgaattccctttcccctcttaatttacaaaggtaatcctctctgggttttggctgtcagccgagctcattagaagggtgtataaaaaaggagttaatatgttgtaatgaagactgaggggttaccttgggtatatcagtcgtagggcaagagttttaagatgtctgttttttatcttctctgctgagaggtattttttattgctttgctgtgtttggctggaaaggcaagtaggccaaactgagttctaagtaggtaaggtgctactctaaaacatattactgcccttggtatttgaattgtttgtgtggttgaacaaaccaaacatgatgagtgcatttttccacacagtgtgcaatttatgactgcttgttgacttgtggtaggcagctgctattggcagaatctgttactgtttgcatctccacctctcaggttcctattttatctgaaactcttactgaaaagaaacctcttcttcaacttcttgatttaccctaggctggggttcccaaatccagctttgtgtcatgatcacccagcttttaaaatacgcagattccccggactctgtcttctggagatggtgatttattaagcctccttagtgcccaggtgagtctcatatgcagccaggctcggagccactgtcctaggctaacgtttttcactccacagttgtgttctattaaaactaaatggactatcactgtaatgtgagctgactgacatattaacaaatgtattacaacttatccaaatagtcagtgttcttagttctgttttggttattaaatcaatttaatcgttgataatcacactttattctttatccttacaacaagttttccattttttcacccgatggttatggttatccagttttagctacaatgtatgtatttttctgtcctcagattatccataaaaactgtataatcccaacctccttgttaataccttgatttatttcctttacagtcttttctagacatataaaaaatgtacatattcaaaactttggcatcttcctgcttatacaacatatagttttgtaaactgttttctcacatagcatggtatcttaaatgcttttccatgccattaaggtgcctttgaaagtatggtggcagccacgttgtctttattcttttctggatatgcaggagcaacccagatagacacggttcttgttctcatagaactgataaaccagcaaggggaatatactaaaccagtaaacaaacaaaaggataactacaaatagtaataagtgctatgaagagaaagagcagagttcccccataggggaaatggaaatgacgtgtccaagtatgtgggtgtgtcacagggaaggcactttatggggaagatagctttaagcaagatcagaaggatgcggaatatgtgcctgttgggggagaggtggggagcgggggaacaatcagatagggaagagagagaagacagagacataacttttattgattatttatttattgagacaaggtctggctctattgcccaggctggagtgcagtggcacaatctcagctcactgcaacctccacctcctgggctcaagctattctcctatctcagcctcccgagtagcggggactacaggcgtgtaccactatgcccagctaatttttatattttttgtagagacggggttttgccatgttgcccaggctggtctcaaacttgtgagctcaggtgatccacacctgccttggcctcccagtgttggaattacaggtgtgaaccgtggcacctggccgagacatatttttagataggctcagtttctgaaactgaaaggtatccagtgaggctagagtctttgggcagagtggggcaggcaaagtaggggcaggtgaagatggagcactcatcagggaccacactttgcggaagggtcttgggacataaaatcccaagattcaaaatttaagtatgttggggagcaattgaagggctttacatcagggtgacaacacatttttaactatctgggctttctttcatttagctcctataatctctctggtctgggagatggctgaatgtttgttttttgtcacattcgtgaatagggtgcagatttggcaattgttttctacacatttcctctgctaagaataaatacaggccaggtgcggtggctcacacctgtaatcctagcactttgggaggctgaggcgggtggatcacgaggtcaggagattgagaccatcctggctaacatggtgaaacccccatctctactaaaaatacaaaaaattagctgcgtgtggtggtgggtgcctgtagtcccagctcgggaggctgaagcaggagaatggcatgaacctgggaggcggagcttgcagtgagctgaggttgcgccactgcagtccagcctgggcaacagagcgagactccgtttccaaaaaaaaaaaaaaaaagaataaacaccaatacagcccagacgtgatccctatagtataacagagttgtttcttggagtaggtagccctagggcagtgttttgttgatttgaaataagtgaatcttgataatgactaatgggctaacactgatttgaggggatttacttttcttcattttatgcttcaagccagagaaattctgagccatgaattctctgatgaagtctcttgagtcatagaattttaatgccggaagggaatcttgaggttcctcactgttgtatagatgcatgaagttagaaacacagaaagtcaggactttttactagtctagtggcacatttactacgggggcaaaaatctgtctcctagctttgtgtttattattcggtttttgtcctattcctagctcttttgctttgcaatcaagtagcaactcttcaatttcctttattattctcacttaaaagacctgaactagttgaaacaatggaaaagcttacaatgtaaataagaagtaaacctctagttctctattgaagggcaacaatttaacaatacaaatacaaaataacattgttgtaggtgtgagaaagatggaggtcttagtagtctatgttatgtgtcaccattgacttgggctatgtcagaggaaatacagggacttggaagttccctagcttatcacacctctcctggaggggtgtgtggttgctagcttcactctatatcagtcagaatgctgttgggggcagctaaaaagaaaaccagaccaaactggcttaaacagaaaagaaacatgttatctcacacaacaagaaggctaatgataagagaggttctggccagtccctaaggactctgcctccacttgtctgtgattcccttggttttgcccttcttgtgctggtttcatcctcagctggtggaaggtcgttgcaacagttctgtgcatctcacccaggcacagtaatgtcctgaggaaggagagtgagctctctgcttgtgttgtgctccttgcttaggaagccccccagaagacttccttacatgtcacattagttagcatttggtcacatgcccattattaaacctgccactggtaagaggaatgtggttatcatgatggaatagtcaggcgctgatgatagatttctcatttcctgcagcatgtggctgtatggaagggagtggatacctgaacaaagtcaggcttttttaggaaagaaggaattttaggggcagaataggatattggataggcaaccaaaagtgcctcctctacacagttttacaagctatgtagacagaataggatttattcagaaaagaatgctcaatatgttgagggtacttgaaaccatgtcatttaaggaatgactgaaggaacaagacaggacatgaacaccaacctcaaatacttgcgtatgaattgattatgtttattctgggagaccccaaaagacagaattcatgccagtgggtaaaagtgaagagatgtagatttatctttctgctccttttcttcctcttcttctcttcctcctgaagaatttggtcctaaagccattgggttggggcacagcaaggtaggcatccatcccaggggaaggggagccacaggggcccagattagagtttggagccaagttgagtaaagagggggccaatgcatgaggacctgagtatggaaaaagagcatccgtgctggcatggtcttggtgacagcagtgggagataagtgataaacagggagattgacaaacaagtaaatatgttgaggataatggagtcaggtttctcatggtcataaaagagagctccaaatatggaaaggggaaaagtacagtcaaccctttgtagttagattggaatcagaagttttcaatatacagctagacagaggagtaaatatagatgtgaatgcgtatgcacctatatccatacattatgtattccccatctctgtccattgtgaggacctgggagcagtgataccttaatataatagcaatggtcacacctagtaccatcctccactgaaagaaatcagggctttgtggagaaatgggtaattccagggttgtcacaaagtaaatattaatacaaggtgagccgggggcatcttgtattttcagaaagcaaggaaatcctcaaagaatgatgaaaaatgtaaaacagattcagaaagcagcttaagtgagtacccactagctaaatctgggtcagtttaatcatcaaaatgaaatcggaaaccatgagtccatacttacataaactaataaataacttttgaagtttgatgaggaatgggatatttacttagtatctccctacaaaatgttcaattaattaataccaaagaaaaaaagattattgttacagtggagaagcctgacagatgctaccttaatgaagtgatcaaaatgaacaatgtcagaaatgggacaaatcagaatcatgtaccatgtgatcaggtgcaatgagaaaaacacagcattacttcctctgtgacattcctgctaaagatgcataacctgaatctaatcagaggaaacacctagcaagctcagattgaaggccagtctttaaaataactagcctgtaaccttcaaaaatgttaaattccaagaaagactgaggaagtattctagaagcaacgagaataacaagacataacaactaaaggtgaagcatgatgctgaactgtatacttttgctataagggacatttattggggcatttggtagaatttgaatagggttcaagaattaaatcttagcaatatatcatatgttaatctcctgatattgatagttgtattttggaactgctacttagacatcaaatggttcccaaagaaggtaatgagtttctggtcatgtgaacttattgaaactggagttaaaggttcactcattaggttcttgtaaagagatgttgtgcatctggaatattggtctatgtggcctctaaagtcatacattctaggattccagttgtctaaatgcatattttaaaggaacagttgaaaatattaaatgatgttatgctctcagttattacaaattaacaattaacattaccaatcaacaggtattacttaaagctttttgctagaaactgtgtatactgaggactacatataattcgttccaagaataatgatataattggagataaatggaatgaaaagatatgtaacccccgaaagtagcatataataaatgcctgatgattagtagcaatattctacagttcacatgtggagaaaatttctgaggagtctgagctttggtggttaaggaaggcctttattgattaagggattgggctgaatgctggaatgtgaataagacttaggtatgcatgaagtaagaatggcaagggagagcattccatgcaggggtgcctctgtgaatggttgtgacatgttcagggacggtgagaagaccagtctgatagggttaaaggagtctattttttttttttttttttgaggtggagtcttgctctgtcgtccaggctggagtgcagtggtgcgatctcggctcactgcaagctccacctcctgggttcacgccattcccctgcctcagcctcctgagtagctgggactacaggtgcccgccaccacgcccagctaattttttgtatttttagtagagatggggtttcaccgtgttagccaggatggtctctatctcttgacctggtgatttgcccacctcgtcctcccaaagtgctgggattacaggcatgagccaccgtgcccggccaaaggattcttaaaggattagctctgccttaaattcattacagttgggaagacaggattagattccataaaatggaaaatgggaaggaaactaattattggggcagctactaggcatcatcaggtgcagtgttaggtggttttcattcattaatctcttataatctattcaaccctacaagataggtgttatacaggtatgaaacacgtgtttacagagaaagaagatggctttgccaaagtcacataactgattaagaagcagtttgaatttgaagccagactgacaggacttcaaagtgcttgacatttctgctacccctgcttcatacatatggaaaggaatagagagcaatgatacagacttggggggaggggatgactgtatgtgtagaatatcgagaagaatattggaaaaaggaggatatttcccagtacctcttctcatgttgagatcaaagtgctcatagaacatgcctctgagatttagatgatcagaaatgagcataaaatgtgagaaaagggccaaggattgaaccttcaaagagatctgtatttaagggacagtcagaataataaggaccctgagaggagtctgaagaggagtgtccatggaggttggaagaaaacaggaaagtctgatatcacagaagttgagaagagaggggtcagcaaagttgcacacttgagaaaggccaaggaagagaaggatgaagaggtgtccattaaatacagcatccaagagggcattgatgactttcattagggtgatctcagtggagaggtagaggtggaaaacagtttgtagtgggttagtcagtaggggtgaacaactagagactgagtgatattgctttcaagaagtgtgttggaaaggagagaagaccatagctacaggtttttgtttttctgctactttttaagccaagagagttgagtgtgaataggtaatgatgggaaggaggccgtagagagagaaagacatttgagaggacagagagtcttctgcaaaggatgagatgtctgaggagatgtgaagcgctggaatctggagcagcagacatgaagaggatgaaggctcctatgctttttgtggaaattgtccatatctctccctcatacaacagaagtctttgtgttcccaggcagggtggtctcactgaccatagtatagctgctgtgtggtctatactatttcaaaaagaaaaaaaaaatcatccaagaatagcatctgcatgcacattctgattgatggcaactaagatacattttgtttaaagctgcaaaattcggtaccgtcattataatgctgtcattctgaaatgcctgccttaaaaatgagagtaaaagaagaacaagggaataagaatgactatatactctcagccaatgaaagctagtcctacagactatcatagcatggatccatgagttagtgcttcagacaacctcatccaaagagccctgtgctgtgcgttccagagatgagtatgtttcacaacatgtattgtttactctgttgtgacctcctctccatttattttggcttctacagacctattttgatttgtaatagttgccaaagatttttttaagtgaatgaatgatattaggcatgcaagaaataatactagacctgcagcttctgcagtgtagaaataaagggggaaagtactatgttagatgtaggagtaggagtcgaaacctaagaaaaaacacaaatgtccatcaacagtgggatggaaaaataaattgtattcatacaatagaatgctagatgacaacaaaggtgaatgaattacagctacatacatcagcatgaattaatctcacaatcataacattgagcaaaagaagccagacagaaaacaatacgtactctatgctttcatttatatagaattcaaaaacaagcaacactaatctatggtgtaagaagtcaggataatagttatttttggagaagagagaggggacagtaattaggaggagactaaaggagggtatctgggggtgccgggaacagtcttggcacaggcagtggttacgtgtactaaagatgtgtacattcttatgtatgaatgttatacttcaataaaagtgtgtttttaaaaaaggccacaaggagtcctcaaggaaatcatggaggaaacagtacaaaaatcagcaagcaattaaaggtttgtagcaatcctttgaccttacatatggcatcataaacctcattgcagccaatggggatggaaccaacaattttattgttagttgaaggtgtgtcatgacttcgtggatttgcagagactgcaagagtaactgccaaatatgggatgtgtgcgtgtgtgagtgaagctacactcacacatgtacacatacacatttgtatatcatatgttggcatcttcatagggaccacagttaaagcgtgcagattcatccagttccctcattccaggaaactctacttccagctctctactttcaattcatgtattctgtagctatagttacggactttattgtgcctattcaacctttaccctgtgtttattacttctcaaatcactttctaattttattttgagtctcagatgcctttcaagaatttcacatttatgggatgtttttacttccataaatgtttttactgtgttaacctggcccagttggtctgtgtacagggagtacaaactaattctgatgttagcttgttaaataaaattaaatctgtcaccactgcataaagtgtataatgtatcccaaagtgaagcaagaattatttcttatttgttgtttgccattggcttcgccaatgatttctccctttagcccagagaagaactgaagttgattcctttagatgtgcaagcttttcacattcaggtttatttcaggtggaactttgcttttcttggaggaaggtgactcatttgtgaggaattctgaatggctaagtaaggaagagatctgtttttcagagtttcataaatttttactagtctactctgccaggatccatttttattccttcatgtaagctcttatgagttagatcttaatgatgattctgattaataagctaaaattcccaagggttacctattgcctatgcttgcaattaatgtaaaagaaactttccgtggagtgaaaaggagattttatttttctttagtttggactgattccagtatgctgaagttgttgatattgctagtaaaaaaagtatttgaattttcattctgtttttaggaaactaagataatttttgcctatatttgaaatcagtagctatgaaaggtgactttcaagtgtattcctgagaaagaggaaataagaggttgggggaagattctaataattaagtttaaaatgtgcgtactttaaatatcactgcgagacagttgtttgaacttgaagcagataccatgcttcctaatgttgaatttactgtttgtttcaataatttattgacaaatttattgggtaaatttgccatcttgcatatattgattctagagcattggttcagaagtgtggaaaaaaagatccataatttgttaatccatcatgtactttttgttcgtttgtgagccaaatcattcatttaagcaattagcagttaattatccatcaactatatgctaggttttagagatacaaaaatgaatagaatccttcccttgcccctgtgtaatccaggtctatagggaaagacagacatggaaataattacagcagtgtaatccatgctgtgatggagatatggatggcatgccccaggaactcagaggaggatgcatccaactatttctgggaggtaaacggaagcttcaaaggagatgtttgaactaaagtgtgagcaggaagttggcaagttggccatagaataagaataaattcatcaaatcctatgctaaagattttttattatgtggtgatggggagccattgaaggattttaattagggaaatgacttgatcagatttacattttagaagactgtggtgttaatgaaggagatatataatcacatgactgaagctggaagtagagagaacatttaggaaattgttgaaagagtccaagtgagactagtgagaaagtgggaagagagacacagaggcgtggttttcatatctgttgagaaggtagaattgattggctttggtatttgatttcgatggtgctgtttacaaagagtagagatgcaagaggaaagaaaatttggagtgtgggttagaaggtaagataacaggctgaggctattgtttcttgcgagtcatcacatggaattgtctagtagccagatggaagtactggactgtacagttttgaagcagattagagtggtgtgtagtcaggacataggtgttacagtcatctgtatatgatgacatttgatgcttttgaagtatatgagattaccttattagagaatgtatacagtgagaagtgaaggtaaataccatctttcacaaaaaggtcttttggacctctggtttgtttctcaaaattgtttctttttttatctaaatttataaatacatgattcttgtagaaaaattgaaaaatttagaaatatataaagacaataagataataatattcacccataattcaattctcattccccaagaaagtcactgttaggaaaaaactatgcatgtatttgccccatagttgagacgacattttacagacaattttgcaccctatttaccattaattcaagcatagtagcatattagtattataagtaacattgcatttaatatgtctgtatgagaattattttnnnnnnnnnnnnnnnnnnnnnnnnnnnnnnnnnnnnnnnnnnnnnnnnnnnnnnnnnnnnnnnnnnnnnnnnnnnnnnnnnnnnnnnnnnnnnnnnnnnnnnnnnnnnnnnnnnnnnnnnnnnnnnnnnnnnnnnnnnnnnnnnnnnnnnnnnnnnnnnnnnnnnnnnnnnnnnnnnnnnnnnnnnnnnnnnnnnnnnnnnnnnnnnnnnnnnnnnnnnnnnnnnnnnnnnnnnnnnnnnnnnnnnnnnnnnnnnnnnnnnnnnnnnnnnnnnnnnnnnnnnnnnnnnnnnnnnnnnnnnnnnnnnnnnnnnnnnnnnnnnnnnnnnnnnnnnnnnnnnnnnnnnngttgcagtgagctgagatcataccagcctgggtgacagagtgagaccctgtctcaaaaaacaacaaaaaaaactttacatttcatcaagtgtttttcaaaatggtcatatcaatttctacttcccactggcagacagttctaacatttgaaggttttaggggaagaagagtcaataaaagaaataaactagaaagtaatggtacgagagaaactaacagaggagagaatttctagaaggaaacaacagcagtagtaaatgctgtagatcaggggtcccaacccccaggcccctgaccggtacggtggtctgttaggaaccgggctgggctgcacatcaggaggtgagcagcgggccagcaagcattacagcctgagctccacctcctgacagatgagcagcattagattttcagaggagtgcaaaccctattgcgaactgtgcgtgtgcacactccttatgagtgcacactccttatgagactctaatgcctgatgatctgaggtggaacagtttcaccctgaaaccacccccctgggtccatggaaaaatggtcttccacagaacctgtccctggtgcacaaaaggttggggaccactgctgtagagagatcacagaagcaaagaatggaggagaccattgagtttggtgatgggaagccttggtagaatggtagggagttagccaggttgcattgagctgaggagtagatgaggtggatatggactatttgatagaagggctgcagaactggtggaaaatattgtgttgtttgtttttaaaggtgaagagtcttaggcatgtctgtgggaattggagttgatcattgatggaacaagatgcttgaggaagtgagagaggatgggttccagagctctggggctccctctttttcaggctcaggaaaaaaggtggtcaggattagggtggatgtaggtaaagtggcaggaagtcagagttgtttctgtctattggattttattttgctttgtgaaatagaaggcaagatgttggctgagagtggggggaatggtagaaacatcgacttgaggtgagagtgaataggtttaccttctgatttgggagctgttgaaggacaagtacaaggatcaccagacaatgccaaaggtcctcctgatgttgaactccatggatttatagagtttccaattggtcaacctgagtttttgttgttgttgttgttgttgtttttcatagtacttggcagcctaggtgcaggggagaaatgaagtaaacagttggtcatctgaaaaaaaaaagttttcataagtattcttaactaaaatttaaagtaggtacagggaggtttattctctcataaatgagaaaaaagagacagagattgactcccatggtaagttggtgatcaagcccaatccaagccttgataagactccattcccctcaaattcactaatgcttgtagttaaattttagaaaacttggtatgtccttatatggtgtatctcaaacaaacaaaaaacagggtacataagagtgagttagggagaagaaagaaaatcagacagcattactctactgtgttattcctgtgcaaaattacttcatattacaaagtggagcagtgtttaatcagaggaattatagagaaacaatgaaagagaggtaaatagagcacttacaaaagtcacttagtttttatactgctcagacattttttcctgaagaatacttttaaaaaattaatatcaaatacaattttatttcaaaataaagtggctgcattctttgataggattgttgtacccatggtgaaagagtagtgcagtagttcaggtctgagtgtgtgatgtgttggaggatgggcaattgtccatttaagtatcagtggataattgttatttttaaaacttcacatagtttgattctctctcaaaatattgtaaagaaataactcctttatgaaacttaccatcattgttttctcttacatggtcttgagtgacatcagttttaaaggatgtaaagagccatctcaagaacagtagctattaaactggtttgaaagttgcttgacaataatggaaaaaaaaagttatttcccaaaggattgcagtaagactgatgatttttatgccagtggaaggccagtttttaccacaaaaatttccctgtaacctttcatgattgaaaacatattacttgctattcaaaaacacaggcaaattagtgaggagagtttctaaaagaagctcaagggttagacatgtaatttgtggattacatgtcatgatagtgaagtgtatttccttccgtgttttgttttaaactgtagaagggacacaaaagtccacaatttgggcttcaaacttatttttacagctgtaagatgaaaacacttaattttttttttattatactttaagttttagggtacatgtgcacattgtgcaggttagttacatatgtatacatgtgccatgctggcgtgctgcacccactaactcgtcatctagcattaggtatatctcccaatgctatccctcccctctccccccaccccacaacagtccccagagtgtgatattccccttcctgtgtccatgtgatctcattgttcaattcccacctatgtgagaatatgtggtgtttggttttttgttcttgcgatagtttactgagaatgatgatttccagtttcatccatgtccctacaaaggacatgaactcatccttttttatggctgcatagtattccatggtgtatatgtgccacattttcttaatccagtctatcattgttggacatttgggttggttccaagtctttgctattgtgaataatgctgcaataaacatacgtgtgcatgtgtctttatagcagcatgatttatagtcctttgggtatatacccagtaatgggatggctgggtcaaatggtatttctagttctagatccctgaggaatggccacactgacttccataatggttgaactagtttatagtcccaccaacagtgtaaaagtgttcctatttctccacatcctctccagcacctgttgtttcctgactttttaatgattgccattctaactggtgtgagatgatatctcatagtggttttgatttgcatttctctgatggccagtgatgatgagcattttttcatggaaaacacttaatttttaagggattttgtgttccagttttacatgtcttactacatgtttatttctaacaatttatttcttcttatacttaataatatatgtttatgtaactttgcacaggtacgtaagaatgttagggaacttggcagtgtctatgaaatggtcatctaggagcccctttattacaatgtggcttattctcttaaagcatgtactttaaggaacaaatatgagacatgggactactgcactgaatgagcccagctacctactatggcaagaagggtgtgggacgggggactgtggttaggtagcaacggcaccagtaattcaagctggaagtcatcagggactgataccccacagaaacaagagtatttccactttaaggagtgaatccgttttaaatccagtgtaagcaacagagagctaaggacagagtatggcaactcctcaagcccactaatggcctctgtaacatacaaaacatttagtcttcttgatcattctgagacttgactaccacagaactacttgttttcataaggaaatgtaaagaattaatgttttggtaatgttttactttgacatgatttaaaatttcagaaaagttacaggaactcccatgtacttttcacccagattcatcaattgtttgacatttgccttatcactcacttaccaatatttgagagtaagttgcagacatcctgcccctttcccctaattcttcgatgtgaatttcctaagaacaaggagggtctcctacataaccacagcatagttatgaaaagcaggaaattttacatggggtagataataatcttgtaccaaagtccatatttagattttacaattgccctaatcatatgttttatagcatttttcctggtccaggagtcatatcttaaatctcatttaatctgaaataaattaactaactagaacggagagaggcccatttttcatagtacacactgcacactttcattcatgtgtattcatttcagcatcttctctgaaacagaatgacagaagcttgtacatagcaggtaccctgtaggaaatatttgtactttatggcttctcagttagtgcctttttcagcagtgaattaatttttgtataaacaatctttggttcttattctactgtataggtactgttgtgtgctgaggacaatattaagctttctttggtttgagccatgtttttaacatgtattaataataactattctggctaggcatggtggctcatgactgtaatctcagcattttgggaggctgaggcaggtggattgcttgagcccaggagttggagatcagcctgggcaacatggcaaaaccctgtctctactaaaaatacaaaaattagccaggcgtgatggggcatgcctgtaatcccaactacttgggaggctgaggcacaagaattgcttgaaccccagaggtggagattgcaatgagctgagattgtgccactgcactccagcctagtgacagagtgagactcagtctcaaaataatagtaataactattctatcccattgggacatttttgtgagtccctgatgagacagttccaaagttccaagatatgtcctgcagtttgtctttagctgagaaaaaaatggcaagtggccactgtctttctgcttagggccagtgatttagtttcttttctctgggctataattattctctgaagtatgtgaacaaagcagcatatatatgcttgtgattccaaaatcactcgtaactttcaccatgtttgttccattgaaaattgcatgatagtttttggtactgatgttccattctataaaagtttggcatcgttgacattctgtatctaactcattcatgccatgtatgaagaattcccaaattaggatttttcttaaaagactcatgggctacatggaattaaattactaaattcaggtatagtttttaaatggttgttttgtttaatgttatgattctgtaaattctataaagaggagaattgtgctatcatctaatctccctattctgtcttatttacttatttgtttgtttgtttgaaacagggtctcgttctgttccccaggctggagttcagtggtgtgatcatagcttactgcagcctcaatctcctgggctcaagcattcctcttacctcagcctcccgagtagcttgaacttcaggcacagaccactacacctggctaatttttaaattttttgtttaaaaaaatttagctgggcagctatgttgcccaggctggtctcaaagtcctggcctcaagcagtcttcctgcctcggcttcccaaagtgctgggattacaggcatcagttatcactcctgtgcctgacctgtcttgattgtttaaatttttataaatgtttgtctacaaaaggagtaatgttctccacaaagtctacttagataatgtgcttgttaatgtttgtattatcagtctgcttccctttttatttaattattactgtaatttacttttgcaagaatgtatttctatttcagattgtagatttcaaaacacaaagcacaaaattagatttttttaacctcagaatgtacctagatactcacctgtacacatattaataaagctaatagaaatactacacatattagtaaaacagagtgatgtgcttggctcatattgtggactctgttatgctgatgagctataactattaatagtcctgtgtgtgatcacatgatacacatacactttttggttaatgcctgagataatgttgaagtaggtattctgctgtttggcctttcagaggttaagaccaaagcctcaaaaggtgttactcttatcagctaactttttgtcttgtgtgacgaagcccaaattgcattgcaggcctgttcctgaactctgtgggacaaagcccatgttgggtaggggtagataccaaaataaaatcttagtcctattaaaaggaagaagagagggaataggtgctaagtaggcaaccctcagagttcactctatcacccttcaggctttcgttgtaccttctcccactactcaccactctctggctaccctagccatctttgtattatgaattcagcagttttttttttttcctctacagtatttcagaagctcgtaccattcagagtaagatgctcaaataatattttcctttactttaagtgggcaaagcaagggtgtagaaagccaccacaggagtggaaaatgtccttggagtgggaatcacatcagttctgtgatgatggaaatattctgtaccgtactatccaaagcagtagccacgagccacctgtggcaattgggcccttaaaatgtggccagtgcaactgaggaactgcatttttatttccctttaatttaagtttaatagccacatgtggctcgtggctactgtattgaactatgcaggacaacgctgtcactccccaagtcaagaacctggatacatccctctacctcttctaactgagactgtttatcttataagggggaattatacttccctgccatcttcatagacttgagaaccaaatatgattgtagttgtaaaacctctttggaaatcatcagttgaaaatataaaatgacattatcaatattatggcattctatctttttttcgtagcaaagctgaaaccaaccactttttgttgataatctcagtcctattacttctcctgttctactgctgattctttaggcaggggtaaacctagaggctattgagtgaatagggagaggaagcataattaaagtcagtattgttgaacctttttagttattaaaaaggtttactagtgaaaattgaagacgaagtttttaagtgaaaacttcatttataaaaatagtatgtggtcttaatttttttaaaaagggagtcaaaatagaaagttacaaagaggaaagcaaaaatcacacaaaaatctcaccacccagaatagccatcgacaatgttttggtgtagccttccagattttttttttttcctttggtatgtgtgtaactttttagaaacgtgaatatgttgccttaagctgcatttttttcatttaaaaggtgtactgttgacattttacgtgtcaatagatatacatctactttaaaatatctatacatttctaattatgaatataatacaaagttatacaaaattcctaactcaagtgtttcataaacacaagatttataaagagaaagtctcccagaagtcataccccatttgacattattatatggtacatgcacatcagtattactttaaaatttatttttataaaactatattacattatacattgtttttttagagatagggtcttgccctgtcatccaggctggagtgcagtggcgtgatcatagctcactgcagcctcaagttcctgggctcaaccaatcctcctgccttagtaactctgtagtaactgggacaacaggcatgtgccaccatgcccagctaatttttagaagatgttttacagagacatagtcttgctatgttccccaggctggtctgaactcctgacctcaagtgatcctcctgtctcagcctctcaaagtgctaggattacagttatgagccacgtattatatatatacatattatatatagtatatatacacatatatacatattatatatagtatatatacacatatatactatatataatatatatacacatataatatatacatatacatattatataatatatacatatgcatattataatatatacatatgatatatatatcatatatgatatatacatattatatattatatatacacatacatgatatatacatattaagaacagcctaatactgttcttaaacttgcttttgtcacttatcagtatatgttttatacatgtatttatatgttacttgttgtgttacatataatagaatatttaataaatttactggtgagctgatactagttttttgttaataaggttatcattatgctgataaatatccttgtgtgtgtatgtatgtgtatatatatgtgtgtgtgtgtatatgtgtatatataaaatatatttatcttttttcttaatatagattcctagaagtaaaataagaagtcaagaagtcaaatgtatgcaaattaaccatttttatatttattgctagatggccatatagaaaagtggtgttatttcaacagagaataagagttctccagaatgggtattgccatattcatttggagaggaaaaaagctttaccattgttaatagattttcttcatgttaattctagactggaatgtggctgaatgagtttgtgtatatgtcctttcgaaattacagatcttacaccttgtctgtaggatcttgatgaaatccactgcctttccttccattcggtttcagctggatctgtaaaccattcttgcctcctttatttccatctcttctattctccttaagataggggaaaataaagcttggtgactttggattttcttagcatgccagatagaatacatgatgatttagtgactaataaacataaggctagtagtcagtattatgctttccatttgattcatttgacattccattactaatttggcaggttattgtgcagctttgaatacattttgtataagcacacttctctattttttccttagtcgtcggagtttgttctttatggatactcagtgtggtatgtaagctttagaataaaaagatggttgtctgcatgtttggctggctgtgtactttaagtcaatagtctttcttaggctccagctacactcacacatattttggcttaaaacttgaatttaagaggaattcctgtccttaaagagaaatagacgtagactgggcatggtggctcatgcctgtaatcccagcactttgggaggccgaggcgggcggatcacttgaggtcaggagttcgagaccagcctgaccaatatgatgaaaccctgtctctactaaaaatacaaaaattagccggcccatggtggcgggtgcctgtagtcccagctacttgggaggctgagacaggagaattgcttgaacccaggaggcagaggttgcagtgagctgagatcgtgccactgcactccagcctgggctacagagcgagactccatctcaaaaaaaaaaaaaaaaaaaagaaagaaatagaaataaaacaaatgacagtataactgtgttgagtacgaaaaacttgtgtattgaaagaaatagtgatttgggttaggtagaatcttagagactttcctagaagaaattggatacttacctggatgttgaagttggtgagattttgaagtctgagcgcatagaatgtggaagcacattctgaatgagagtgaggagaaggtatgtaagacaccttgagtgaaagttcgagtgccagcaacatcttggaaatggcacacagctttgtctggttggggtagatcacctttgctgagaaagaatgcaggcattttataggaacagatgaggagtgggggagagaaagagaaagagagcgaaagagagccccttaaagtgtataaagtatctacatataaagactttgaggaataactgcatatttctaatcaagaaaaatatcagaaaccccattaatccagtgtgcagccaactcctaagagtcctaagtgacccctgtccacctgggcactgctgggattaactgtctcggaaaccttgcagtaacttacgcttcacatcccctgtgttcttggttatctcccagaatgccattctattttattgttctcatactgcttcttcttccttcagacccacaactctcagtccaagctccattgtatccctgtcttcccagtcttaaactgccttgttccgctgaccttcagggaccgtcacctggcaaaaccccagtcctggaactatcaaatggctcatcttaatttgtccctacagatccaatattggggctgccgagacttgctggagaaaatactactactgcacagatgggtacaaataagtgtataattgctaatctcactcagatcttcaaatttatggacgttacttctgtgcttccctagactgctctctctctctcttattttgtgtaatgtctctttcttagccttttcactaatcttttattactagcctactccctgtctcctgcatcaccttcctgcttcccagagaaataccctgcagacctgaactcccacttcctctggcacatctaaagaccgcatctttatccattctttcttccttccttcctgttgcaataggagatgggggcttatcctcctctattaggctaattctgcctaccctatcgtgagtcctgtcttttttcaccctcacagggacattgatctctgaaattatctttttactcttttgaatcttcatccttgtcctgtctcccagatgcttcccttcagcatccaaactttgtagtagacacctattattttatctgaatagtgcccttttctccaatccagccagatggtaactctgggagctacaatttaaatgcagatgcttcttgacttgcaaaggggttgtgtattttttttttttttgagacagggtctcactctgtcacccaaactggagtgcagtggcacaaccatagctcactgcagtcttgacctccccaggctcaagtgattctctcacctcagcttcctgagtagctgggactacagcatgcaaccgtgcctggctaattttttctattttttgtaaaggtgggatttttgccatgttacccaggctggtcttgaactcctgggctcaagtcatctgtctgcctaggtctcccaaagctctggaattataggtgtgaaccactgtgcctggcctacaatggggttacagcctgataaacccatcataagttgaaactattgtaagtcaaaaaggtatttaatacacttaacctaccaaacatcgtagctcagcctagcctaccttgaacatgtttagaacatttgcattagcctacagttggtcaaaatcatctaacataaagcctattttatactgaagtgttaaatatctcctgtaatttatcgaataccattctgaaaatgaaaaacagaatggttttatgggtacttgaagtatggtctttactgaatgtgtatcacttttgcaccattatgaagtcaaaaaaatcaaaccatcataagttagggatcatctgcacaagacattcctgccttttggtcactgttgatttgtccaaggatgggcatctgactcaagctggaccaaccacagttcttccccaggactttatatttgaaatgaaatcatctttctctctgttttggtggctgaaattcagaatgtgtatgttttggaattgttgggagtcaagttctgagggttgaagagtagaaaagagtagagaagaatgaggggaaagaaagacgagagagtaagagagggagagaataagaatgaattatagccaaaaggcaaaaacatttccttagttctttacaagcagtgattcctaaccttttttatgtcatgacacacatagcaaatggtaatataaatactgcccattgaaggagatggacaaggctgtgcttatggctggcggacacacctgtaatctgaacccaggtaaaaagctgtactctgcagtgttctgagaggtcatacttgtaaatcactcccacgttgagaaaagctctgttccagaatctggttctaattatcttggtcctaacccttgggtcgtatgagatacccttgcaaccttcctttagatgccatttcctccaggctgcttcctgaactccccagatcctctccagtgtgcgccagtaacaccctgggctttttgttgtaattatctaattatttatctgtataatctgttgtatatgaaccccaggaggataagaactacatctctcttttcatctttatagccctagtgcctccagtggggtaaacatctcctgaatgaaggaattatgctctgcccacataaaaagatggaacaagaaaattgtaattgaaacaagatcttttgtgtaaatattctttctttctaaaaggagacggctttgaatggcagccctggaaaggaaagtgaatgagaactatgtctttttggcattatgtgtctggtagttttgtcagaccgtcagatcttcaatttcttaaattttgccttgtattaaatatctcactattcacgttgcaaaataagactcaacccattttcagaataacaaatcccctgtggaaaaaatgcattaaaaatcctgagagtaaatacaggcctaaaaatatgagcagtatctctgttttgtccactcacagaattatgtgtcctgtcttgtttgtactgaagaggttgaggaggattaatctcttcctatagggtgagcttccttccccatgcttcccttcatcctctgcctttctctggaattgccccttaccttcaacttgctgtccatattccagctcacagtgtttccaggttcacagccttactgcactatggtatgagagaatccaaactcaaactgattaaagccacacgcaattactcctaacttagtctggcccaatttaaaagcacttaaattctctggcaggtcttttccactcctttggttcttaggccctgccactataggttacaattattttgataaggctccagcttgctttgaattcaggttgaagttttttctttattcacttcttggctcttggaaaaataaggttctttcttccttgggaccaaggtatacctctgtttaacactgaattaacaaattgtccatatagttctctccaacagcttagtctaccttcttggcttagacttagtcctttttgcttttgctttcctttagttcttgacatttcctgtactttgagacaaactattaaggtgttcctactctgcttgtttttcttgttttttgttttgctaacaacttatgttattcttgcaaaaatatatgatggaaggaaacatggctgaatagcaattgtttaaaaaccttatggaaaattatatgtaatcaagttgtaatttttcatatattaagcatttagtgtacttccaaataaaatcacaattggattggagttgggtgtataggagggaaattgactaaacaatttcaaagtttatgtggaaactaaatatgtgaaagtagcatagaaaagtttgaagaagagtattgagtcagttgttaatattcctcatagtcccttaagtgggctccttgactgtactcctgacttcctctagtaaattatttttattttcttatagataaagtgatctttctaaaatgcctatctgaacactttgcccccgatgaagcccttcggtggcttactttgctctcaagataaagtgcaaactcattttttagatctttaatatcctgtgtgatctcgcccttaatacttctccagcctgagctcttgcctgtacttttcccgtctgtctgtttacttgtctccatcttctcactagccttcaagcaccataaaaatagtgactatctagtcactatgtctcgttccctgttttatccctacaatctaacgtgatgcaggtgcttagtaaatattggtcaaatgaaataattataaggctaagaccaaatcgatggaactgaaaagacagtccagaagcagactatttcgtgtctaaaaatttaataaatgataaggtatgcatcataaatctgaagaggaaaagaatatttgataaatggtattgccagagctggttattaatttggaaaaagataagagttagagatgagaccagtatgttaatagtacccccaaaaaggttgctaaggcattaaagagttaatttttttaattttaagaatatagtttgacatgaatatttatagggaaatacttagatttatggggaatattgtagggaaaaaatatttctaagcttgggtgtgatcaccgatccaactacataaaaatttgaaaagcacaaagaacattacatcttgggaaatgattgcagtaaatataaaaataaaaatgttgtaaagtattatatgaaaagaaaagcacaataccttagtgaatgagaagaactctaaaaagcacttgataaatgcatacacaaaatgaagaccgtttatgaaaatgagaatataaatgactaaacaaaagtaatttcgattttactagtaatcactgagttaaacattaaaacaatgaaatacaaattttttgtcctatcagactgataaaaaataggggaaaagccagagttggtgaggacatggtgagttggtattatgatgcattattgggcaccagtatcaactgatagaatttttctgaaccagtttggctctgtctgcatcaataccaaatggttgtgtacattaattcagtaattcaacttctgtgagtatggatgaaggaaagattttagatacaaataaagctttaaattttggttatcagtgtttaattaaagcaaaaattagaaatagtctatttgtgcccacctagggatgcaaaaagaaagaaagaaaataatctaaatgtccagcagtaagagaatcattaaacggtggttagatctaattgagtaatgcatagccattaacaatgaacatgagccacagtctgggaaaagatttttattatatattatggtcctatataatataagatttgacaaagcactcatagctagaacatttaaagaactaccaaaagaaaaaaaaaaaagacaaacagcccagttaaaaaaaaaaaaaagaaaaggcaggcactttgaaaagaagataaccaaatgatcaataaacatttaaaaagtccacaacatcattgcacatcaagaaaatgggagctaaaactacaatgagataatattacacactcatcagaatggctaaaattttaaaaactgacaaaaatcaaatattggtgaggattcagaatgaaccatttaaaaaaaaggaaaaaaatattggtgaggatatgaagcaactggaactcttacacattgctgggaaacatgtaaattacttcagccactttggaaaactggcagtatctcctcaggctaactctatacctatcctatgacctagcgatttaactcctaggtatatactcaggagaagaattcatgtctaccaagagacttttaaaagtgtaaaaagagtagcttcattcaaactaaaccaaaactgaaaataatccaaatgttcataaacaggagaatggcttaaccgtggtataatctaatgtaataattaatataattatatgatgtcattatgtaactataatagttaatgtaattaaattgtggtatattcctatatagaatactgtatggtgataatgaaataacaaattagtgacacacacaacaacatgaatgattctcactaacactatgttgaacaaaggaagatagaccaaaagagtacatactaaatgattccactgatttgatggaagagtaggcaaattgattagtgactgatcgtcatagaaggcagaatagtggttacccctgggtgggagaattaactgggaatgagcagaagagaaccctctggtgtgatggaaatattctatgtattgatctctaagggggttaggactatccatgtgtccaaattcagcaaactatgccctatatgtgctctttaacattccttactgataaactgagggaaaaataacacatggccttgagcaagtcacttaattttcctaagcttcagtatgctcttctctaaatcacaaatacacttgcaggattgttgttagaatagcatatggttaataggtaaaaatggcagttactgtcaactagaaatacttaaaaatattatatgttgcaatatgtataaattgtgaatatatcatatggttggaggagtgtaaaacacaaccccctttgcattaaaatactaatttaccaaaatatatgcagtggtttagatgtctttggttaatgagatttgtttttcttcctatttttagcttacaaaaatatgaatgagcattatactcataatgaaagcaaacaaatcttatttaaaacatttaaaagtaattttcagtccatagtgagcgcagtatgaaccaacagttagtgtaaacccccaaatcttaattctcttttaggttagattacttgaagagttgtgactacaacaaaggaattaatattcacttggttttaggtgccaccgttctaaagggatataaataatctaggatgaattcagaagaagcatgaccaggtgttaaagagatgtgagcttgtgatatgtgacaaaagctgaaagacctactcatgcttgtctgggagaagaaagacccagaaggacttgatgtctgctttcaaatcagaaggcatccatgtgaacaagagtaggttatgttctctgtgatctcaagcagaaccagtaacagtaggtagaacctatgccagggaatccatttcagggccgtgtaagaaagctctttgtgacaatgctattcattcatttattcaagttatttattgagtgcatttctgttgtaggccctctactaagcatagagtatccgaaaataactaagtcatggtcctttcagtagtgaccaaggaagctatgcaaatgataacagatcatgtttttcagtgctgtgacagaagtataacaaatgttataggagcttagaggagggaaatgtgctgttgtgcagggaataggagagagcttcacagaaggggtaacattttagttgagtattgaataatggattaatgggtatttgccaagcagccaggcagggtatggtatctggcaaaacaaacaaacacaaaaccaaaaaaaaaaaaaccccaaaagaaagcaaaaccaaaaaccagagctgtgtttgtacttgtcaaggtatgtttgggaccagactgtgcaggaccttgtatatatccttttgtaggcaatgggaagcggttgaagaaatgtggttttttgtttgtttgtttttgtttttgaagcagagtcttactctgtcaccaggctggaatgcagtggcgcgatctgggctcactgcaacctccgccttccgggttcagcggattctcctgccccagtctcccgagtagctgggactacaggggcgcaccaccatgcctggctaatttttgtatttttagtaaagacagagtttcaccatgttggccacgatggtcttgatctcttgaccttgtgatctgcccgcctcggccttccgaagtgctgggattaaaggtgggagctaccgtgcctggccaaaaaatgtttaagaaaaggaacagtgtttgttttggggcaggtaactccagctaaggttgtaagacagattggagtaggagagcctgtggtgagatcctagtttggagaatgctgcagttctcaagtggcagatgatgtaggatgaggaattgaatgatagtggagttggagagttggactgcatttggaacgttcctcaggtagactcaagaggtcttgatgacaaattgggtaattgttttggaaggtgagggagaagaaagaattgaggataattcacatgttgttagcttggagaactgggggccaggtgaccttggccttacccacaggcactgtttggttctggttatggggcaggggagtggacaccttcactttgactgcaagctccatgaggacaggtatcatatgtacttgttcatttctgtttttccagtgactggaataatgaatgaatgagcaatttgttatccctcccaaagtgttctactaatttgatgacaattctgggacttctgtctgttgtacttaattaatattgatcaggctaaacatattatcaggtattattacatttcggagaagttcatttattcagcaaacatctgttgggcgcctacaatatgctgagcaccatccttgtcttgacaggtaaaatagtaagcaaaaaagacaaaaatgcaagccttcatggagttttaattctagtggggggagacagactaaaaataatgataaagaagcaaagtatatagtgcattagttggtgataaatgctgtggagaaaaagcacaatgtggagagagggagtgttcggaggtgtagtagggggtcttatctagaatggccagggaaggcctcactgagaaggtggcatttgaagaaagaattgaaggaaggtgaaccacgcagacagctgggaggagagacttccaggcagagggaacagcagatgcagagacctgttgatgggagcttgcctagtgtgttcagaggagcaaggaggtggccagtaaggctggagtgaagcgtgtgtgaagaggagagcagaaggagatccggtcagagctgtgggtggatcagggtcaggaaggccagtaaggccaggaaggctgatagaaagacttgacatttttcctggggtgccattggagctggggtgccattggagagtttgagcagaggaatggcatgatgtgacttacatgttaacggaattactccggctgctgttttaagaataaattgaaggggaaccatttggctaagaagctatacaataattcaggtgggagaggtgatagtgacttggacctgggtgatcgcagcagaggtggtgagaagtagtcagactctagatatgctttgaagagagatggattgtgtttatactttgaagatagatggattctcgatatactttgaagacgggtggcttctgtatgtactttgaagataaacagattctagatatactttgaagataaatggattctggacatactttactgacagatgagacatggggtatagcgagcaggaggagcaggtgtgggacactatcaggggctcagtgttaacatgctacgtttgaagtggccactagacatccaagtagaaatgctaagtaggcaagtggatgtacagttctgagatttgggttagaagtccaagctggaaatataaattaattctgagggaacttgttactgtgagcatagtttatgatttgagcacccgagactcgggggagtaccatatacaacactactttaaaataatgtaaacgtcccttgggagaaatttcagattgttttgtaggcataaaaacattttatagatcagataaattaagctgccaacttgtaccaaagttaaaagttcttagttctttgtattttaaagaacagtagattcttaaatcatatataacttctattctttacatttacttttcgtttaaaaataaagcatgcctttttctcacgtcaataaaattggtgaaattcgccattttaatgcagctgcttttactcagaacacctaattttttcttagcttgctcttctcattcatgtgtattcacagactgcaagttaattttaacaaatgcaaaatacataattaggagccgggcccagtggctcacacctgtaatcccagcactttgggaggccgaggcgggcagatcgcaaggtcaggagatcgagaccatcctggctaacacggtgaaactccgtgtctactaaaaatacaaaaattagctgggcgtggtggcgggcgcctgtagtcccagctactcgggaggctgaggcaggagaaaggcatgaaccaggaggtggagcttgcagtgagccaagattgtgccactgcacttcagcctgggtgacagagcgtgactccatgtcaaaaaaaatacaaaaaaaaaaaaaagaagaaagaaaaaaattagtcaggtgtggtggtgcgtgcctgtagttccagcagtggagtcaagggagctgaggtgggagagttacctgagcccagggaggctgaggctgcagtgagccatgattgtaccattgcctgggcagcagagcaagaccctgtctcaaaaaaaaaaagaaagaaagaaaaaagaaaacccccatattatacatgacaatgtatcgcttcgtggccttttggctaagatctagtgtatacatgacactgcagaatcctagtgagatgatgaccaaaattacacagctgagctgagatgaggacccaggtgtgttggactccaaggttagtttcccctgcattgcctcacctagaaaagttaggagatggtaaaagatgccttgcccttatgtgtaatgacaacagcatccctggttacctgatcaggccattcaaattccaggaaatgaaagcagcatatcactgagaacttacctaaatatttgtttaagaataatatgtaaacctaagtacaaacaccccagcatttaagtatgtagaaaagtaatcttattctctggggcacaaattgagttattaaatgcagtacattgttttaacagcacacaattctggttattactttgtattgcatcaataattaattacattgctgtttaccttgtttatttagatttgagcatatgttactttgtaagtgatcctaagccatcattctaaaaacaaattagtggaagccctatgctcacattcctctttaaacagatattttagttggattactaagtatctcattatctgaaagcacttaatgctccatcagcttggggtttcctaagcaatgttcacaaattagtgagaacaaaagtgaaataaattcatctgtgaggacttacctgagtgctattagtaatgggtacttttcataggtttcttgcagtaaaaactcagcgtgatctaagacagcaaaaaataacaaaaagctgtttctttctcctccaagcgaatatcatgtgcttcaaaaaatgttattctctttctcggcagaattttggaagccttttctgattagattagcactctattaaattgctgcttagtattgtgttgacttctactttcttaagtctgacaatattctcttgatcacaagtcagtaatatatttatgaaaacttaatctatacctgctttttgcactcatgtcagtatttttttttattcgagacggagtcttgcactgtcccccaggctggagtgcagtggcatgatctcagcttgctgcaacctccgcctcctgggttcaagcgattctcctgcctcagcctcccaagtagctgggactgtaggtgcgtgccaccacgctcagctaattttttgtatttttagtagagacgggtttcaccgttacacaggttggtctccatctcctgacttcgtgatctgcccgcctcgatctcccaaagtgctgggattacaggcatgagccaccgcccatatcggtattttttaaaaacgctttttgtgtagaaaaatcagaaaatgagtattaggaaaaatttaaaaacccaattattccatgtagtgataaccatgcttaatattttgtgtttatctgcccagagttttttctgcttatataggttagataaatgcctatatgattttaaagaataaaaatgggttcataccactgagcagtacaacactgtatcctttcatttactgtgtttttaacatcttatttcactagataatgtctctgccacattcatttttattagcttcatgttctgctgtatttcacagccttctttctgtctaccctgcttgcagtcatcccactttaatctaggacagtagctcctgggggtactatgctgttatacatttttagtattttcttatattcaatgataattgtgtgataaatgctatttaaagcatcgtggctggtctgaaggtagtgagttatctcagttgattgttcagtcacttgcagatcaaactccttattctactctttacccccttctcactactgcacttgactattcgaaaatgagcatcccacatattttcatcagatggagaattttgtgctaatgctgagtatcttgatttaaatgttatcactttctcggtttacctcagttatccagagcacagataaagagaataaagtaaaatttatttaatggaaactaaaatatatattgtaatcagttaactttattcataagaagactgtctcatgccttttctgggagctctttttctctctagctttagacaggactctagggctaagcttcagttacctggaaaatttgatgatatgtgaattaaattattcatagaagagatgtctgtttatttgattagcggtgagtgggttggagagaccgatttatgataggtctcatgctagggacttttcatttctgcttcacaaaaatcccacaaggcatgtactctagtttctgtatctctctcatttccttgttagtttaaaaaacaacatgaagccgggcttggtggctcacacctgtaatcccagcactttgggaggccgaggtgggcagatacttgatgccaggagtttgagatcagcctggccaacatggcaaaaccctgtctctactgaaatataaaaaaattagctgcgcttggtggcacacttctgtagtcccagctacttgggaggctgaggcatgagaatagcttgaacccaggaggtgcaggttgcagcgagctgagattgcgccactgtgctccagcctgggtgacagagcaagactctgtctccaaaaacaaaacagaaaagaacagcatgagactcaagttcctacccctagaaagtaattgaactagggtacaacctcaggtctggctgcaaagccagaggtatgtgtataaattcaaagtgcataaaataacttttagccaaatcattttatccaccacttgaaaatgactttgtctgatgttctgataaatatctgtcccaaaaggtggggaggtaaatgaaagcaccctgagaagaccttactcaaaaatgcccttaatctaagtatctagttcccctgttctaatactttcttagctcctccctgttagatgactctctttttgctactatttcaagatttcatcttaaaagcaaatgttttgtagtttactttggcacacaccatagcatattttctttctagcatttccatttttgttcctaacttattttctcctgtctgtgtggaattgaggcagtgtagctcagtgattaagtcctgagcattggagtcagacccaaggtctgccttctgactgtcacttactaatagtgtggctttaagcaggtttacccgacttgtatgtgtgtgcctccgtttccatagcaggaatatagtatagtagtatggcaccaacagaactgatagaacagaatacaacaccatagagtggctctgaagtttaaatgagaaaaatgcatatctagcaccaccttgcctcttagcacgaagcaggcattcaaaataggttagcttttctaccccttttacctctttaaataatatgaaataattgattttgcccactggcttacatagcattttccctccctccctctctgcatgtagtagcttagagagaacatttggaacctggcatacttggccagagcctgctcattctctgcttgactcattcacgtacacacctgtttcctgtcttctttcttttttttttttttttttttttttgagacggagtctcgctctgtcgtccaggctggagttcagtggtgcgatctctgctcactgcaagctccgcctccctggttcacgccattctcctgcctcagcctcccgagtagctgggattacaggcacctgccactatgcccggctaattttttgtatttttagtagagacggggtttcaccgtgttagccaggatgatctcgatctcctgacctggtgatccgcccgactcggcctcccaaagtgctgggattacaggcgtgagccactgcgcccggcctcctgtcttctttctgatagcacgggagaaaacaaacagaatccaatttacttacacagaacaatgacctcttacccaggacctttctggaaaataatgcctgccattagtatccctggcttccacgtcagcttctttcactcatccttaacttgaagtgtttttcattgtgctttcagcctctcccatgctcagggttttggtctttgtccaatatttagcggtttgtgatcatgtgcttttgccattggtgtggttctgacttggtaagagttatttcttaatgctttgtaatgttatccctatttctttagtgaaaactgcagtttataagtaatgataagcatcatattttacttgtaaatcagatttctgaaaatatttttctgcttaagtgagagctggattttttttcaaggttactttttcctcattgctttggcataaaagacaattccttgtgtacatagtcactgaccatctgttttgtgggctgtagattctagagtttgcctttaaacttaatgatgtctttttttctactctttcctttttggggggtgttcatgtcagttgaatcgattggaggttttaaaaatagagaaataaatacaaacattttttacaaaatgcttattaatttttttattgtagtaaaatatatgtaacataaaattaccattttagccacttttaagtgtacagttcagtatttctgtagcattaagtacattcacattgttgttcagctgtcaccactacccatttccagaactttgtcatcatctcaaactgaaactctacccattggaccataactcccattcctccctcttcacaaccctggtaaccaccattatgctttctgcctctatgaattttttcattccaggtacttcatataaatggaatcatacaatatttgtccttttgtgactgacttagtcacaacttattatatgacttattataatgttctcaaggtttatccatgttatagcatgtgtcagaatgtctttccttgttaatcctgaataatattccattgtgtgttcataccacattttgtttctccgttcatccatcgatggacatctggggtgtttccactttttggctattatgaataatgctgccatgaacattagtgtgcaaataaatttcaggcctctactttcaattcttttgggtgcatacccaggaatggaatgctagatcatatggtaaatctatttttaatattttgaggaactaccatactgtctttcacatttggtggcaccatttttcctaacatacattcccatgttttatattttacattcccatgtttcctaatatactgatatagcattttttaaaagtttaaaatatatatatgtatatgttttcaactatgattgtatcagaatttagctggaaattatgaaacagtatgataaatgcattaccaaatattgcacttctgaaatattttctcaagatatttttatgtccattaaattagtttgctattagtactagtttgtcttctattcagatagaaattttctcctatcacaagagtgtggaagatccagtgtccacggtcttctatatcagggcaggatttttggtgtgtggtgtcacctgtataaattacattgtattcagttttattaaatgtcaagttttgttagatttcagattttagtaacatagaaattactgaagggatgcacatttttctacaaataaattttcaagccatgatttactcatttgcaactaaatatttaagctcctattctttttaaggtagtaagctggctactgtaagaaaagcatctctatgtattttttccacataggccttaaaaacattcattcattcatatcaacaaacttttgttgacttcctatatgccaggctctgctaaatgggtggggatggaggtgttgattgcaggtaggtgaacaggcaagtctttattagacttgtatggttaagttatgtgaaggtggaagtacagaatgctttgagagtaaatgagatggggcaaactaaccaatagttggagaggaagggagaatgtatcatcaagatctctaaaatacctcaaaattcttcaggaagtgtattctccctagaatagttaacccccagaataaagtagtaatacacttttttttttttttttttttaagatggagtttcactctatcacccgggctggaatgcagtggcaccatcatagctcactgcaagctcaaactcctgggctgaggcaatcctcctgcctcagcctcccagtaactgggactacaagcgtgtgccagagcacctggctaatttttatcttattttttaaatgtttggtagagatgagatcttgctatattgcctgggctggtcttgaactcctgggctcaagcagtcttcccgcctgggtcttccagagtgctgggattagaggcatgagctaccacacctggctatggtaaacatttttatagcattttaatatcatatatcacttgtgaaatgagtattctgttaaggaagcagcattcgacttctgtcatgcccatcaattaaaactatcaatagttttaaaactctgcgcatatgagcatgtgaccttgcttaaagaaaaattgggccgggtgcagtggtgcacacctgtaatcccagcaatttgagaggcgaaggtggatggatcgcctgagcccaagattttgagatcagcctgggcaacatggtgaaaccctgcctttacaaaaaaatacaaaaattagccaggcgtggtggcacatacctgtagtcccagctattcaggagactgaggtgggagaatcatttgatcctgggaagttaaggctgcagtgagctgtgatcacaccactgtactccagcctagacattggagcaaaacactgtgtcaaaaaaataaaataaaataagataaagaaaaaagaaaaagaaatgaaaaatcatcctgaaataataaataccctgtgtttataaagtaatgtattatggaaatttttgttgtagtagtacttaatttcagtttgaaaatgttgtacacccaaacaagctcaacgactatttctaatatcacattttcaaaaggccacagttgagataacaaagatatgctgctattctttaatattttcatcacttttaatttagcttacttttttatccttattttttcattactaaagaaaaacatgcaagtaacagtcaaacaatcagaagtaaatgaagtaaaacatgaaatttcctccctttcctctcctccacgaattctactccacaaaagtaaacattgcagtttagtgtgtctccttccaggacatgcaagcatttggacagccagctactataagaggagggagggaggaagagcgggagaaggcaagggagagaaattgtgcatacccatacatacattcaaattaaataataatgagagtatgccataataatgttctgtatatggtttgttttctatttactagaaatggaaagttagaccagagcaccagctccaaagaaagaggtcctgggtcaattctgagccatcacttactaagccgggggacctcagacagtaatgcagtcttcttcaatcctaattttgtcatctgtcaaataggggtaattatttgctccttaacagggttgtgaggattaaatgagatactatgtgtaaagtatttgggggacgtgcctggcacagaaccccaaactctggacaaacagtaagctgttagttttatgggtactataactaggatagctgacccattatgctatgctttgctgtgtgaaaggacaaatatctctttactgttctttattttgcaaaaattgaactttaaagccaacttttcgagttcctaaatgaaagtttattagtctattgagtgcagttgctttgaatttataagttaaattttgggagaattattaccaactttcagggttgttttgttccaaatgaatctcttgtgttcagcatataatttgattctactttgtgatcattctgagagtcttgcttttaatggttttatatgacaatttattgacatgacagatatgtttggtctcagttctgttttactttatgtaatttttctgcctttagtacttcttttttttttttttttttgagacggagtcttgctctatcgcccaggctggaatgcagtggcctgatctcggctcactgcaagctccacctcccgggttcacaccattctcatgcctcagcctcctgagtagccgggactacaggtgcccaccaccacgccccgctaattttttatatttttagtagagacagggtttcaccatgttagccaggatggtctcgatcccctgacctcttgatccacccgcctcagcctcccaaagtgctgggattacaggcatgagccaccgtacccagcctagtacttcttaaatagtttttgcatgatgttcagtgtttgtgttgcctggctttatgttttccttttgataatttgaacatctaaaattaggttttttcctagtagttacttttataactataactttacattccctctctccctttgatcactcaatttttaattacttatattactattatcagttttcctaggtgtatttcgccaaattggggatatatatgaccaacctgtgggcttaccaacaaccagtggcttgatttgcaaagtttaactcagttttaagcactatatgcatgttgtctagattgaaattcagacttagccacttgctagttgtgtaaccttaggcaagttacccaaagttcactatgcctcagtttccttctctgtaaaatattttatatatatatgtatataaaatgaatgctgcagaggttagtagttgggctgatcttgtagctgcgtagtgtcatcagtgccctgaccctgggtgctcactcagtctatccttggcttgtgacttttgtgctcatgcttgtcttgtggtcatatgatagttactccacctccaacctctcatcagcattctagacagaaagaaaacgaggaaaaggggtgcctatactgaggaagcaaaactttactagaaaccctcaacttacatctcattgtccagaactaggtcacatgatcaccccttcctgaatgtgggaaataaaacaagaatatttaccatgataattttaccagaccaagtaaaagtcatggttaaaaccactaattttatttatttatttttattatactttaagttttagggtacatgtgcacaacgtgcaggtttgttacatatgtatacatgtgccatgttggtgtgctgcaccccttaactcgtcatttacattaggtatgcgagacgccggctgagtctcacgcccgcgggcggcagccggtcgaccccggaggcccgactgaggagcggtcgcgtgcggaggtcggccgggtgcggggacgccccgggcctcgccgcctgctgcccgccacccgcggtctgctggtcgacccgtgcggaggaaagaggaggagggacgcgcgagggccggaaccccgggtggccgcnnnnnnnnnnnnnnnnnnnnnnnnnnnnnnnnnnnnnnnnnnnnnnnnnnnnnnnnnnnnnnnnnnnnnnnnnnnnnnnnnnnnnnnnnnnnnnnnnnnnnnnnnnnnnnnnnnnnnnnnnnnnnnnnnnnnnnnnnnnnnnnnnnnnnnnnnnnnnnnnnnnnnnnnnnnnnnnnnnnnnnnnnnnnnnnnnnnnnnnnnnnnnnnnnnnnnnnnnnnnnnnnnnnnnnnnnnnnnnnnnnnnnnnnnnnnnnnnnnnnnnnnnnnnnnnnnnnnnnnnnnnnnnnnnnnnnnnnnnnnnnnnnnnnnnnnnnnnnnnnnnnnnnnnnnnnnnnnnnnnnnnnnnnnnnnnnnnnnnnnnnnnnnnnnnnnnnnnnnnnnnnnnnnnnnnnnnnnnnnnnnnnnnnnnnnnnnnnnnnnnnnnnnnnacaggccccagtgtgtgatgttccccttcctgtgtccaagtgttctcattgttcaattcccacctatgagtgagaacatgcggtgtttggttttctgtccttgcgatagtttgctgagaatgatggtttccagcttcatccatgtccctacaaaggacatgaactcatccttttttatggctgcatggtattccatgatgtatatgtgccacattttcttaatccagtctatcattgttggacatttgggttggttccaagtctttgctattgtgaatagtgccacaataaacatatgtgtgcatgtgtctttatagcagcatgatttataatccttttggtatatacccagtaatgggatggctgggtcaaatggtatttctagttctagatccctgaggaatggccacactgacttccacaatggttgaactagtttacagtcccatcaacagtgtaaaagtgttcctatttctccacatcctctccagcacctattgtttcctaaaaaccactaattttaaaatgctgcctgtggttggcagaattatgccccaccatcacccccaaaggatgtccacaacctaatccctgcattcatattttgtctctttctttcactttttgaacaaaaatcctatgcttataagtaaaaggagtttttccctgaaaaaacttttccccccagtccctagtatggacgagtttgaatttggtagtttgaatttagatctgtccatggaaattcagttcaaatataggactagatctccctggatccatagagaagttccagtcaaagatgtgtgtgtgtgtgtgtgtgtgtgtgtatgtgtgatttacttatcttcagctgacaaaggttggcagttgtagggcacttggccatctcttatttctctacaataaggattacttcatccttatttgtaattcctaaaactaaattaaattttatgtacatatgtattcattcatttctttattttagtttgttgatttaagaatattcccacaagttaaacaatgaaagtgatagttatattagagatatgaatgactaattattcctgcccaccacctacatcattttccccccagcttaatggaggttttattgacaaacaaaaattatatatacttgcatccagtcataaaaaagaatgagatcatgtcccttgcagggccatggatggagctggaggccattatccttagcagactaacacaggaacagaaaaccaaatactgcatgctcttacttataagtgggagctaaatgatgagaacacatggacacacagaggggaacacacactgaggcctatcagcgggtggaaggtgagaggagggagaggatcaggaaaaataactaatgggtacaaggcttaatacctgagtgatgaaataatctgtacaacatacctccaacacaaaagtttacctatataacaaacctgcatatgtacccccttaacttaaaataaaagttaaagaaaaagtaggaagaatgaacagaaaaaatatatatacttaaagtatacaatgtgatgttttgatataggtatacattgtgtaattattaccacagtcaagctaattaacgtagtcatcaccttatatagttactcttttgtgtgtttatggtgagaatatttttctataactgaaagtttctaccctttgaccaatatctctccatgtccgccatcccttgaccatatatgccctcatatggtcataattgtatgaggttatgacctcataacaaccattctttctttttccttgagttcaactttttagattccatattgtaagtgaaatcatgtagtatttgtctttctgtgtctggcttatttcacttagcataatatcctccaggttcattaatcattcatgtcacaaatggcaggatttgctttttaaaactgaatagtattccattttctgtgtatgtgtgtatatcacattttctttatccatccatttgtcaacagacactttgattctttcgtatcttgagactaatgtgaatatgctgcagtgaacatggggtgaagatctgtcttcaagatggtgattttctttcctttgaacatatacccagaagtgggattgctgggtcatatggtagctctatttttaattttttgaggaacctacatactgttttccataatggctgtaccagtttacattcccaccaacagtgtgcaagagttcccatttctgtgcatccttgttctcactttttaaaagagaaactacccttctatggccttactgaacagtgaccatgttttgaaccacttgattcctgtctcccgtctctccctcttgccacatctggaatgagacataatccaaagatgaccaacctgtgggcttaccaacaacctgtggcttgatttgcaaagtttaactcagtcagttttaagtactatgcatgttgtctagattgaaattccgacttagccacttgctagttgtgtaaccttaagcaggttacccaaagttcactatgcctcagtttccttctctgtaatattagatcctatataatgtggttttgagaattaaaaatagttaagtccttagaacagtatctggctcatactcaaagcttcataaatggtagccattattattattctggtaggaatttggaattaagaaactgaataactaaaagagttactagtagaaactaaaggtagagtgtcatgagatagaacagtggtttttattcctttttggggtcattgctttcctgaagcatctgatgaaagtatggacattccctgcagaaaagttcataagtatatataaacaataaaatcaaggttgaaagcacctgatgcagagaatgatggagaggaggccacagcaagtcagagccatgtgcaagtcagccttgagaaggagcagaaactgccaccaaagcagagggaactgttgagtaaacggaggggaatggactgaatgaaaaggcagaagcagaagctgggagatagcccttcagttccggtccagtgatttctaccccagaattcctgtgagatctctgtttatctcctcacagccaacttccctgcttataaccaagctagcatagcctcccttcttgcaatcacactatccagaccgaaaaaaaaaaaaaaacttgaaaccaacttctacatgatgaagcattattgctgtgtcatttcagatttctttcagccaacattatgatgttttcctgtggtgtgattatatcaacagcaaatgctttcagagtaaagtgaatagccatctgtagttacttttcagcggctgctaacttccttttttgtagatagaacactttccaggcatatcctagtttttaacattccactttaaggaaaaagcaaggaagaagtaacgtcaacctatctctctagtagaattctcttttatttctattaattttttaaagtttttaagcagaaaatgaggcagaacttcataagattttgtaggtgaaaaggattttaaggaattttccaggcccattacatccaaagaaaactggaccctggtatcctattgcatacttagtctaatttagtcctcacagtaaccttatgtgatataatacccttccttacagatgaggaaacaggcttagagagatctgaccccttgcccaagatcgctatagcaagtggtagaaccaggatttgatctcagggttttctgactacaaagcctatgctgcaatgcttcactggactctaaaacttaggctagagaagagtgaggctttcactttatttcccccattggtctctctctcagcagctcttctagaaaagaagaatgggaacttgcaagccccatttttttgatccttgagccgaatgggtcttgaatgtgtccatcgagcatctgcctccgttgcagtgtcatctcaagtggtggtaccttcccactgggctggagctactattggatacttagccaaccctccttccataatgaggccttcacatgggaccacagctcagcattgctgggaagaatggtcagagactgcaggggcagcagcgatccacagtttgaacagaagcatcactaagacttgtttacagactatttgcaggatagaggtgtggttaaaagcactggctctagaagtagactgcttaggtgaatctcaactctttcacaatacttgtagggcaagaacctactacctcttttttttttttttttttttgagacggagtctcgctctgtcgcccaggctggagtgcagtggcgggatctcggctcactgcaagctccgcctcccgggttcacgccattctcctgcctcagcctcccaagtagctgggactacaggcgcccgccactacgcccggctaattttttgtatttttagtagagacggggtttcaccgttttagccgggatggtctcgatctcctgacctcgtgatccgcccgcctcggcctcccaaagtgctgggattacaggcgtgagccaccgcgcccggcccctactacctcttaaagtctccatttctttatctggaaagtaagatatttctttaaaagtgcataccatatagggttgttgtgaagattaaatgtgataatgcacgtaaaccacttagctcagtgcctggcatggtaacgctcagtgagtgttggctattactatactacttgaaaacagtttagagaaaaagcaaagaaagaggaacatcaacctctactggatccttttattttggttaattttgagtttttgaactgaaaacaagtcataaatgtataggcttttatagctgggaaggattactttccttgaaaatggtaactcctgtgtttagctgacaaaaccagtttttaaactgcagtcattttatgagtgtaaaatattaccttcaaaaggcatagaatgtatatgcattttattactgtaattaagagaggtacaaatatgttcttgttccaagttttttgttgctaaaccattaaataatctggtggttgttttcctgttactcagcaacataaagaagcttcagtcttcagtcttcagtcttcatatctttttagaaatgcataaaatttgtagattgctaatgtattcttgtaacattactgttagccaggcatggtggctcatgcctataatcctaacactttgagaggccgaggtgggagaatcacttgaggccaggagttcaagaccaacctgggcaacatatcatgaccctgtatctacaaaaaaatttaaaaatcactgtgaagtagctagcagataattactatttttattttatttatagcaatacatctagtacctcattaaatagaaatttgaggtacaagtagttacttgcctaagttacataatttttcctcaccaaaaactttttattctgtggcatttcttaccgcttgtcatctttttctttagttaaaaacactaatttttttattatttaaaaaaattcaaaaagggactgtattatattggaagaaagactaaatcctgtgtgtgtgatgaaaatggattaaggttttgatgttgaattttaaactcatacttatgctacatccaggaatttttcataatatctgcagttgaggtgagtgcatccatttattagatttagaccacttaatataaaaacaatgaagtaactcaggatttactaattgtaaatacatagtataaatatgtttagagaaaaattatatgcaaatgttttttcccttgcctagaatttgaagatattgttaaaacatggcaatctattgcaaacttgactgtttagaatcaaacagaattatttaaaattcagttttaatagtactacagcaatcaggtggagagaaaccaaaataattattaaaatgatttcaaagtttaagacgaaaagtaaataacattggactaagtttccaacctttcccttggtctaggacattaaccttctctctttagctgcctaacccttatgtatccttctgggccctgcgtttgtctcagtgaagcctttcctaacctggtcaggtctcatgtttaatacagtgttagcactgtgacctcttcctatatctcttgtttgtctggattgtaataatatgattgttgataattttttaaaactgtgttcctcacttgactctaagtttgatcagggcaggaaccaaatgtgcccttttcactcccagacgcttaatgcagtgttaaacatcacactagacccacagacattctcaataaatatttattgactgatagatgaatggattccttgtttaggatattgtagctgagagatattgagaagaatcaactggctacttcccactggttttcagatcagttagttgctactaggttaccatggataaaggatttgtttataagcccagaagtttaattttatcctcttgattctcagttattgatactagtaaacaaacttacaagaaactaatttgtatgagagaatacaaccccgaaatttacataggaaaatgtacctagaaactggggcttgtggtctatacaggtgtggcagagacggtaatcacttaccttgtccttctcaacatttcctacctagcttgcagttaggtggggaccacaggactaacctgtggtattggccaatgaactctgcacagagtgatgtgtcactttgaggccaagggaattcagagccagcatgctttcttgtttgtttcttttgccaaagcgtgtgctctttaggcctcctgttctcattggcaaatctacgagagggaagagggctgcctgaccaggattggacttaagcataataactatgcttttaaaaaagttaagagaataagaactaacatgaaaatttaaaatatttaagtcattatcattgatatttttccatactttagagatagttctcacaattcttgagccacaagtttggaatgatttcttctaccacaatatttttggtgtcttcctggtaaataaggaaaatccaggttgaaatgggcaacttctataagtcaagagccggaaaatcttttttcctacagtttatgtattttagcagtagtttatgtagcaaaatggatctcttatgagataattttttcattaagtattttttcaacagaattatatttgagccttgagcgcctattttcttcaagatattgttaagctctgcaaaggtgagtaagtcatatatcttgtcttcagtattttaccatccataacagactgctaattattcagcaaaatgtgtttcctgttctttggaggcacatcctcccttgcagttacgtgtcatgtgacagagtactcattggtggaatttctgaggtctagacacttctaggtctaactcataaaagcctcccgcaagtgattctccattctctgccacttttgttggctggctgttgatgcgcagcgtaacttgaagtcatgtgttgaagatggaagcgtttttgtcggacatgtcactgaacagttgcatggagcaaaggcctactccctccccacagaaacgtttgtattggactaatgtatgggtaataaatcaacttcttgtgtaaagccactgaaagtttggagtttatctgtaattgcaattagcattattctaggcaacttctaatagatgatacagcaattccagtgtgaatatttaaattttcaacaatgattaatttgtcttatttgtaatgcatcgtgcttagaagagacatgttttcatttaaaacagtctgctaattctttctcttgctttcattactccaaattatatgtctcttcttttaacagccaacaaatggctactctgattaaggaggcccttcattatccttcttcctctcacaccgttttataaggtcatttatatggtttctgtgcttacaaattcattgagcatttactcttatttataagtgcagtaggaaaaaaagaagggataaatttagaatgttaacacagaagtgttttttgtttttgtttttgttttcttgagacggagtcttgctctgtcgccaggctggagtgcagttgtgggatctcagctcactgcaacctccgcctcccgggttcaggtgattctcctgcctcagccttccgagtagctgggactacaggtgcacaccaccacacccagctattttttgtaattttagtggagacagggttttaccatgttgaccaggatggtctcgatctcttgacctcatgatctgcccacctcggcctcccagagtgctgggattacagacatgagccaccactcctggcaagaagtgttttttagatggctgacctgaactctggcaggtcacttttctaaaaagtgttgctgcctcgagaaagttaccaacatgtgaaagctagtttgtattaaaccttccacctaatgcccatggcagaaatctagttattcttgattcatgtctgtcctcaccatctccactcccatctgatcaatcaccagatgaggtcaattgagtctcctaaatatcttttgagtgtgactaccaccatgctctagtgtaggtttctatcaagcatcccatggacgcagctgtctcttaactggtctccatagctccagtcttaagacttccatgctgtagccagaacttcttaacatgacttggaaggcccttgcatcatcagcaattaattctcctctcttttctctagttttcctttcctttactgttactgtcctttctgtgccttgtgctccaggcttactgaacttctttccatcctttaaacatgcttttttctttctgaagcctctcagcctctgttcctgctgagatctccatgtggcacactactctttcccactcctcctcctccaccccatcgcctcaataattcctacccattctttagttttcaacttagatgttacttctgggatcaccttctcggtccttgaggtctgggttaactgcctttcatttgtactgtaatatatctccctgcatttcctctaatagctcctttgttacattttccttttacttgtctgcatcccctactgggctgtctggaggaacacagaccatagttatgttgatcaccattgtatctaagcccttggcgtattgcttagcacaaaaaatatttgttagatgaatgagtaataggttgtgtaagaacctagtcttttttcagacttgtctgtagagtgatatttgaggatataataaagaagagactgaagtcagtgccagagtatcttttcacatattgggaaatcatcagtgaagaccgtttataggagaaatgattgaatgctggatagttgttgaagattgaactaacaagatttgccaatggattggatgatgggtgtggatgactccatgtgtataagttatatttgcttggcaaaattgttcatgaaaagttaatgtcgccattatggttaaggtgattgtgagaattaaatggcctatacatataaagtctctacctagtctagtgcttggcattttgtaggtactcaataaatattattttcctatttgtaagtgacttagtgctttgttaaggcaaggaagctgaatgtgttataacatgctgctgtttctaagcaaaactgtgcagcaggtgaagttggtgcccagtgtctgctggaacttctgcagtcctctccgttgtcctacccagaaccccacaggctatatctcaaggtcagtactccttcccttgacctggtactctacttgtctctccagttccctcacttggaaggcttattactctcatgtttcatcctgacttcctctaacttaagtgtaggtaacacaacataaagagttaagagcatttactctgctgtcagactgctgggtttgaactgtggctctatcacccctgacctttgtaaccttttgcaagttactagacctctcttgtcctcattttttaccatatgtaaaataggaagagaaactcttagaactgtgagaataaaagagataattcttgtagtacatttgaaattgtgcctagcacataaaaaacactgaataattgtttgccattttgagtcataatcatacctgatgacttcagccacttctgtgtagccctcaatatcccttctgtaccaattcttgaatttctgcactcctgtcctctcatccatcctttgatcttgtttccatttggaaaagtaaactcaaactcagaattcaaaactaaacttatcaacttccctattaaggcaagcttatctctttttatagcagaatgtgttggctacaagtagtaatagaaaaacccaaataaaagtgacaaactacaaggaaagttatttctctcccataacaagaagtgtagtagtagaatgggtcctgggttggataattcagttgctcagttatgttttcaaggacccaggtgccttccatttcctcagcattttgacttgtccttttagactggctctcctcaactcaagatgaaaactcaggcaacacgtgcatatgacagctttcaaaaaggattgccccacatctttactcagatccaagaaaagcttcctaatctcatcaatgacaagaggactggaattcccagctttaccttagactaaccaagatccattctcttggagctggggatagcattccatttctggaacacatggcttggtgagggatgaacacctgagcagcatcagagccctcctggcaaaaaaaaaaaaaaaaaaaaaaaaaagagggtgagggttgggagataaatgtggctagagggcatacagtgtctactacaaggtttgaaatatttcatgattagaagtaaaagatataaaaatgaagaagaattagtagtcacattgaagttagggaaaactaggtagtaagtactgtagaaaatcaactcagaccaaggattggggctggagtagcggggatggatttgggagatgcagcatgcatcctcattgactggacatagggaggggaagaaaggcctcacttgacttccagtttctttttggctaagtggatagccattcatggagatgaggaagacaacaggatgagtaggtttgactggtagaggtttacttgagttatgttttaaatgcattgagtctgggatgcctagtgagacatcctagttgaaatatcctataggcagttggaagaaatgtctgaactggaaatgtagatgcccttttgagagcagaaactgctccttcctcttttcttcattattgatggtgtctcccagtctttttcaagtcttcctcatcctttggtgcctctcaggctgatagccttctccctctcttcttaaggaatacactcacttttggtgaagccgttgctacaattgctgtctgtctgccaaggtttcagtgtaatgccataaggcaaataacctaaacccattaaaattaattcagaatttaaaaggccagataatttaatctactttttaaaagactcataaatattaaattaccaaaaaaaaagacaactcctcaaacagaatagatttatcctaagccgaggaaattgtgataagtggacagagttatttaaaggcatattaaaagttagatttctcacgcctgtaatcccagcactgtgggaggccgaggcaggcagatcacttgaggtcaggagttcgaaaccagcctggccaacatggtgaaaccccgtctctactaaaaatataaaaattagccgagcatggtggtgggtgcctgtaatcccagctacttgggaggctgaggctggagaatccttgaacccaggaggcagagattgcggtgagccaggatcacgccattgcactccagcctgggcaatagagcgagactctgtctcaaaaaaaaaaaaaaaagttacggacttaaccttatggttccccaaaagtataaacatgagaaacagagatcaggaattttcaatcatttgctatttagacctaaattaccaggggaaatcctccagcacattctgacacaggacacccaaccatctgtaccttttctgagtctgtgaactctgaacttcagggtcacccttagaactctttgtatctgcgcttctgtttctcttgccacctactctctcctccctttctcagcctccctgtctgctgtctgggtgctcttctctgcagcttcctcacccttcatatatagtcccttgtcacattggttcctggctctggctacccactacttcctcccctttgccacttctccccagtgttcatgtacacctttcagccacatcattctcctggctgcttcctgctcatgcctgtcaaggtcacctgcatgccactgcttttgctttgtcctggccttttcccttcaccctttacttagccctttcccactgcctttaggtatagaggaagcattaattagtttttgcctgtctttagagaagcagatcattgatcattgtgaatttgtactgcaaatactgtatagattattagctcacctgacaattatagttggaccccttctaataagatgatgcaaaaggcctgtccaagtattagcagttgctattattgctgagcacagaaactctgcatgagtgccccttattttaaaaacagcccaatggctgggcacagtggcttacacctataatcccagcactttgggaggccaagacaggcagattaattgaggccaggagtttgagaccagcttggccaacatggtaaaaccctgtctctaccaaaaatacaaaaatcagccaggcatagtggcacatgcctgtaatcccagctatatgggaagctgaggtgtgagaatcgtgtgaacccagcaagtggaggctgcagtgagccaagaacacgccactgccctccagcctgggcaacagagcaagactctgtctcagaaaaagaaaaaaaaaaaaaaaaaggcctaggccagatacagtggctcatgcctgtaattccaacactttggaaggccaagtggggaagattgcttgaggccaggagtgcaagaccagcctgggcaacataacaagacccccatgtctatagaataaaaaacaaaaaaatttagttgggtgtggtgacacatgcctgtagtcttagcagctcaggaggctgaggtgggatgattgcttgagctcaggaatttggggctgcagtgagcttatgattgcacaactgcactccaggatgggtgacagtttttttttttttttttttatcaaaaacaaaaatgaataaaaacagccctaggagggggtgtgggagagcaggcattttctttgagatacaatttagaaatatctctcaaatctaccctaaatatacatatgtgtgtgcatgtgtgtatttatatgtacgtatacgtacacatgtttacatatatacgtatggctatacctaaaggcataaaatttgcatacaaaatttctcaatgtcttagtctttcaggctgctctaacaaaatatcataaagtaggtagcttataaatggcagaaatttatttctgacagttctggaggccaggaagtccaatattagggtgctgacatagttgagtttttgtgagtgacctctgctgggttgcagactgccaccctctcattgtattattacatggtggaaaaagagtatgttagctctgtggcctcttcctgtaagggcactagtctcattcatgagggctctacccttgatgacctggttaaccccaaaggccccctctccaaataccatcacattaggagttagatttcaatgtatgaattttggcgtggcagggggtgggacacaaatattccattcatagtgctcagaatacattagaaatcgatagcattggttatagtcggataaaagcactggaagttctgggataagctgtgagggaaaacttttactgcattccttttatatcttttgaattctgattattgacgtattacttaaatatttctttcaaatttacttttttttttttttttaaagagacaggctctcatccaagctggagtgcagtggcatgatcatatctcactgcagcctcgtactcctgggctcaagcaatcctcctgcctcagccccctgagtaactaggaccacaggcatgcaccaccatgcctgggtaatttttaaatttttttgcggagacaaggttttactatgttgcccaggctgatcttgaactcctgacctcaaacagtcctcccaccttggccttccaaaacatcaaatttagtattctatgacccatcagttctcacttgaagaaattttcccccacagaaatgcttgtttgggttaggaaaattgtgggtaaggtgatgttaatgataacattgtttatagtaacaatagcaaccacaaaagcaggagcaacctaaaagtacatcagtaggggctgacatctcaattataacatatctatgctgttatttaggaaaatgaggtatgcaaatatggtaatgtgaaagggttgctgattaagatagggtaggttatgctagagttacaaacaaccccaaagtctcagtggctttaatgtaagaaggcttatttctcagtcacataaacttttctgtcaatccaggggactctccaggcaatccctgagcacgcaagctgctttgatcttgtggctctgccatctcaaacacagaggttcctcagtcaccaaagcatgtgcacaccagcttttctgtgctttggcccagaagtgtgtgtgtatcccacagcctgccgggcagagctaatagcatggccttgcctaactcccgcagaagtgtgggagaacagatgaaatgtttgggatataagcctgctttactatttactgctaatgttacctttagtatttaagacatcctaattgagaaaaacatgtagatcagattatatgatatatatcacatacagacaagatatattaatatgacacgtaagatacagtgtatattttacatattatatataattttgttttaaatatgtatatacatagggtataggaacataaagttttatggaagaatatataagttaacaataggaacctctagagagtggaactaaggttaccctgtttaaatatttttactgtaatttttactgtaataaagtgtttaaactgctttaaacactatagtatagtctttaccttttattcatacatattaaaatagtaggattattgtgtattaatttttgtgatttttttccaatctggtttaaattgactttgtgaaatcctccatgaaaataaattcaagtttgagaaatctgagttgtgcaactgttatttcaccttaagtgaaattaacttatagcctatttatgtgtgtatataatatgtatagaccaaagagaattgccaaattcacctacatttttatttatacatcctatgttatttagttaaggcttacgtgttgccagttttgtaaaataggaaatgccattcactgttgactctgcaccactcctttcctgaatatgctggaactaaagggcaggcaaagaaataagtaattcattcatggtgaacaagcaaggaacagactagcaacaccttggaaagccaaacacccttggagctataaaaacctagtaacagatgacataatccttactcggaagatttattattaatctctttagatattcaaaatgtggaggtttggccattcatggtggcttatacctgtaatacctgcacttcgggaggctgaggcaggaggattgtttcagctcaggagttcaaggccagtctgggtaacatagtgagaccttgtctctagtgaaaattttttaaaaatttaaaagatcagctgggcgtgctggcatgcacctgtagtccccagctacttaggaggctgaggtgagagaatcacttgagcccgggaagttaaggctgaagattcacttttcacagattaatgactatttctacaaagctaaacattctaatttacaaatgggatacatattaaatatacatttaaaaaataaatttaaattctaattgaaaaacaaacaacataacaccttaggtatggtgtgataaggttacttttttttgtttttgtttgtttgtttttgagacagagtctcgctctgtcacccagactggagtgcagtggcgtgatcttggctcactgcaacctccgcctcctgagttcaagtgattcttctgctcaacctcccgagtagctggaaccacaggcgtgtgccaccacttctggctaatttttttgtatttttggtagagacagggtttcaccgtgctagccaggatggtctcaatctcctgaccttgtgatccgcccaccttggcctcccaaagtgctgggattacaggcgtgagccactgcacccggccataaggttactttataataatcatgaacttttacctctcatcaaaccccagaaggcagtttattcgttgaagttgcagataacctgagaataaagatggtgaaaagccctaaagatgtggcttgaggtcctatgtctatcagggagtaactctaggaaggaacacgtaatctttgaaaaagctcttccagaattcagatccaagagcagtgcttctttgaaccagcccaacctgaatgagctgccttgatcagggttagactatcctgtaaacatcagcttttaaagctatcatttttttttttcagagaattattttggccttgaagtaatgtttgttttatatataaatgctgtctaattttgatggtttgattgcttcattagtcatctctgcaaataacacacttctccatcggttttggcttcaaaaccaaactcaatatgtgaggaaatcacacctccaagtaacagctagtacaatctcttttggtcttcatttctctgaacctgcttccttcaccataatttggtttgcaatgactgtacactcagaaaatacatgtattttggagacaaaggagtccataaagcttattttgcaaaggattaggcgtgaaaccaaattaggattaaaaataaataatgtactttttatttccctaatgtcttagtttgtttgggctgctataccaaaataccttaaactcagcaacttataagcaacagaaatgtattgctcacagttctggaatttggaaagtccaagatcaagatattgatagcagatttggtgtctgttgggatccattcgtcatagctggtgcctttttgctgtgtccttacatgacagaaggggcaagcaagctccctcaagccatttttataagagcactaattctattcatgggggtagaacccttataatctaatcacctcccaaaggccctacctcttaatacagtgcaaataatattttgagttaagagtttgtataatacccttaaatatgacactttgtaacatggtcagactgtgtgtgaccaatccagcttgtatcatacaggacctcatcatgcaacctcaccatgtgagtttgatagcatccagactgctctatactttattgaataaaatgagtccactaatcttgctcttggctgccactgtaatgtcaaattgtcgtaaaagttactaaactctttatttccttacttatcacagaccaagcaacagacagtttgcagactggaacccttgaaataacactgttctaggaactattagagaatataaacaaatgtagaagcatttaaaatactagatagcagtgaaacatttaattgcttaaaagggtaatagatgagatgccccagtgcaacatccaattaattggcaaataaattgtagagacagtaattgtcctgaaagtccagtggagggagaaagatcactccaggctagaggtgtcaagaaaagccttatggagatggtgggtcttcaaatagttcttaaaggacaatatttaaaaataaaaattgcataagttttattaataattttagtatattcctgtaaactccaaagtaaaccctagtcatactagttagtgttagtcatactattagagccctctatatctatgtgtcctgcatctgtggattcaatcaactgctaatagaaagtatttggaaatctacatctgtactgaacatgtacagacttttttgggtcatcattcccccaaaatatagtataacaactgtttacatcgtgtttgcatagtattgggcattataagtatctggagatgatttaaagtatacaggaggatgtgcataggttatatgcgaatactatgccattttatgtcaggaacttgagcatccaagaattctgctatccacaagaggtcctggaaccaaccctctgctggtatcaagggatgactgcatataaatactagtattactagataaatcttccattcagcctttgaatgcaaagggaacttccttgcttgtcttcttttttaaaacaatttacaaaatttaaaaacaaaagtctttgttctcttgaatcattacaaatttcctggtaattactgtgtttggattagattctttataagtgggactactctgtaagattcctttaaaagctctgctttgcagatgttgttttgtaatatggaatcaatccttgccagcaagagtgtagtttatattgcatcacttccttcgcaagagaattgactgcaggatccttggggttagggtcattattttttcattgttttgcaaagtgtgtattgcctatttatgttgttagaactttcagattagtcatgaccagaaattaactgggaatgattattacacctgtcagctgatagtgcgatgtatataagctatagatgatttttttcccaaaccaatttcatgatttgtaaacattagtttggttttaaaataggataacatccttttaaaatacatatttccagcttttcttgaaaaattggaagttctgggcccggcgtggtggcttacacctgtaatcccagcactttgggaggacgaggcgggcagatcaggaggtcaggagatcgagaccatcctggctaacacggtgaaaccctgtctctactaaaaatacaaaaaattagctgggtgtggtggcgggcacctgtagtcccagctactcgggaggctgaggcaggagaatggcgtgaacctgggaggcggagcctgcagtgagccgagatcacgccactgcactcaagcctgggcgacagagtaagattctgtctcaaaaaaaaagaaagaaaaattggaagttctggcacaacttggttcacatttcagaatgggaactgtctgctagagttaacagctgcttactttatacagggctcatgcttctcacagccctcaccatgccctgtttgactgacttctttccttttccacttatctttgcctgcctaacttccatagacagtttggctactggactagtgtgtaatagtgcgatttggccaccaaatctaaaaccaagacaaaatgaaacctccagcttttttagaccagcaggtacctttcctaacttgatgaagcatcatttgaagaacaaaatcatgtatcattctgtgtttaaaattagttggttgatcacagaaatagattattataatctgtataaacaagtgaaatttatctgtatgtatatatatgttataggtctacatacacacatacatgtatatgagaataagacaaatttgaaaacattaacaattgggcattcatctgaatgaaatttaggagtttttaatggtcttcttacaacttttaagtttgaaattgtttcaatgtgaaaattatttttaaaagtcaaactaactcttaaccacagatttttaacagtgaaaaatatttttcttccctaagtgattaatctttgtcagattagtcagattagtcagaatttgagaaagggaaaatttaagaccaacttaattgataccatgttttacaagttatttcccagaaaaaaatttttttctttagctgatattaaaaataaaacttagaaaaaatgtttttaatgcattagcaattgaaactatttgtctctgcatccaaactgttagtaccttgacataataaagtactcaaagcataaataaacgcgttgcttctctgtgtccaaagaggaagcttattagcaaaatatatacatatgtggtgatgtgtaggcatctacatattaggtactttaaacaaatgatcatactgtcagaagagcacagacttgagctgtttgttcatttgtggtgatgaatttgtgccagttcattcccattggtctgttctcccttgtaatcaatggtatgtgtctcctagaaggctggtcagggtacaagctgtataccacacagccaagactgagaacagatagtcaacaactgaattgattctccttattttccacaataaactatcccagatttggatagtggaggtccgtttcagctggctgcagtatcctttggacatgtctgtcattctgtgagaacttccttattttctgctcataaagatagtccaggttcatcttgtatttcctgtgtccccattatggattcagccgtttcctttagtatagcatttagaaatcaagaactgggtggtagatatggttgttgccattggtgtgtcattgctcttacaaacagagctaggaagggggttggggaatgcacacacacacatacatgtgtctacatctatttctttgtctatttattgacaggtaccatattgatatttaccatttcaatctaacaccatggggtttattttaaccttccctctttcatatttgtaatttctttctgtggtaggaagaaacctgggctcccattatcctcaacatatatacttattttctcagttttcctgtatgtcaccaatttccactccccctgccatgcaggccacttcctagacccctcccctgctggacaacccagctgcaccagtggaatccttaccctggccccaccaccagcccagtgatccagccgaatcctcagccctgtctctgccaaatatactggccacgccggccaaacccttgactttttaaacttagacgaattataagcaaaatcttgagacaaagtatttcctggaattttaaaataagaatattagtagttttagttattcaatcacacattatttagtttcaaatcttattcacagaagatgtaagacttgtttaagtaaagatttgtaaataatattatttataaataagcttagtttttctttcacttttttgaaatgtcatattaatagacacttagagaaactgcttactgcttaaatgagcaagattgaactagaggacaggcactttcctttttttcttgttttatttttaatttacaaataattatatttatggggtacagtgtgatgtttgatacatgtatacattgtggactggtcgaatcagagtaattagcatatctgtcacctgaaatatttatcgtttctttgtgataaggacagttaaaatcatctcttttagattagctggtgttgtggcacgcacctgtagtcctagctactcaggaggctgaggtgggaggattgctcaagcccaggagtttgaagctatagtgaactatgattacgccactgcactccagcctgggcaacagagtgggaccctgtttctggaaaaacaaaaataaaaacaaaaaaaaacaaaaacaaatagctcctttagctatttttcaatatgcaatgcattattattaactgtagtcaccctgctgtgactttttcctcctctctagctgaaacttcgtacatgttgaccagcatctcccagttccccatccaatcctcccctggtctccagcctctggtagccaccatctactctctacttctattaagttcgacttttttagattccacatgtaagtgtggtcatgtggtatttgtctctctctgcctggcttattctacttagcataatgtcctctaggttcatccatgttatcaaaaatgacagaatttcctatttttttaaataaaagctaaatagtattctgttttatatatatatatttcgcattttaaaaatctattcctctgttgatgaaaacttagattgtttctatatcttggctattgtgaataatggtgcagtgattgagagtgcagactgatctttgacatagtgattttaattcctttgggtatgtatatatccagtagtgggattgctggatcataaggtaattctgttttcagtttttgaagaactctatactgtcttccaaaatggctgtataatttataataccacctacagtgtacaagggttcccttttctccacatcgtctctaacacttcttatctcatttttttgataatagccagtctaacaggtatgaggtgatacctcattttggttttaatttgcatttctcttattattagagatgagcagtttttcatatgtattggtcacttgtatgtcttgagaaatatcaattcaagtcctttgcccatttttaaatagatagtttatttgttttcttattattgagtagtttgagtttcttatatattatggatattagcccctttccaaagtacaatttgtaggtatgttctcccaatctgtaggttgtctctttactccattaattgtttcctttgtggtgcaggaactttttagtttgatgcaatcccatttgtctggttttgctcttttttttttttggttttgctctttgcttttaaggttatatccaagaaatcactgcccagaccagtgtcattgagcttttcccatgttttcttctagtagctttataggttcaggtcttatgcttaagcctttaatccatttttaattgattcttctttaagaggggagataaagttatattttcattcttccatatatgaatatccagttttcctaacaccatttattgaagagattgaggacagctatttttttagaacaattaaagattttcttaatggcttatgaagctcagaatgcagtcatggttgggatgatacttaaaaaatatactatttgtcttaaattggcaaccaatctacctacacaaatttctctctcagttagatctagcaataaacgagatttaatttctgctacagggactaaaaaatagggaaaattatttgttttttccatttcctgatgtatttgatctgtttttagtttttgactcttttctttgccactacatttttattctcttagttcacttcctgatgtctggtattcctgagtatagaaaatacttggttattttcacaagtggaaaaggactggctggctaaagcaaagtagtagattatccaaatcatgtttgtctttagcatgtgttgatttgtgtttctgaatgtggacccatttaatacttagaaattttaataatgaatctcttagtagttccagttccctcttaccttacttactaaaaacctttttgagccccacagcagtatactagaaataagtataaataaaaagaaatttggttcacattgtcttaggaaacttgattacaatctaggaagaaagctgtaaaatgccatatctcaaccatcatttaaagatgaaaactctttgcagagtggccatagctgatgtctttcacctactttaggtcttctttacacccttccaaatttagctccctttcccttaccataatcactctatcccaaaatgagcagacattattgatggccccagtgagcagcttttgatatttcacttggggatgccatctcacattcttagcttccatttaggggctgttggcatcaaaagagttacagtattaccagattagcaccgtagaagttccacgtgcctccagacactcccaacgttgaagcagtgattgagcctccttaactgtggacaggggaagggaagtaaccacttacgctatcttagacacaaggaagattattctttaaaaaaaggtaaacttaagctaaaagaaaatgccagatataggaagtataaggatagtgcagaatataggaagtattaaaagctttccatgaggaaatgcagccttatggatgttacagacttctgacgaggaaagccaaggagagccagcagacaaggtgtctggcccttcattaattcaataaatattttggctgattttaaaatactttgctcagttccttgttggctattaattcaccccaacaaaaacaatagtcaaacaataactttaggagcgtctgggaaactttccggttttcctactcatgcaatccattctgtagtagaagtagatctccttcccaggtcagtgaaagctgtgctttgtaattcagatttctccaagtagagatgatggttaaatgattggcataaacgtatttctttcttacctgtaactgggcacatgatgtcaacaaaagagggctttagaagattttctattaatatttagtaaatgtataattagcaacatacatggaaaagatctaaaataattctaggcacagagttgatgcatagttaatattaggtcagagtgaatctgtttattgaattttaaaaagttttgtgacagtaagctgaaatgaaagtaatccatgcgcttgacgttaaccacctgtgaaagtcttcagtgtctcttgtcacgactacaatagctcctccttatctgtgagggatacactccaagacatctagtggatgcctgagaccacctatactgaacactatatatactgtttttttctatatgtacatagatgtgatgacgtttaatttttaatttaggcacagtaagagattaacagcaataataaaatagaacaattataacaataaactgtaataaaagttatatgaatgtgatgtttctctcgaaatatcttcatgtttttgggccatggttgaccgaagataactgaaaccacgaaaagcgaaactttggataagggggactactgtgcctcccagcctgtgcccaaaagctgcctatctgggtacctgaggatttttaataacaccttggaaaacctttctttaaatacatcacagtcttcacatgttatgaaaagtgggataagaaactatgtttttagaaaagtgatgcagcaggccaggtgtgatggcttacgcctgtaatcccagcactttgggaggccgaggcgggtggatcacgaggtcaggagatcaagactgtcttgaccaacatggtgaaaccccatctctactaaaatacaaaaaattagccgagtgtggtggcagatgcctgtaatcccagctacttgggaggctgaggcaggggaatcgcttgaacctgggaggcagaggttgaagtgagctgagatcgcaccactgtactctagcctggtgatagaacgacactccatctcaaaaaaaaaaacaacaaaagtgatgcagtgtactaagttttatgtcattttctgaattaggcatagttatttaaaagtgacaggatatactgtttaggtttcctgtcgtccagagacccgtcccatggagtgaaatacctcagtaccatgtaaggtagagaggcttcctaccagtataaatttgagagtgggaagggatgagaatcttaagtttattctatttagttaaagtcctcagccatctgtgggatttacttgttttttaaaaggatgtttggctgggcatggtggctcacacctgtaatcccaacactttggaaggctgaggccagcagattgcttgagcttaggagttcgagaacagcttgggcaacatggcaaaaaccccgtctctacaagaaatacaaaaattagctggatgtggtggcccacgcctgtagtcccagctactcaggaagctgaggtgggaggatcacttaagcttgtgaggtggaggttgtagtgaggctgcgatcatgccactgctctgcagtccagacaacactgtgagacagtctcaaaaaaaaaagtatgtttaatactgtaattcacatggtttttaatattatttaaaatgcataattgttatcaattcatataattgtcaatgcctactaaagagttttctacatcaggtccaggtatccttcattttcctgagcagtgttgatttataaataagctaactccccagttaaggtaaaatgcagctaactacttccctaggtatgccaagtagccaaatgttaccataatgggaaatcatttctaaatggaatggatgaaaaggaataaatatataaatattgagccctatgttggataaattatgtttattgttggttgaaagagaaaatcagtgtcatattattaataggtaattttcattctcatgttttggtttaaatcttcatgcctgtcattattggacactcagcaccgttaagggtcttgtatcggttcgaaccccgagagcgcgctaacagacaacatgaggtggtgtgaagcaacatgctgttttaatgagcacctgggtgcaggcgggctgaggcctaaaatggcctcagcaccaagtgaggacggggcaaaggttttatagtctcctgtaaacaggaagtgtcgtagtctgacgtaactgctatgttgtacccggatggcctctttctcagtctttaggagtacttgtcttcaggcggactctcttcctcctcctgctgtcttgctggcgcaagttgctgccccaagttgcaccttggaactgggcctgagaagagaggagttattcatctccttaagctttcaggccccggggagaatcttacaagcacttcatagctaaataatgctatggtgatttattcatgtgctgacattgtatagcttctttattgtattttttaaaaaactgaattgcatgagaccttagtagttaacgttttatgggaggaagctattgtgtttgtttctattataccaggaaggttgaatcactgaggaacttggtatgatgaattcagttagtaaaaaaaaaaaaaaatttaaatagaacccagatatctcctgtctctttaaaatatttttccacttttaaatggggcaatgaagtatgtgttctccttgccgtgtttgctggccgtgatggtgtggttatctgcttgctctctccactgctgatgatctgtgtttgccatccttggtgttgttcactttgtgttcaggggatcgggtttaattctatgagagaaagaagtgtgagaaacatcttcacttggatctctctcaggtgtctcaaacagattgcatagtctgtctgaatcacagttgcctcctgtccctatcctcattaatggagcatcacggtctgctcagtagctcatgtgagatacttaccctgacacttccttctttcttgcctctcatacccagtaagttaccgtctccaatagattatatctctactcttaaagcctgtctacttctctgtctctctactgctccatcccaaccagagaccccgtcattccttcctgagaccagcgtagtgcttcctaattggtccattagcaggcactcaattccttacaccctgcagccaaagggaagctttcaaaaaagcaaatgtgatcaatacttaaagctccacccttggataaagtccacaagccctaaggccttgcgcgctctggccctcctcccacacctctctccctatgctctctctgctgtggtatagtcacatgccctgctctggattcctcaaacactgctgcttccctccaccagtacagtgcattctattggctctccctggacctccatttagtgtctgtccttatcattgcctgcattagggtggagatgagtctgctgtttattcttctgcttgtggctcccagcacaatgcttggaacatgagtgctaataactaatgattgattgaataaacaactggatacaaatacaattaaatacatcaataacatttaaaattaggcatgccataataaataaaagaattgtgttttgaaaaagcaagcatcacctaaaaacgtatatatcaaaaacagttgttttccattgcagaggaaaggtaagataattcatctaggcatctcctgaccacatcttctggttaactaccatttgtgcagctcaaatgaagaaatattgcaccagaagaagaaagccaagaaatgaagtcacaacgtcagtcatttaatccaccacctgtggtcctaactagttcttatgtcctgtggtaagcctaagcaattttactgaaggcatttggccttagagggtccccatgaactgctagaagaatgctttataaacatgaagccaagctggatcaccgttcgctgtgctagcagaagtaaccctcactgtgatgttaaacagaaacatagcactgatgccgcatgctgaacaatgggtctcaagtggaagaaagatatttcctgccattcttatgacttctgctattgctcataataaaaatacgacttggtattattgtgctgttaccatgtactaattagtgtgctgagcactttatgcagagtatctcacttcttgtaacaatcctctgagggaaaggtactatatcagttgaagaaagtgaggcacagggaggttaaacagcttccacgtgatcatagagctagtcagtgctaaactgcagccagatcccagagtccaccttcttaatcaatacaccctttcctctgctatcgatgggcctgggaatacccatatgctgcactgatgggctgtggtggtggttcttaagtgctgtcttccaagttgttaattctaggcttcagtgtgttaacaaaagatcaaaataaagcatccttttccaaatcattttaagaaagtgtaaaccaagaagtggttagaactgtctatgtggagattatataattgcataaataattcaaatgtcaagcaatacaatttttaggaagtcttctttgaagcctcccactcctaaagctggtttaggtatccttctctaagcttccatgacattctttctatctttgttattgccttaaatcttttctggaacagagagagagattgagagacagaggagaatgagaacaagaagggaataagtttaaaaaaaaaaaaaaagcctagtttttaaaccctctatcgttgtgcttactgcatagcattgtctatttatataagcctttgagtacaataatactatgtcttattcttctannnnnnnnnnnnnnnnnnnnnnnnnnnnnnnnnnnnnnnnnnnnnnnnnnnnnnnnnnnnnnnnnnnnnnnnnnnnnnnnnnnnnnnnnnnnnnnnnnnnnnnnnnnnnnnnnnnnnnnnnnnnnnttactcagatgtttataaatgcacacaatcagtaactggcagagccagggttcaaacccagggctccagtgctgtatgactctaaagctcataattggagaccaaggtagggggatcatttgtggccaggagctccagaccagcctggacagcatagagagaacctgtctctacagaaaaatcaaaaaattggccaggcatggtggtgtacacctgtagtcccagctattggggagcctgaggcagaagaaccacttgagcccaggagtttgaagttacagtgagctatggtcataccactgcactgtagcctaagtgacagaacgagaccctgtctctagaaaaataaaaacaaaaataaaataaagctcctactctttccaacatatggtccctgtccatctcaggaacacacagtctaacaaggggataaaactaattgactccatcacatggaaaccatgatttttgccaagagaagcagaaacaagatgctttcacccttgggagagattctcatctaagaactggcaaggtgggctgaaccttattgaaagtaacctaatgaacattgcataagtgtagaaaggggtcaaagttttgtgtattttgaaaataaaactctgtcctttctaaataggccagtatcgttggtttaaaaacccacacccatgaaacagaaagtctcatacattataagcagaagtttaaattggtacagtctctttggagactaatttggcaatataattcataaatttaaattgcttatatcctttgaactaataatttgaattctagatgtgcgttctacagatatacatacacatatgcacaaagaaatagctaccattgtatttatacttgcattgttcatagtaacaaaactaaatgtccaatagggactgattaaatatattattgtataatcacccatgaaatggaatactatgaagccataaaaaactcggcttttctctatctacttacatgagacttttgccaagataaacattttaattagagaaaaaaaaattgccattcattcaaaaacaacaactaaactgtttctaaatgaattcacaggaaaccagcagcagtggttgcctctgaggagggaaggtataggaaagaggagagagaaacacttttcactgtgtattcatttacatcttttgagtcttttactaagagtctatcttgcctattctaaattaattaattaactatataaagaggattagaagttggatttttattatcaacttctaattttgatataatttcaaatttacaaaaaaggtagacgatactacaagaaacccccttttgttctttatcagttgtttacattttgctctatttgcttcttaatttctctttgtatatttttatatatgtatgtagttattttttgtaaccattggagaataaattggagacatcaggcccctatcattaaataattcagggtgtgtttcttaagaacaaggatcttctcttacataaccacaatacagtgatgaaaatcagaaagtgtaattttgacgcaattctggtttctaattcatagctgatgttcagattttatcagttgtcccaacaatatccttttttttttttttttttttttttgagacggagtctcgctctgctgcccaggctggaatgcagtagtgtgatctcggctcactgcaacctctgcctcctcggttcaagcgattctcctgcctcagcctcccgagtagctgagattacaggcacgtgccaccatgcccaattaatttttgtatttttggtagagatggggtttcaccatgttggccaggctggtctcaaactcctgacttcaggtgatccacccacctcagtctcccaaagtgctgggattacaggtgtgagccaccatgcccagctcattactgacatgattttaatgcccatgtggtcccagatgggtgcagtgaaagtccattcatcttgctcctgtgtccttttgacatgtgcgtttcctactttctggctcaacaagatagtccaagctcattttgtactttccctgttccagtgatagaatccgcttttcttcaaggagccctgagtccttttagttaagaaaaatggtatttccaggcctttatctggtgttactgtttctctaagtggacagagttaggaaatgtgtgtgtgtgcatacctatttcttcctctctccctcttctctctctttgccctgcatatactatgagtttgtactgattcttccaattccaattgagacccatatattctgtgaccttcttctccagcaatgaaaagtctgtctcagaagttgagttggagtagataccatttaattgtatttttctagaataaaagttgctgtttgtatctagattgtgtgaagttgtccacataaagagaagatcgttctgaagataaaacatgaacaagatagatatgtcctctattcctttgcaggtagacaataaacaagtaaacaaaaaacaacttgtgaccggtattacaaaggaaacatacaggtgtggaatgatgggggatagagaaattttgatggataaggaacttgtgtgaaatttaggaaacaaacaggtgtggaatgatggggataggggaatttagatgaataaaggccagtgcacacagtaatcagaggtagatggcatgagatgaaccaatgtctgtgtgtcagattggcttgagattaaagtttcccattgaaaagatttaaggctaggaatgcagagtaagataagatttatattttaagatcatacttgctactgtatggggaacggatggagagtggtttgagcagatcagttaagatgatacctgtgacagtgaagatacctgaggttgcatatttttgctaacaccgttcactatcaaaactcttgctctatataggtgaagaagcatatcttattgttgatttgatttacatttctttatttgtaaggaagaatgagacatttttattgaatttattttagtataactagttttattcctacggttactgtaacaaattaccacaaaccaggggggcttaaaataaagaagtgtattgtctcacagttcagaaaactagaagtccaaattcaaggtgtcagcagagcaataccccccaaaaccgtcaagggagatacccttcctggactcttcctagctgctggcagtggtcgtcaatccttggcttggcttgacttgtggctgcattcttcttctagtctctgcctctgtcattgcacagtgttctccctgtctctcccttcgtggggcatttttctcttttattggtttcaggtccaccctaatgacctcctcctaacttgatttcacctgcaaaaaccctatttccagataaggttacatccacagatactaggggttaggatttcagtgtatcttttgggagaatacagttcaacttatgacagtaatgatgtgtgttttttatttttccaagtgactagcccattttctaacactgtttattgatgtttattgttggtatatttatttactgttttgaaatgtcaccattatcagatacctcacatctgtgacagactcacagccaacatcatactgaatggggaaaagttgaaagcattccccgtgagaactagaacaaaacaagaatgcccacgttcaccacttctattcaacatagtactagaagtcctggccagagcaatcagacaagagaaagaaagaaagagcatccaaattggaaaagaggaagttgaactgttgctgttcaccagagatctgatcatatacctagaaaacccctaagaccctttatcaaaaaagctcctagatctgataaacaaattcagtaaagtctcaggatatgaaatcagtgtacacaaatcagcagcactgctatatactgacaatggccaagtagagaatcaaatcaagaactcagtccctttcacaacagctaaaaaaaacaaaacaaaacaaaaaacaaaaaaacttaggaatatacttaaccaaggaggtgaaagattgcaaggaaaactacaaagcacttgtgaaagaaatattagatggcacaaacaaatggaaacatatcccatgcttatgaatgggaagaatcagtgttgtgaaaatgaccatactgcccaaagcaatctatagatttaatgcaattcctatcaaaataccattatcatttttcacagaactggaaaaaaaatcctaaaattcatatgaaaccaaaaaagagcctgcacccccaaagcaagactaagcaaaaaaaccaaatctgaaggcatgacattacctgacttcaaattatactgtaaggctatagttaccaaaacagcatggtactgctataaaaataggcatgtagaccaatggaacagaacagataacccagaaataaagtcaagtacagccaactgatttttgacaactggggaaaagacaccctattcagtaaatggtgctgggaaaactggcaagccacatgtagaagaatgaaactgggtccttatgcaaaaatcaactcaagatggatcaaagacttaaatctaagacctgaaagcataaaaattatagaagataacatagaaaaactcttctagacattggcttgggcaacgaattcatgactaagaccccaaaagcaaatgcaacaaaaaataaatagatgggacctacttaaactaaaaagcttctgcacagcaaaagaaataatcagcagagtaaaaaataaaaaaataacagatattggcgtagctatggtgaaaaagggaacacttttacactgctagtgagaatgtaaactcaccagtacaacgacaggatggagaattaccatttgattcagtaatcccactactgggtatctacccaaaggaaaagaggtcattaagtgaaacagacacacacacacacacacgtttatagcagtacaatttgcaattgcaaaaatatgaaaccaacctaaatgcccatgaaccaatgagtggataaagaaaatgtggtatagatacaccatggaatactactcggccataaaaaggaacaaaataatgtcttttgtaacaacttgaatggagctggaggccattattctaagtgaagtaactcaggaatggaaagccaaatatcatatgttctcatttgtaagtgggagctaagctatgaggatgcaaaggcacaagaatgatataatggacttcgggaacttgaggggaaagggagggaggtgggcgaggaataaaagaccacataccaggcctggcaccgtggtcacgcctgtaattccagcactttgggaggctgaggctggcagatcacgaggtcaagatattgagaccatcctggccaacatagtgaaaccctgtctctactaaaaatataaaaattagccaggcgtggtggtgagcgcctgtagtcccagctacttgggaggttgaggcaggagaatcgcttgaacccaggaggtggaggttgcagtgagccaagatcatgccactgcactccagcctgggcgacaaagtgagactccgtctcaaaaaaaaaaaaaagagtacatacctggtacggtgtacactgctgcttgggtgacaagtgtaccaaaatcttggaaatcacccctaaagaacttacccatgtaaacaaaacccacctgttccacaaaaactattgaggtaaaaaaaatttaagattttacatataaatgagataatacaaaaaattattttgcttacttttctccaccttttcttcctgtctccttctattttcagcagtgtccattctctttatgtcttttaatatgacctttattactgtggattttttttctctcttctggtttttttcttgagctcttctagctttttatctcttgaaaaaatgattttaaacacaatttctccttttaaatgatgccttctttgatatcttattttagagagctacatttttttttgtattctttgctttcatacagaatgttctttcataatttttctactttgtggttttctttgggggagtggggtattcttggtctgccttttgcctgtcagatgttttacccactacctactttttttttcttttcttctgacatcttatcatgtgccccattctggttcacttcaactgaccgtcttttttcttttttgacggagttttgctctttcacccaggctggagtgaagtggcgcgatctcagctcactgcaacctctgccccctgggttcaagagattctcctgcctcagcctcccaagtagttgggattacaggtatgcgccaccactcccagctaatttttgtatttttagtagagccggcgtttcgccatgttggccaggctggtctcaaactcctgacctcaggtgatccactcacctcagcctcccaaaatgctagggttccaggcgtgagccagtgcgcccggcctaatgattgtcatctttgagtaggtatggttcattctgggttgaaagataaaatgcactgagtttggtggtctgctgctcattccctgtctcaccaactgtctgccctgaaatggcaagaagattgcctaactagaaagcaagttccctatgtatgtctgagacttctgggaggtgatttagcattgcctcttttcatttatcaagatcatctgctgcagagccactgcactttttctcttttgcctcaccactatgacagcctgtttttttttaaaaaaaggaatttctagttatttcttcatttaacctcaccttacatatacttagaagtgtcaaatgggacttattttgttccaaagccacctgcatactgagaccctgacattcttagcaagacttttggtttggctactcaggaactgcaacctacttctggagaactctactccagtgccggagatttggagaggcacatattcagtcttagcaacctgcctcaactaggtctagttttcatagcttttcacaatctttcttcctagattgtggttcagagttgtggctagttttttgtttcatcgtaggcgatgtctttttctgtttttgttattcttgttgattttctgagggtagaaagggggccaagatatcattactttatcctccttaaatggaagacccttgaatggtatttgaagtgatactagactcaaccctagagaactggaatatttagagatcagcagaaaaagaggagtcagcaaaggagactgagaaggaaaaccagagaagcagaaggaaaatgaagagaacgtggctcaaagaagccaatagaagagtgtgttgaggaaatgggagtcagtgtcaaatactgagaaattaagtaagatgagcatagaaaaccaaccagtgaatttagcagtttgggaagtttggtcaaggtttattgaagtgcaggagtggaacctaaattggagttgtctaaggagatagtgaaaggccaaaaaacatggcatgggtagatggacacctctcctgagaaataggaacgttcatggtaacttaagattccatttaaattcaaaaaggaaggaagacaggccaaatcagtgtgattaagcaacacctattcagaaagtgtacgttcctcctcaagtaaatgaataatacttacgaataaggttttgttaataccatacctagtagaccattcacagagaattttcttcctgattataattggttccatatatttcaagaagtcaaccaaggataacactgaattctgttagtgggtgaatctaacttagacgcttcaggagtacatttgagatatggtcatctgaaataaattcctttttctcttctgcctaactcaaatatatttttgtcccttatgttcagtaggttttaagattctgtccagtttccccgtgaaacaactccaattttcctttcctcatttctcctaccattccccccactgagcaccttattgatgtctttaactagaaaagtcttcactgattccttgtttccagtcacatcaaatgtaaactccctcaaatgtaaactccctaagcctggttttcatatcatatcaaatctgacccccatgtacatttccaactgttccccagcattccttaacacagccttctactctgactgggccaaccaccttccggttctccataccccacccctccccacagtatcttccttttctgtggggttgtgcatgtagtctgcctgtgactgatctgaaggagcccctctcatcttgacttcctactatagattgtcctatatataagtgacacatgcaaattaacaaggctactttaaaaaaaaggtttcagaattcctttacagtgaactattgtttgccaatgtcattattatacctttatattttatccattactactcactaattcagaactttttagaacctctttgtttcacttaaaagccagtgaaaatatatgtcccttttaataaatatttttaaacttactagtttaaaaaatcaattgctattaatttatgttaaccatttaggaagttctaaaaaggaaaaaaaaaaggtaacagagcaaagaccataaaactgacgttggaggtagagtattaagagtgactccatagaggacctagtgcttagacttttggagaaggagagggaatctggcaagcacatggggaagaaggaaccaggaaaaggtgtgaggcagaatgaactccatgggcaaaaccatgaagacatggcgctcttgggaactgtaattagctcattaatgagaacaagagcaacagagacagagagaagtggtaggggaggttttggtgggtggaagtgttgttggtagatggaagtcaacagaaacccggaggccagaccctgtatgctcttactcttagtgttcctcactgaaggtggtttattgggataatctttgtcactacagtacatgcttttattaccttacctatcatactatattgttgttatttatgtacaatgctttcctgttctccactccttttttaattcccagggtttgacctggtatctggcacaaagtagatactgaataattataaaagtttgtcatgaaaggtttgcacacagaagtcataggaacaccttccttggtctcttgtaagagatgataacatcctatttgtcatctaggataattagtagttcttcctggaggcaaacagagtaagcgactatattactttagtgcttacttactaccctatggctttccaatgcaaactgaaatttgagttgctgttaaggtgtatattggcaccacctagtggtgatttttaagacccaaccaaattgaaagttttgtatttgataaccaaacttagaatttcaagtaaaatgagcttctaacgttttgtgaattgctgaagcattgtatttaatatcatattctgttaatatttgccactatctttgagttaatagttatgcattcaattattttcttaagacatgagatcttgctgtgttgtccaggctggacccaaactcctgggctcaagtgatccttctgcctcagcatctcaaatagctgggtctgcaagcatgtgccactgtgccaagccatttaattattttatacatggtgcctataggttaatagaaaatattttatttgtaataaaatattattttagagcataatggtctattagtggctctaaaaattatccagtgaaaaagaaggtacatcattggaccaacatggaatcttaaaatagtctaatctcatacataatttgctgtgactcttagttgcagagttcccggctcatgagacattcttctgctgcttttcttcattttttttttttgtttggacagtgcttattcaaaactaaacaatcgtgcccttttgattcttttccttggagatacttgagcatgtactgcaaatttgcaggttaagccagaaaaacttgcgtagtgaatcttagcttattttcgcgagtctttgaacagttgttatatagatattttgcttgtgacttgtagttgactgacagctgagtcagggaattggatttttttttttttaagatggagtctcactctgctgcccaggctgcagtgcagtggtgcgatcttgcctcactgcaacctccgcctcccaggttcaaccgatcctcccgcctcagcctcccaagtagctaggattataagtgtgcaccaccacgccgagctaattttgtatttttggtagagatggagtttcactatgttgcccaggctggtctcaaactcctggtctcaagtaatccacctgccttggcctcccagagtgctgggattataggcaagagccactgcgtctggccagagaattggattatgataattgaattcattcattcctcatgtgtaaggattgttgtgatttcagtagcaatgtttataaaacaaaaatgttatttaaaaatctcccttatgcataacataatcagaagcatactattaatgatcttttttaaaaagtacttattcaatgtccgagggtagaggggtataattatgaccattttacagatgaataagctgaaacacatggaggttaagtagctttcacaaggtatcactgctattgagtttgcaatgtgagcattcaaacccagatgtaaaggactcgaaatcagtgcttttagctgccatgtaaacttcctaacaactgagaggatacatagaaaacccatagtagaaaaatgcactgaaaaccttgaagtagttaataactgttaaaatactctaaatacttgataaaaatcttggtttgaatttattgttgaaattatcaacatctgtttgtttccattcctaattatagccaacagccttcattccagcttaaaggaaatttaaggttcttgctttttggtcccaaatgcttagttatttctcctgctccaccagccatgaagcaagcgtgcttagagacatgctgtctgtgaaccagcattttgcctgtcagggcacaccctttgttcagttcttggacgtgagagagatgtctaccagtatctctcagctggtagagcatgttggtggtaaccacttgttatgtggaaacatctaagctctgggccacatatgtttctatgtgtggattactgtgtaaaaacagtggacatatatgggttttctgaattttatatttaaaaattttcttaaatagacacataaagttgcacaattgcagtcatagcatacctactcaagctttgtattttttttttttttttttgtcctgtggcctcttctcacctgcccatgtggccttcctctttatttctctccttccacataaccctactgtgtgtataaaatgatgcataaaatataacatgtatttgtctatattttttcacacttatgtactcatttataaaatatatctatgtacagatacaaatacgtatgattagatttttaaccctattttatggggaaaaggtagaatcatattatatatactttaaaaatacacatgcctttcaaccagctgtcccattcctgagaatctataccacagaagtaaaagcaccaatctgtaagattatgtatcaagagtgttttctgcagtattgttcatagaaagcaggaaggaacaggaatcgttgaatatataatgatatatcgacaccatggaactttaggcagtcataaaaaaataagtttgatttagagcagaagtgtctcctccaccattctctctgttatggattttactgtttatattaatttactaacattttagtgaggttcaagagggagaaaaaaataaatgtatatgacagtcctctttaaaattgaaaatctgactaagtggatttcaagatctactttaacttctatttcttttcctcctagagctctgagattgtcttcaactctttttagctttttcatcttcttacccttctgtattttggaaacaggaaatcccagcctccaacaagttaaattcttccttcttgcctggcttttaacccctactggtcttttctaccaatggcatctgaaggggcacagcctcaaacattctctacaagttaactcagagccaatgaaacgtcagttcagaaatcattcctaggatatttggacttccttggaaataagagactcacaggacagatacatcatttctccgtaaccacagctacgtcttccttttcttttgcttctgtacagatttgaaaaagggcgcatctatacgttcattggagaagtcgtcgtttctgtgaacccttacaagttgttgaacatctatggaagagacacaattgagcagtataaaggccgtgagctgtatgagagaccgcctcacctttttgctattgcggatgctgcttacaaggctatgaagaggcgatcaaaagacacttgtattgtgatatcaggtaattggaggggatcccctgtatttccaaagtcacaatgtgtttaatttgtttgatactcaagaatccaaacaattgattaaatatttttttaaaggtagaagcctgagcaattctataggagagagaaaagtgatgaacgttaaataccaaattatttatatcatttctgatcatcctctaatcttggttcatttatgaatacatattacacttggatgacttctggccaatttgttagattgagctgacatggaaaatgtttccatctcaaacacataaaagtctggataaaatgtaacaaaattattttaaatagcaaaatgaaaccaacgaaaatgaaatattgaggtgtgaaaaggaagaatcaactcaaaatcagactggtgcttgggaactagtgttgagggacctactgaggcgtgggggccaaaaataagctttcagagctgaggggctgagttattgaagcccaacaaggggggagataggcacgagatagggtacacacctcacatgtttgaggactggagccaaactgcctacgttaaggggagcccttcaaggacccttatgtagtgaaatggggacaggaaaaatatctgttcactgacccaggatggcctctcccaaattgtgggaatttcttcaggtgctaataatacctcacatttgcactggtggttttatgcttttagaaacacttttataatcattattccattttggtgagcaaaacaactctctggtatgtagaacagttatttttctactttatagataagaatattaaaggtcagaggagttaagtaacttagtgttggagttagaaaattatatcctaggactatgttttatttaaaacaaatcacaaaaacagtattactgggttttaaaggggagaataaaaacaattatatgagtgtgtggagtaaaagcaaaacgtttcttcgccttgagtgccttattcttcccaaaattccagcagtaacagctgttaacagtttagtgtttatccttttatacattttctctggatgtgcaaacaaatacagtcataattgcatgtgtaattatattataaatatataattatatatagaattatgtctgttatataactaatttttccatttaataatatatagtaaatatcttttcattggtgtttctatagagctagtgcattctttttaataattgtatagtattccatttaaataattgaatcataatttatccagttatctactgatggatatataatttccagattttagccatgacttacagtacagtctatagaaatgttttaaaagctttgaacattattattatttggttatgttagtattttttagtatttccttaggagaaatttctaccagtggaatttttgagtcagaaggcataagcatttaacatttcgaagatacttcaaaattggttcctttttccccatcccccagcattatcccaattgtcatgctttttctatgataccttgtgtctggagcttgctgttttgttttttcactaaaattactctaaccttaattttttagacgaattattttgtcccctttaagattaaaagaaattctcttatagaaaataagattatatgaatttagttgtaaccactgtttgactcactaccttatttcatttctgctagacttatgagtccctaccaagtactaaaactttagtcttagtttaccacatcagtacctttttcctaagtaaatctttatttgtagtctactcattattttagttttataatagttttattttcttcatcatattcaggtctgttagaaccactaaccatatcaaggcaggacgaaataactcaaaaaagcaaaaaaatgaaacagtgcaacatgtgggattttaaatgcatcaccagtatcagatttttaaattattctattaaaaattagcttactcttggtttaaattattatgttaagccctgaacaatttttccccccaggggaaagtggagctggtaaaacggaagccagtaagtacattatgcagtatattgcggccatcaccaaccccagtcagagagcagaggttgaaaggtaagagcactctaataatggggaggaattcttagcactctgttttctctatggacttggctagacctaaactctaggggttgagcattttgggggtctaaacctatgggctgagcattttttgatgattaagctactttgattctcttaagtgcatattgtctctgtacttttatttatttcactgtatccatttctagatttgtttttaatagaaaaataatactatggtaagctttacctaattatgagaccaaaagaatcattactctgaaacagttgaaagtgttcccatcctggtttattactgttgacttaaatgtggtcagcagagctgttataatttacactggtaggttttattgttcaaactctcacaggttccttgctctttgcaccacatcagggtttttaaaaaactgtgttctgagagaagtgggactctggaaggcagacccatgccttcccatcatcatcattacaacattcagaatccactgacagtggaatttctgaacaagattcattttctttttttctttttttgagatggagtctcgctctgtggcccaggctggagtgcagtggcgcgatctcagctcactgcaagctccgcctcccgggttcatgccattctcctgcctcagcttcccgagtagctgggactacaggcaccggccactgcgcccggctaatttttttgtgtttttagtagagacggggtttcactgtggtctcgatctcctgacctcgtgacccgtccgcctcggtctcccaaagtgctaggattacaggcatgtgccaccgcgcccggccgaacaggattcattttctaaaaggatttcatgccatactgtgctattgctcatgggaagatgagtaataaagctgatctctactgtctggggcccagcatttaggggagcagctggcacatagtatttgcttaacaaatacttaagggatgaatggatgatagctataaagcaacaagactcactttcttatgtggtgcagcctttttgaagagagaaactgttttcctaattggttacttcaaagctcagtactaatttagtaaagagtcccacctcatctacacataacaatcttcagttttataaataggaagaaaggatattgggttgatgtaaaagaagagaacttacacttcactaccctgcgtagcctttcttcttttcatcatattgggctgcattgctgggccaggagaggcatttttcttaattgtaacatatccctccttcttactctgactttacaatctagtttgacaaggacagggatatgtgtaaattttcttaatttccttaggagctcaggagagcaactagatgagaaataaattaatttcacacctacaatagtagagtaaggcatatataaatttactagtctttcacaaacatatcttatcacaagcagtttccccccacacacatatttttaaaatatgctttcatttatgaggcgataaggttgaactctccagtattagcgggagtaacagtagatcttctacatcaagttatttcagaggccaaagttatttctgcaggtatgcctgtataagaagaattttatcagtggaatgaaaacaaggatatagcatgaagtttaaaatgtatccattgggagggactgctgtatagaaagttagcattcgtcgaataaagaatgcattaaatggctggtacaaaggagaaattccatacagcttcaaagaaaataatgagcaatttctgaactagtgaagattaaatttatgatgtataactaagtacaataaaatgtcacaattccaggttttataagcaagtgccttaaaaattgtatcattttctgtatcacctattctttcccttttcagaacacatctttttaaaaattttctttatgtagataaaatatgtacatttataaaatgaaaaacaaaaattacagaattaagttgaagatgtaaaagttccctgaaatcctaccttgcccattccatcagtctcctgtctagataaccatagtaaggtgtgctgatccctccagatttttaagcatttgctgatacatgtgtatgcacacacacacacacgtgaacatacacatacacacacaaggatcctgcaatgcatgttatttgacaacttgattttatattcattaatatatgctggacatttccatgtgagtacatattgatgtacctcattctttttagcacctgtatagtatttcattatattgggaaacaaaaatttatttttatccctattggtggacattaatttgtttgttttttttttgatattgcaaacagtgctggagttagcatctttgtataaatatttgtatgtggtttagcaaaatccagtttttaaaaaattctagtctctataagtttttataatgactttcatttatctgtgttaaagagtgaagaatatgttgcttaagtccaactgtgttttggaagcttttggaaatgccaaaaccaaccgtaatgacaactcaagcaggtttggaaaatacatggatatcaactttgacttcaagggtgaccctattggtgggcatatcaataactacttactagaaaaggtaaaatatgcttaatttctgagggtaatgttttaagtgctgaatgtttaaacaaattatatttatagaatttattttattgactcaaaatagctttaaatcctattctcccttcttcattagctttttatgataagatattctccttttgtcttctcttcttagcacttacactgtcaagttggaaaaagttgtggactttgtagatagatttagccatgcgtgtgaatgggtgggggcacaggtatgagtgtgtgccagcttctgggtaaggtttaaccgaaagtcaatctaagactaatcagttctagcctttttatacatcaccatcttctatacattttaattttaattaatttgatatctcattttcttctagtttctatttgttcattgctttatagtaacatatatgtattttgtgatcttacatcctaattatgaagcgaactgtatttggtcagtaaaaacttaaaataggcccaatttctagaggattccaattagaattttcttcttgggaccaccagagaggttgtgtctggtttggttttgtgttttttgagacagagtctcactctgtcatccaggctggagtgcagtagcatgaacatggctcactgcagcctcaaccccccaggctcaagcaatcctcccacctcagcctcctgagtagctgggaccacaggcatggcccaccatacccagcaattttttttttattttgtagagatggggtctccctgtgttgcccaggctggtctcaaactcttaggctcaagcagccctcctgcttcagtctcccaaagtgctgggattacaggcatgagctgctgcacccagctggttgtgtcttaactaatcttgattatcagtggacatgactgcaagagaatacatagagttcatttttacagttaagcttgtgctttataaaatcaagtctccaccttgaattcacacagatctaagccgacaggttttctcagttaagggtttcctatcccagttaggccatagcatcctttatggccatataatgaagtataatctttatttttgtttgttatattgaagtcggactgttaaggaaataaatgtattatcagagtcagttgaaaaaggacaggaaatgccaggtattattatcagtcctttttccagaatgtttcatcagttcactttatgtgtaatacatattcaatcaaaaggatccttttgaatgaactcatattttgaaccctctcctaacagcagtatttttggaaccatctaaggcagaggtctctatggattgatcttgctcaactgacttttattacaggatataaggcattgctctttgaaatgccagcagaccctggggaaaggaatgttgagaatattcctccctaagcattccttcctattctccccacttctaattcttaccccacccccaaccaccaaattccatctttaggctccaggttaaaaaaatcaaaatagcttcattcttcagaaagttttagggacctctgttttaagcaataaaaagaattatcaaagaattgcaggggaaaccccatagagaagactcattcttagatgagtatacaatccatgggggtctttaggatatttaactgatttgggagaggtcggataaagaaaaaggagcattaaccttgactatgcctttagctccagccgcctctttaagaggaaattgttgggcaggtgggggaaggctagtcatggaacgaaactgtaagccagatcgggtgtgaggaggggaggtgataaaaggattatagggtgggagagcacaggctgaggaagaattgggacctggctcagcctggcaaggcacagcctggggaggaggggagaggtcctgtagaaaaggaggattcagaggactcagagcttggggtggagactaaaggaacagacaggagagaaagaagaaagatatgggacaagtcgcattgggagcagagactagggagggaccgatgtgtaaaagaatgcctggacgtcaggcatctcagatcatttgcccattgtacgacaataattgtctagaccttgtaggatggagaaatttaaagtgctgttttctggctgtttggaaccattgttgagtttgtattggggtcaagtggtattgcagaagaaaataaggtgtttaggttttaggtcaggtgtgagttgaagaggttttaagttcttgagaacacaggctaagggagaagaaggaggaatggagggtggaaggttgaccatagtggaggaggcaagcccagagaaaagagagggtagagacatgggccggggtcggggggtgggggtagggagtggggtggggttggtacttgccacccaggaaagtggtgcttgccaccaaggtgaaggatcaaggcaagtgtccccacagtgatcagacaccaatggagtgtgggtgaataatcaggcaggcgtccctgcagtgattaaacaccaagggaagactgtcttcccgaatccgtgaccggtgctgaagttttgtgttcacagataaaacacgtctcctctgtctctaccagaaaaggaaaggaactgaaattaagggaagggggagattgaagggtggcgccgaaattgaaaggagaaagaggttgagggatagtaagagaggttggagaagagagtaaaaagaggccgcttacctgatttaaaattggtgagatgttccttgggctggttggtctgaggacttgaggtcgtaagtcagtctttctcacagagcaaagagcaggaggacaggggattgatctcccaagggagctcccccgatccaagtcacggcaccaaatgtcattagttaaggcaagaatctgccattttcacttcttatgtgattcttcagttgcttcaggccatctggatgtatacgtgcaggcttgggctcagaggcctgacagttccctaagaaagtggctcctgttttattttaggggcacattttcgggttaaccattttaatgtgttttttcttagtctcgagtgattgtgcaacagccaggagaaagaagctttcattctttctatcaggttagtaatccattatacagataattgatcatttgcccagttgtgcaggaaatgagtatttgtgtcttgggctttcccctgtcctatgcatcactcatctccattggccccgtaacatgtcacgcatgcacgcacgcacgcacgcaccacatgccctgccctacctgcttaagagattggatgaacatgactgttccacccagctggcaggagcttagccaaccagatgactgccttgggtgagcatcccccatattttcttgcagtacagataacactttaatgactgtgaaagcttttgaaatggtacattctaaatgttaaattaatttttgttttattttgaattgaagctgttgtttccatatttgggagttctagagatcagaatacaaattcagtttgtttcactcatacacactaaaagcaatatgattacttttaaaaaaacaatctggatttataacttctagggagaattgcctttttaatccatcaagtttagaaaaaaatttgagtatttattttcaagagtgcttttagattttaaagcaaaatcttttaaatagccttcctgttggcaagtctttacacttagaaaacaagtatgatatattattgtaagtttttaaagcccaaattaatgtaaatcaaggttaacagaaagtaactgaacggtgacaatacaattggatgcaattcagtcgaattcagtttcttctaggtaactgctttaatagacactactcatttgtatatataagttctggtatattaagtttaaaaatcaatttttaaaatctgataattagactttttaagtaaacaaaagcatacagtttaatttagagaatttaaacctaataccttccaaaaacatgctctatataaaagcactgtcaatattgtgtttatggttctgttggcaatttgccatgttttaaataagctatttttctaccaaatataaaagagttctgtttatttcaataacctgtaactttttcccagtgttcttcccacttgggtgaaagtattaaaatttatctttatccaatactacaatcatggttccccagctgtcctcttttcctgagaggtacagattgatgaggaaaagctgtttgtttccagtgtgattcagcatatgactgtctgctgatgtttcttacttccgtagcaatattgactttttctaaattctgagacagaactatatcctgtctatagtgaggctgctaagcaagcaaccaccacagagcataggatcctgttttacaaatgacggcattcaaagcaagaaacttttatgccagttatattgtaaatgagatgagacattttcagagtaattttctttatgactgcataacattctctgtaactgatgacattgaagccatttaccttgaatgtttaaaaaaacaaacaagcaaaacttcaaagctagaaacaggaagacataagtgaattaagcccagaaaatgaataaaagctagattaccactaagttcatgtttggttcaatgtatgtctggccaatttatttctaattaaatatttttcagctactccaaggaggttcagaacaaatgctacgctctctacatctccagaaatccctttcatcctacaactatattcatgtgggagctcaattaaaggtgagaatttcctctttgagattgctccaatagaaaatcagtcaaaggattagaagagacattcaataattatctggtcaagcctgctatctttaggcaaataaacatctcttttatcctgttctattttttaaattctcaaggacagagattcagcacatttttgaatcaacaactttgcttaaaatcaattatgatattttatcaccatctgacaggaaagaagttttttcctacattcaatgttttattttaatttttaatcctatccctattccgtttattttcacactataaaaatattgataggactaggaagcctacctcctaagaagattccatatgatttggccaaaggcaagttagtaagacaaaattaaaatgcactttgattctccactcactgtttgttcaaatgttgattttgatgtaccctagaaataattttgtgacctttgaggcattcctattcagctttcaagtttttccattttttctcttttcttgcatgcaagcacttgcatacacttacatgcaggcgtatttttgctcttttatttctagttcattttatttctagttcatctagtaattttacaactaattataataatagtttgttgataatagttacactattatcctatttcgtaggagggaaggtatataaatgcatataataagatatggtaggatatagatcacagtattaattatttattctagatgggtgagattatggatatttgtgttctgtttttccttatttaaaaaaattctacatcaaaaacttactgctttcatatttgggggagaaataaaagaaactgtaaaggaaaaagatctaagatatgggagctatttctttaaaaaattctattaatcaaaataagctaattatacctgcattattggtttagctgtatttttattgctgtgcatagaaattaatgatattttggtttttgcaattaattttccattatttgacatttaggttacaacaactttacttttatggtcatctgagagcgagcaggatgtttggctgaaaatgaattaaaaacaaaaaacagtagagggcaacactccacctctctgagaactagccagaggcacttaaagaattgtgaaatcaacacctggaaagccagtgactgggaatgtttgttttcaaattgtcttatcgactaagttacttttgaccaagtcgtgtagagtccccacagaaagcaagtattaaattaatagccttttttctaggttaaatttagcttagattccctttttatcaaaaatttccatgtctgctttccccacctttttttttttgcttcctaagaaaacaaagaactaataaatgatcatagtcaaaacctaaactatgaaccaaaaggaaacaaaaatacactaaatcttaccatacagaaatgattattgataatggtttgcatctatatttataaatggaatcatacaataaatcctaattaaataaacctgtttttattataatctttccatgcaaacaaatataaattaatataataatttttataactattaagtattgcactgtgtgtatcttaaccagttctaaaatgcaggagtcatatacagttaagatattttgggttgcaagtaggagaagacccaattaaaagtctccaaaaacaataagaaacttaattatctagcataacaagaaactctgagataggacaattccagaattagttagttcattgccttaacaatgttgtcagggacccaggtgtttttttggttgtttccccaacttacaactctgccacactcatggacagctctgtcctcttaggctggttttccttttagtcccaaaatgtcatcagaatttccaggagtcacctgcaaaggagatgttcatggcatatgtcctttataagctagggaaacctccccaagaaccctcctccactcatcccccataaacactttccctcatgttgtattgatcagaatggcatcccatgcctgtggctaaccagtcatttagtaagggaaataagatcactctgatgagtttagaccagtgaagatttacctcttgaggctaggtagatgccagtcacaaaggacatgcacacttagagaggagtaaacaaatcagggttcgattggcaagaaagaaatgagggtagaggatggctgttaggtaagcagccaacagttccccacagtaggacatttagattttatccagttactttccaacttcaacatggttgcagtttataataatagtaatatctgatactgctgagtggtttttttttgtatgctggtgctagagaggtgctttatataaattttcattcaattctgacaaccaccctgtaagatatatgttattatgcccattttatttgtgaggaagttgaggttcaatgaggttaagtatcttgtccaaggtaaaaacaaaaacctaggaggaggaggggctggcctggttgtctcctggacactagaggaacttgtactcaccaggcagagaggtccccttccagggcccttcctcaacaagtgagcatcaggccaggtctctgtatccaaacaagaggagaaacttactgaggaaagaattggtcaagcctctgcggctgctgctgtggtaaaactaatataagcagttactattgctttattgcgaatttctgtttacgcacttgtatttccaatgtgatggccacagctctaaaagggcaggcgattcatctttgagctgcctgtaccagttagtagagctgacttgtgaaatgcgtatcaagtgagtgaaagaatgaagttatagtcccagactatttaatagcttactaaatgactgaggctggctgttttgcttttgagggcccgccttgcctcacctggaaaataaaccgcctgattatacgagagtgaagtgttgttgccagcctaaataagacaattgtggaacaaagagccacaaacaacagtagccaagcatgtatcttggaggctcccacattcagcacttgcatttgtgatctcacatccatgctgttgccttcactgatcatggagtgggggatcagcttgtctgagccagctcaggacttgctccctcactgaaggttccagaaaacggcacagtgcttattttaggtgatggctttcacgcacaagtgggctttgtacgtgctgaataatgttgcaactcgtgaaatcatttttattttctctggagactcaccatcccctcaagtgatttactatgaaggcaaaaccttggtataacttagttttataattgttgaattttaatgctcataggaaatatctgtaacttcagtttttcattttcatccccagtcttctatcaatgatgctgccgaattcagagttgttgctgatgccatgaaagtcattggcttcaaacctgaggagatccaaacagtgtataagattttggctgctattctgcacttggtgagtagggacacctctcagaatgtattgtcttctgctgagaacaggatgctttctcagaagattttgttttttccctgtagatttaaaaagtattcagagaaaattttgtacgtattttgaagaaattactatgtctgtggttcttgccatcattttataatattatgagggattttccaagctactatagggttggagactactacttcagttgattgtcttactggtattgtcaaactttgaactggttaattttaaggataaaggaattcagcagtgatgtgactactagtggtataaatttctagtggcatttgaaacatagaatcataggttatcggaactggatttttaatcatctcattttacagattgggaaatagccctgatgggtggcatgactacctcaaaggcacagccagctcatcccagagccaacaccatagaccacttttgggccacttgtttcccactataccacaccaaacttagaagtgaagaactgtgtgttagatttctttcattaacatttatataattagagatacttaaaatacactgaacatataatcttacaataagaatgacaacatggattcaaatctggaataaaaattacttttcacttaatatagcaagatttaactctaaatgaatcagaaatgtgcaggatctttatgaaaaatattatatagcaatataaacaataaatgttcctgactaggaagactttagtattataaattgtctcatctgtttgaatcagtttttaaatacagtgcagcagtccttttcagaatccaaacaagaattttattttttgttgttttttttttgttttgttttctttttgagatggaatctcgctctgtcacccaggctggagtgcagtggtgcaatctaggctcactgcaagctccacctcccgagttcataccattctcctgcctcagcctcctgagtagctgggactacaggcgcctgccaccacgcctggctaattttttttatttttagtagagacggggtttcaccatagccaggacagtctcgatctcctgacctcgtgatctgcccatctcagcctcccaaagttctgggattacaggcgtgagccactgtgcctggcctttattttgtttttaacttgacctgttgattctagaatttacctggaaaaagatcaaataaagtatattaaagaagtgtcgtatagggtagggtaagggaggagagggaacatgactagttctaccaaacttaaaatgatagtaaaagctagagtactttataactttgcacaagttcagcaccagatcaacagattaatcaactgattggttaatgtgctggacatttggtagatggttataagtatgtattgcttattgaatgagtggaatataaatagactcaaacacttgaggagatttaacatattaaaaaggtgacatttcagctgggcggggttgctcacacctgtaatcccagcactttggaaagtttgaggtggacagattgcttgaacccaggagttccaagaccagcctgggcaacatggcaaaaccccatctatacaaaaatacaaaaattagccaggcatggtggcacgcatctgtagtcccagctatttagaggggctgggggtggaaggatcgcttaagcctgggacgttgaggctgcagtgagccatggtgcaccactgcattccagcctgggtgacagaccctgtctcaaaaaaaaggtgacatttcaaatcagaaaaagctagactgttcaataagtcccgttagagcaactaatcatgtgaaaaataaagttagattcttacttgataccatgtaccaaaatcaattgtggatggattaaaaagtttaaggaaaaaggccaggcgcggtggctcacgcctgtaatcccagcactttgggaggccgaggtgggtggatcatgaggtcaggaggtcgagaccatcctagctaacatggtgaaaccctgtctctactaaaaatacaaaaaattagctgggcgtggtgtcaggcacctgtagtcccagctattcaggaggctgaggcaggagaatggcgtgaacccaggaggcagagcttgcagtgagccaagatcgcaccacttgcactccagcctgggcgacagagcgagactctgtctcaaaaataaataaataaataaaataaaaagtttaaggaaaacaaaaactataaaagcattagaggaaagcatcaaatgctcataaaccctttggagtaggaatggtctaagtatgacaccaaagaaagagagaccctaaggcaaaagattcatagattcgattacataaaaatgtaaaacttttatctatcaaaaacatacactgaaagcaaaaagatagatgagtgtccggagaaagggaaaaagtagatgaaacactgtttttatatgttgagatgtataatgtatttaggaaaataggtacaaacaaggtcacctgaattgtattttatattggcaaatatatccttgacataatgtttcataatgtgttatttttttcacttttgatacagggaaatttaaaatttgtagtagatggtgacacgcctcttattgagaatggcaaagtagtatctatcatagcagaattgctctctactaagacagatatggttgagaaagcccttctttaccggactgtggccacaggccgtgacatcattgacaagcagcacacagaacaagaggccagctacggcagagacgcctttgccaaggtgagagtgtaactgaccctatgtcacctggtgttgatcgcagttgcaaattgagtgaaatcctgtgagcatgtattcagacattcttgaaagagggttaaggcttttagaaaccataatgatactttctggccatacaagcctcggtaaaactcccagatgtaagtaagcatcactgccaaaaaaggttctgagaagagtggaagctgactgggggtggcgctcatgagggcttcacgtgctgcttctctcactcaataatgcttcgccagagtcaactgactgagctctgatccattttttttaagttttatttatttttaattgacaataattgtatatgtttatgggtacagtgggatatttcaggacatgtacacattatggaatgatcagatcagactaattagcatacctcttacctcacctacttaccatttatttgtggtgagaacatttaaaatccactcttagcaatttgaaacaatattattagtattattattaacagtcaccacgctttgcagtggatcaccacaaattattcttcctgtctaactgaaactttaccctttgactaacgtctcacactttctccatccaccccgctcctctagcctctggtaatcaccattctattctctgcttctatgagtttgactttttcagattgcatataggtgagatcacacaatatttgtctttttgtgcctggcttatttcacttagcataatgtcctccagggctgtgtactaagcctgcagtgatagtaccacaatttatttaaccaccttactcttaagtcacccactttacttcccttttttgcaactgcaaacaatgctgcacgtctttatacatctatgcttatatactagtgcttttgtttcagctggatggattcccaggagtgagcttgccaggtcaaagggtatacttattttatttttattttttgagacggagtcttgctctgccatccaggctggagtgcagtggcacaatcttggctcactgcaacctccacctcccgggttcaagtgattctcctgtctcagcctcccaagtagctgggattacaggagtgtgccaccacgcccagctaatttttgtatttttagtagagacaaggtttcaccatgttgaccaggctggtctcggactcctgacctcaagcgatctacctgccttggcctcccaaagtgctgggattacaggcgtgagccaccgcacctgccatatatttattttaaactttaaatttactgattttatggctgcatggtaatattttattgttacttttatttcattactagtatatttgagcatcttatcatatttttgtagagtattttaacatattctaagaattgcctgggtatatcttttgtgcatttttctttggagctgttatctttttattgtcaatttctaagtgttcttagcatatcataaactttaaccctttgttatctgtgtggcaagcgttgtattttctcacgtctaactttcgttgttgttgttttgctggttgattagtttactgtctatttcattttttactcttgtaagtcttaggcttggtttttagttttgggggaatttgaatttttcctaagtgcaatggagagcaatagggaggactttaaggaggggcaatgacatcaagtttgcctttttttttttttgagatggagtctcgctttgttgcccaagctggagtgcagtggcacaatctcagctcactgcaagctctgccttcgggttcatgccattctcctgcctcagcctcccaagtagctggaactacaggcgaccgccaccacgcccagctaattttttatatttttagtagagacagggtttcaccatgttagccaggatggtctccatctcctgaccttgtgatccaccctcctcggcctcccaaagtgctgggattaggtgtgagccaccgcacccggccgtttttttgtcttttttttttttcttttttttttgagacggtgtctctctgtcacccaggctggagtgcaatggtatgatctcagctcactgcaacctccacctcccgggttcaagcaattctcctgcctcagcctcctgagtagctaggattacaggcacccgccaccatgcctggctaatttttgtatttttagtagagatggggtctcatcatgttggccaggctggtctcaaactcctgacctcaggtgatctgcccacctcagcttcccagagtgttgggattacaggcatgagccactgcacctggcaagtttgcatttttaaaatgatcactctggccttagtatggagaatgttatgggggctagagtaagaatggaagcaaagaggtcaattaaggggatattttgttaatccaggaaagagatgagggcagcttgaatcagaaaggtgaaagtacaaatggggagaggaggatgatttgaaatggactgtgttgagaaaataaaatccataggacctattatgtggagaatgagagaagcaagaataatactttaacatggtctggctccagcccacctctcccacctcattttatactatacccagcccccctttcttcagcccagcacattagtcttctctcagtcctcacagattatcctgatccctttctccttccagtcacagggcctgtgcacatctgttccctctgcttggactgctcttctctcctctcttgcttggctacctcttactcatccttctggtctcaagtatcactttcccagagaggccttccctaaccttcctgagcactgcatagattaaatttccctaagaccccatgtacctctcctttagtgtggatgtttatctgcgaggtggggggcaagtgagagagacagagagaataattttttccttcactctattccctaagtttcttggacattgagaccatgtttgtgtttgcctagacctgtatctctaacaaactatatataataagtattcggcaaatatttgttgaataaatcagtgaatttctaagtggtgctatttatttgtggctaaaagtaggataggaacagttgttggaagaggaaagatcaagagtcctttgagtttgagatggctgtgagccattgaagagtcagtgtcaggtagacagtcaagctcttgagtcaggagctcagagactgttctctgagtctggatttggataatacttttgggagtcatattatatttgtattatttaatcctgggtgagatgatttagaaggtgctagagagtgaagagaagaggaccaggaagaactccaacttttacaagtcaggtagaagaggagactctaccaaaggtcaccaaaaaggaacatccagtgaacaaagagtaaaattcagaaaggctattatccgaaatccagagagaagagtgttccaagaaggcagtgaaaacctaggttgagtgatgctgagcgacagagcaagatgtccatatgaggtacgagaagtatctatgtagaggtgctgggagtctttgatgagccatttcaatggagtaataggatgtaagtggagactggagtggattgaagagtaaaggggaggtaatggatatgggtgaagagagtgggtagctggcaggagacgttaaggaaggttttctaacgatgtgacgttgcagagcacatgtgtatcgggatgtgaatgtgtgttagcgtgtggcacctttgtccatgtgtggcttagtgtgtgtgttcttgtgcattggatgtgtgttcgattctcagggaatttcaacccttgatctttggctcagatcttcatttagcattagaaatcaatatttatattttttagaattcatatagctttagtggatcatagatattaactcactagctctcaactctttatagttgatgaaattaataataaagcaatgaactggcttattcaagggatcaggcaaactattgatatagccgggcagggaaacatgcctggagagtgtcgttggaattggtataatgaccggtaataatcttttaaaaatacaagctatttactttagttttgcatacatcaggtagtttgggtttttttaaatggacagtctacattttcatttgttctgctgaggccagtaatggctatgctaaacagtgagaaggtggacaggaatttaaaactgatcacaaatccaaacagaggactcattcccaaattggcaagcatttatgatgctattttccttgcaggcaatatatgagcgccttttttgttggatcgttactcgcatcaatgatattattgaggtcaagaactatgacaccacaatccatgggaaaaacactgttattggtgtcttggatatctatggctttgaaatctttgacaacaacaggtaaactggaaaagatacttaaaaccttgttgcctgttttctatttgttgaaacttaatttattccttttcttgtagttttgaacaattctgtatcaattactgcaatgagaaactgcagcagctatttattcagctggttctgaagcaagaacaagaggaataccagcgggaagggatcccctggaaacatgtgagtggactcttatggaaaatgccttcatgtgtttctcatattattgataatgtcaaattttattttaggtatttcttgatcttttgggggtatttgaaacatctgaaccttagctttcctttttgggatatgtaaatacaattaatttcatcatttttaggtgggattgctataatttgatagactgccttgttgatgcccagaacatcctgagttagaaccagtaaacctgttttcactttatggctgctaccacgtggacttactggtttatatctgtctgttaggtttagcatactttattaagttataccttaaattggctgaactttgcttcagaatctagtttcttcttccctttttcctcctttttctcctcttctactttgtagactatatggtattttattgtcttcagttaatgttgtttatattctctgaaacctacacattaaaatacttgttttactttgcattttcttgtgtattacacttcaattatcacctctactctaatcaatctttgggaacttttgtatttgtcagaggcaaactaatctggtaagatatagctggaaagtataatgggtgcacagtgcaaaccacagagatcaaagctaaaaggcatgacttgtttggtttttaaatttcctgtgataagaccttctgtttatgatagaaatgagacatagtaatttttcttgtaagtttgtatttttaagcaattttgagaataaacttgaaaaatacaaaaacttttaagtttctgtagtttgagtttatatgattgttcatcctcttgccagagaatagaaatgaagccagtatttgttttttgttatccaatataatagcagcaaaaaaatatttgaaatactatatttaaatgacttttatcttccttcctacctattttctatttcctctcattctgaaataaagagacaatgatataacaaatagctttcccgcctcaaaattgtatctgccttccatcatgtgttaaacgttagaataccataaaacagttgctcaggtatattggcataaattttacctatctgcatataaaccaaagggctattttatataagaattatctatagtttgacttaaataatgaactctcctaatacaattaaaatttaattcagttcaattaagtgtatatgaagctttctaagaatgaaactgttgtataatataatacacggtataactgaagcttggatttttaataccaaatttaatcataaaacttgttattcaaatgtgattccaaggtactagtcaaaaatatcctttcacaatcagaatatcaaatttcacagacataattgacaacagggtaagtaatgcagtggactgttccaaacatctcaaaaagaattaagaatcccaaaatgcaaaaaattttcgctaaataaaccaagaactatttgtcctagagggagcagaaggctaactccaaggtaacagttacttactacatggcagatccccccacaattagaatctctattctgggtaaaaccccaaacttctaaacatagtgattctttttaaaagattttttattatggaaaattttaaacacacattaagaagacagactatagtacagtaaaccctatatacccatcacctggctttaacacgtaccagttgattgccagtcttatgccatctgtactatacccacctactcccagattattttgaagcaaatttcagatatcacattatttcatctattcaattgggtatctattcagtaaatatttccatgtatttctctaagagagttttacaaaaaccataatcacaatgccattatcatacctaaaacattaacaaaaattccttaatatcataaaatatccagtcagtatacatgtttcatatttccttaattgtcttctggttgttgttttgcaggttaaatttggatccaaataagtttcttacattatgattgattgataggtctcttgcatatctatagattttctccatgtttctttttttccttgaatgatctctctttgcaatcttgtgttgaagagaatgagtcatttgttatggagttccccacagtctggattttgctaattgcattcctcaggtgccatttaatatgtttctctgtttcttgtatgtcctgtatattggttgttagatctagagtcttgactggattcagagtcagtttttttccacagcccatttcatagactgtgtgtgaacttccaccaggaggttcataatgtctggttatctggtacattcacttttaaaagctttcgatgctgtagtttgcaaatcattttatctattgagaacttgatactcaagcacaaagctgttttatctggagtgggtatgaaaggccagagccccatgtccctaagctaccccatcacaagtcttctggctcctggtatcccttaggaaaccttacgggaatgccaagttgctggaagaacttagtttgaaaactactggtttaagcaatgtttgaagcagtattaaacttacaaactgaaagttactagcagagaccaatagcttttaataatataattgggattttagggaaggtaattctttagtccctgggacaaaagacttcgtctttaatttcacagtcccgaagtctaagatgtcaactattaatatagagctcctgctttttgagtatttttaggattttttttccaaagatggaaataacttttctccctaattagaaatgtaataaatgcccataatgaaagtaaatatttagacctacactgcttcacctcagtactactgagattttgtgccagatagttctttgttgtggaggctgttctatgcattgtaggatgtttagcagcacccctggcctctacccaccaaatgacagtagcacccctaccccattttgactagaaatgtctcctgatattgccaaatgtcccctggtgagcaaaattccccctattcccctatttgagaaactttagtttagacagatcagaaaagtataaaaaacaaagtaaaaactacccagtttacaggtttcagtccataagatacagaagagaacatgcaagactagaaatggagctaaaagccatgtacaaataactggcataaaaccttggattttaaagcatgaaatgggaatacatgagtcacttgaatggtctattatgagtatatagaccttatagaaggtaatggagacagcaatcagtttaggtaactcctgcgtaagatgggacatagcaagattaaactgtgtgatcataagctgcccctctttgagatgtgcagcttgcctgagttggcctttctttgtgtgccttctgtgtgtagtgataggtacattgcaggctgtcagaataaacaggtgtggcagaggattgttggacaaaccttgtacatgtatagttgctgaaaagccagaagttatttataacttcattcaccttgtggaagtaaaggaaaagctttttcttatcttttatagatatttatttctcagaattaaattctttatattatgcctagaaaaatgtaaaaattctactgaattttttcaaattgttcaaaattctattgaagctttttaactttggggaaaccaaaagaaatgctcttttggattttagtcattcagggtcatgtaactaaaaatgcaagttcttttttttttttttccgttttaagtggagtttatttaacactaagagataaagggttgttaacaaacacaatgacaaatggacatctgattgggatgaggcattatcctgtacacataatgttgatatttttgtgtaccctcagtgcatggcatttacacatagagccactactgcacagcacaagagtatctgaagaggctgaatcagagtaaggctgtttaaaagactgaaattttttagtatatatattctgcatgaaaacagaacttttgaactggcaggtagaaggcaactctgccaaacactacagttaaagcccccactttagtgcacagttccaccccttccatctgcatgcgtgacacattaacagtatttaaaggtaaacgaggcactttgtggcaactgcagccatcgttatgaacatattgcacaaaatttctagaactaaacatttaacttgtaccctacttttataaaattgcaagttttgtgtagtaccttaactttattatgaagtagtatatcagataatactttaaggttatttgttggccctttgtggaaggtggaccttacagttaatggcaggcagattggtatgaaggagtagggttgggtgtgggatctggaggcaggattaaaatgagtttgtaatgggagaaatggtgtctaccttattatctttgccttgggctgtactaatctcagacggtgtatttcatgatagaaagttaacaaaggaatttaaaaataaacctctgttagaatgtgtactctttttagcgtaagacctctttaatgttattcacacatttgacaccaaagtagttttacctgaactcctgatacaaatgggggcatcagggtttaacctggcctggtcactgttctcttcagaattccctccttgctgtgtcctacagattgactacttcaacaatcagatcattgttgacctcgtggagcaacagcacaaagggatcattgcaatccttgatgatgcttgcatgaatgtcggcaaagtcaccgatgaaatgtttcttgaagcacttaacagtaaattgggcaaacacgcccatttttccagccgaaaggtaatgtgtttaatgacaccttcttccttttatctgtgaggttctccttattgtttgatggagttcaacgactttatatgttgggataaaagaatgtcccctttaataagaaagaaaagtcataaacattcattaaatgatttgttgctgtggataaattctgcctctctggtttatagtatgaagaaattgataaaatcatgttaatccaggagagggagctccagactatgcaatttggtagaaacaggaaaaatgagcatgattctttagaaagcatgatgtcatttgtaaccaatagatgtagagtccttgctcatgtgctagaattttactcctgcatctgataattctggcatggaaaatagcttttgtccttgactttttactgtaatcctcagtaacaaaatgtgttgtgcactctgctgtacttcttcagatcatatgacttccttgaaaacagagagattctagttgtaattctagttattacagagaaacttattcattaaataaatgggtatccttttaactctccatttttcaggatctaaaaaagtgataaacagatctgtagtaattggtgacaattgtgcttatcagacctttgtgctgatatggacatatcatttgcatggaatattccatttgcatggaatatgtttgctattaatatttgttcaagaaatttgtgttagaagaggaacacatcatcatcgcccctgagacttccctacccatagtcttgtctagtaaccatatgctaaagggaaaacaggcccttgctccttcacatccatagaaaaagggggcaaacatttctgcctctccagagttccatgtaaatctctgacactgccattttttagtgtgaataaagtctattttctaacttatctcctttgaaattatgtaatcagaacagagaaattccacaattaactagctaaagcccaaatcgtcaagaaatagattactagctgacatttattttaggccagttttttctaaaatattctccttggtctgttactgaggattgatagtaaccctactacaaattggctttcagatactacagtctgctctttcatgttagggttttgggttagaggtactgcttcagtcattccctatttacaccacaaatacctaataagtgcttctcatcttccaggtgcaatcctaggtgctggggacagagtactgggcaaagttagaagtcacctaaataatttagagtgatgcttttaaagatggcatgattacatgggcaaatgtcctatctttgagggaaagtttataaatgccctttataatcacagttcaggtttggagactcacttagcacggtgcctaccagatggtagacatttaatcagtgtttgtaaagttgaattgaattgttcccaatcatgtcaaataaatcttatttaaattttcatttaaattagctatgagtctcacatgagaaatcaaatccacctcattttgatatcttctaccttggccatttatatacctgaattaaatgtgtcaaccaaatattttgaaatataatatcattccttttttttttttttcttttgagatggagtctcactctgttgcccaggctagagtgcatggtgcaatcttggctcactgcaacctccgcctcccgagttcaagcaattctcctgcctcagcctcccaagtagctgggattacaggcacctgccatcatgcccagctaatttttgtgtttttgtagagacggagtttcaccatgttggccaggatggtcttgaactcctgacctcagttcatctgcccacatgggtctccacaagtgctgggattacaggcatgagccaccacgcccagccatgtcatttgtaagagtaactgtacataccacatcagtatttgctactgatttgacatgaaatgctaaatagtaatttgtctgtggagaggattttctttttctttttcaaatttatgggagcccaggtttcccaactttcagaccaagtggctctttcttttggtatccctaagacaagtgctgaggtagtgattatttatttgtttatttatttatttttattattttagatctgggaggtgtacatgttcaggtttgttacgtggatatattgcataaaggtaaactttgggcctctagcttacctatcacccagatagtgaacattgtacccaatatgtaatttttcaactctcacccccctgcttttggagtccccagtgtcttatttccatctttgtgttcatgcatatgcattgtttagctaccacttacaagcgaaaatgtacattatttcacctagtataatggcctccagctctacccctgttgctgcaaaggacatggtttcattcttttttatggctgcatagtattccattatatatatgtatatcacattttctttctatccaatcatttgtcgatagacacttagattgattgtttccatgactttgctattgtgaataatgttatggtaaacatacgagtacaaatatcttttcgttatacctggtagtggaattgctagatcaaatggtagttctatttttagaactaccatttaaaagaaatgtttacattctttgagaagtctccatactgtttcccatagaagttgtattaatttacattcccaccaacaatgtataagcatttccttttctccacatccatgccatctgtttttgacatttttagtaatagccattctgactggtataagacgatatcttattgtggtttcaatttatatttctctgatgattagtgatgttgaacattttttcaaatgtttgttggctgtttgtatttcttcttttgaaaaatacctgttcatgttctttgcctactttttaatggggttatgtgatttttttgttatttagttatttgagttccttgtagattctgaatattagttctttgttggaggcataatttacagatattttctctgattgtgtaggttgtttgtttactctgttggttatttcttttgctgggcagaacctttttagtttaattaagtctcatttgtttttgtcacatttgtttttgaggtcttggtcataaattctttgcctaggccaatgtccagaagagtttttcctaggttttcttctaggatttttatagcttcaggttttatatttaagtcttgaattcatcttaagttagtttttgggtatggtgagagacaggggtccaatttcattctgctgtatatggctagctatttttcccagtaccacttagtgaatagcgtatgctttctccattgtttatttttgtcaactttgtcaaagatcagttgattgtaggtatacagctttatttctgggctctctgttgtgtcccattgatctatatgtctatttttgtaacagtgccatgctgtcttggttacaatagccttgtagtataattttgaagacagggtaatgtgatgcctctggttttgttctttttgcttagaattgctttggctatttgggctgttttttggttctatatgaactttaggattgtttttctaattctgtgaaaaatgacattggtaatttgataggaaatgcattgaatttttagattgctttggtcagtatgggcattttaatgacattaattcttccaatccatgagcattgtatgttttttcatttttttgtgtcatctatgacttcttttgtcagtgttttgtagttctccttgtagagatctttcacttccctgtttaaatatattcctagggttttcttttgtgtgagtgtttgtggatattgtaaatgggattgagttcttgatttggttcttagcttcagtgttatcagtcgtgtatagaaatgcttatttatttttgtacattgattttatatcctgaaactttactgaagttgcttatcaagtctaggagtcttttggaagtctttagggttttctaggtattagatcatgttatcagtgaacaggaattatttgacttctgttttccagtttgaataccttttatttctttgagatagagattttttaaatgtcttcttctttgggatttttacctaatgaagaaaagaaatgatcaaactatcaaaatattttaatcactgtgaactgtttattacatatgctattctgtgtgttgagctggatatcatcatttgctacgggttactgattagctagacttattggcatgttaaattagaggtttctgtcttgtgacagttatttcatttagggactacattgcttcttccgtattaaagttaccatggagagacaggcaaataatccaataaagcataaaattattatttaaattattaatataaaaagttaaatgataaatacataactgctattaccaaaaaaaataaagaaaaatctaaaacctcctgtgttcagatcagttgcaactttgcagtatccaaatgtaagaatgttccattagtgtagacatctcttgggtccttttccttaaggggttttataaataaaacagtttgtaaaaggggttaataagagagagagcagaaaaggggaactaagtattttggagacctctctgtatggtagatgctttgttctcaatagttcatttaatcctcagaacaactctctgagataagtaattattaaagaagtcagagtgagtagatggtagaggcaagatttgaaccgtggaggtctgactctaatttcctgtaattattcacttgtcaaattaatagaatacacctttcaggttgagattatttgttatcgaacattagaacctaagtggtttttgtatatttccctaggaaaatttatttatttatttatttatttattgagacagagtcttgctcttgtcgcccaggctggagtgcagtggcatgatctcggctcactacaagctctgcctcccaggttcatgctattctcccgcctcagcctcccgagtagctgggactacaggcgtctgccaccacgcccggctaattttttgtatttttttcatagagacagggtttcactgtgttagccaggatggtctcaatctcctgacctcggaatccgcccgcctcagcttcccaaagtgctgggattacagacgtgagccaccacgcctggcctccccagggaaacttttgtggactctcctagatgtctgcttaagaaactataagattccaagtgattcttaacagggcagacaaagaagtctagatgctactgtaacaaggaagattgtagaaagtcatagagacctccacagccatataaaaactgccttcccataaactattcctcttcagggagaaaaggagctgcagaagctttatcttctgtgaaatgatagtcctgaactggagtctcagcttagcagacagatgagccaggcctccatgtacataagagagcacagatgttacattcgattccaggagtcctttccaggggtaccacttactagctatgtgatcttgggccaattgcttaacctctttgaacctcagtttccatgtgtgtaacagagagattgttgtaccttatatgtcagcattgaagactgaataagatgtgtatgcctaacaactagtaagccttcagtatggtcctccttaagtcctccttcagtatggtcctccttaaggaggagaaagaaactctatcagtcagggtaggctggactgcatgaagatagtagctaaattttgtttggtttggtttggtttttgagacagggtctcgctgtattgcccaggctggagtacagtggcccaatcttggctcactgcagtctctgccttccatggtcaggtgattctcccatctcagcctcccgactaggtgggactacagatgcataccaccacgcctaatttttgtatttttagtagagacggggtttcaccatgttgcccaggctggtcttgaactactggtctcaagcaatctgcctgcctcagcctcccaaagtgctgggattacaggcctgagccaccatgcctagcctgtagccaagattaaagtgtcataagatagtagaagtctgtgtctctctcagggacccaaacttcctctatcttctgactattccatgccttagggactaccctctgcatccaactagttgggggagagaagaaagcacagaggggaatcattcacttttcaccagtttgggcctagaacagccacactttacctccattgtccagaacttggttacttggccatatccagctgtaagagtggtcaggaaatgtagtctagctgtgtggatttctagtgaaagtttagtctttataatacataagccatatttttaaatcaagccccacacaatgtgatgtcataatttgtgatattatcatcatttcatattaagctggaatatatttttaggaaagcaaaaatgtctgttttcaaaataatatccttcttgattccttagctctgtgcctcagacaaaattctggagtttgatcgagattttcgaattcgacattatgcaggcgatgtagtgtgagtatcttaccttggtacctaccatgatttgcatgccgcctcactttagaaaatacaaccaggaaaaatgtaaattggttttatattcatttgcatgttttggtcatttgatatgtcaatatattttaatttgttcaacttaaaaatggcatagcttcattcattccttgcttttcaaccatttattgagcacacactacttgcccatgtacatttcgtacagttcctggcatagttcgtgttcagtaagaatcagctggcgggtcaataaatcatggaagtatattaagaactgggatagaaagatggataagatggtctttgccctaaagaaccaacagtttagtgaagagtataggcatgtacgtccatcaaaggtcactataatgaagaatggaaacagttaaactagagaagcacaggcattataggagcagtgggtaggaataattaacccactgagaggggtatagagaggtcttgctggaggaagtggtatccaaattgagtcctaaaagtaaaagagggttagtcaggggaatgaattaggaagaggggagagaaaagagaaagctttccaagtagaagaaacagtaggcataaaaaggcccctaggtgagaataactcctgtacatgaagatctgcaaatagttgggtaactgcataagcaaaaaccatttttgctacattattttccaaatattattttaaaaagtaaaactcttactagccgtatttttattaacaatacaataaagtagaaattgatcagaaagtataactaaaaattataactaccttagtacattaggttccaagggctgctgtaacaaattaaccacaatcggtggcttaagtcaacaaaaacttattctttcacagttctggagttcaaaagttcaaaatcaagatgtcagcagggccacactctctctggaggttcctgtagagaggagtctgttcctttttccagcttctagtagcactggacattccttggcttgtagctgcatcactccagtcacattgccctcctctttgtgtgtctgtgttaactgtccctttgtgtctatctttttttttttccttttttttgagatggagtctcgctctgtcacccaggctggagtccagtggtgcgatctcagctcactgcaacctccgcctcccaggcctaagcaagtctcctgtctcagcctcctgagtagctgggattacaggcgcataccaccacgcctggctaatttttgtatttttagtggagacggggtttcaccatgttggccaggctggtttcgaactcctgacctcaattgatctgcccgccttggcctcccaaagtgctaggattacagtcatgagccaccgagcctggccgctctgcctctattttaaagtgacatttgatatggtatgtagagcccatctgaataatgtaggatgagcttctcctctcaagatcattaatcacatattttatgatataaggcaacattcccaggttccagggaatttgatatgaaacttttgttggggctgcatttcttagcctactatatttattatgcctttactgtccactgaacactgctcctcatcttattgtttaaagaactctttttcttagtttttacattaggaattctttacatgtaatccattgcaggaagagattaaacaaaaaaaggtaaatgatcttctctataaatgctgaaatgatgtttgaagaaattttaatagctgttcctgatttaaatcaaaattctaggaccataaaataatatggctcaaaattatcacaccatctgtcaaactaaccattagtgatggaatggcaccattttccactttttctggtcctgttcccaggttccataatactgaagagggaagatccagtactatacaaatatctcccactaaaaatccaagcctcacttacagggtactttcataccactcagaatgacgcaaatgcagagctggatagaggccttagagatgacctagaccagccacttcattttacagatgaagaaacttatgcagaatgagtaaagttcttacgcaatgccacatagcaaatttacagaagaactgagacaatacctaggtttctagactcttagtctagaacttcaactaacccttttgagggatattcaatgcctcagacttcctcttcacttcttaaactcttcaatccttttctggatttttactgagtatcttctatgtgctcagtacttcataaggtatggtctcttcccacaaagagctggctgccatgtaagatacatacgtatatacatatatgtatggttgtatgtgttcttatttttacacatgaaaacacgcatatatacacataaacatttatatacatgtatacaataacagtggtctaaaataattgccatatgagtaatagcaattactcatttggaatttagagtaaggaaatacttccaggtttgtgtgataaacccaggaaggctgatgctggtctttgaatgctaggaattattcttataggaagaagtgggaagggtgctacaaaatattcaggaaatagcaactaggtccatctgattggagtgtatccttttttgtagcacagagaagtagaactatctggaagagtagcttgagatcaaatcacaaaggttcagtcaaaagtgacttgaaagtattaagaagacctaggtcggggcaggcaaggaaataattttgggtatggtaaccttaaagtacccatgggcagcacagcctgaaggaactttcttgcaggattaaatatgtaaggcaaggaatccgggttagagatctgagaattgcttatactgatctgattgtcaagagagaaaacaggcacgagagcagaactgtaaggtgtagctgtgtctaaagttcctatttgcttaatctcctagcctctgtcttaatcacccagagtcgtcaattacttttataaccccaaaaatgaattcactcctcctagagtccatgccagtcactgggagtagtacaattctattcctactcttctcaccaactgcaatcttagctggactttcaagaccttactcatctcccttccaaaccatctatactggcctcctcattctctctccagagcaccatgcatgtgcctgctttcgtcactccatttgatctgtttccctgtgtgatctgcctgcctttttctcctctgcttatccaattattaccatcctttgcagttcttcttggaatcttttatcctaccctcaacactgagtgaaccttaggcaagtcacttgacctccctacggatgagactgttagttcctgtatgttgctgttttgcttttatcttaggaatgctggatgataaatacagctatcttttaaaaagtcatcttcttgaggtaagcaataaaccagtagggaattatcatcttaatcataatagtactgatgaaaattcccttctatttagtaggtaaatttggtaccctttaatacagaacaagatgaacaatatcagcttttagattattgattgcataattaacggtggaaaggcttgttgcctcctggaaaaacttaaatgtggctcttgcttggtaaatgatacatgttttctgtgatttttccctgttagctattctgtcattggttttattgacaaaaataaagatactttatttcaagatttcaagcgccttatgtataacaggtaagattgaaattttattaattaactctagattaagctcattgacatatgtaatatatgcacatggttatatttatatgcaattttaagagtttctggcacattttcttgttctgctttatcagacttaataaatagcatataactaacttgatgataaaatctataaattttgggcagggacctgctaataatatgatgtgctttgatttcccttgggttgcctcagcttctgtgctcactgctgccagccttccagcatcccctaccagtatactcagcagtcctcaggccaggccagtgtgatgaagaagtgtcaggtgacatctggcccagctagaagttttgcatactcagattcccactgtagtgtcttcacccccaaataagagaccgctctgatatcagagtggcatctagtgtcagtgagccctgatagtgactgagcagacagaatcttctcacaaaccaacaaaatgtggaaaagttatggcaaaataaaactaggcaaatgataacaagtttaaatccagtatggatactttaaaaagaaggtccatgaagaagaaagaggattcctggtcatctttctatgggttaaagaactgtattcactcatttgttaagtctgcttagtcagtgctcagtagattatcaaaaatgtattgagtacctttgaggcacactttcttctatgttctgggatacagctgtgaaaaaatgtaggcaaagtccctggcctcatggagattatagtctagtaaaggtgacagttaataaacaaggaaacaactttcagtttgtgacaagtgctgtgcagaaaaataaagtaggtaacagattgaagggtacagatgaggaggggctgggaaggaattatagatagggtagtcagaaaaggcctcttatagaggtgacatttcagcagagacctgaattaagtgaaggagggagccatgctggaggaagagcattccaggcagagagaaaagctagtaccaaggccacaaggtgggaatgagcttgagtgtattgacagcaaggccattgtggctgaaaacagagtgagggatggaaagagtgactttagaaaggtaggtagagcctggatcataaagagcctgagtccacataagaagaaagtatgaagggaagcgttggaatttatgatgtgatgtgatgtgatttatgttttaaagatatcactgctgctactactatgtaaaatgcacacagtaagggacaagcatggaaatagacagtaaaggaggcgattttaataatgcaggctgaggctggtcgcagtggctcacacctgtaatcccagcactttgggagcctgaggcgggcagatcacaaggtcaggagattgaaaccatcctggctaacatggtgaaaccccgtctctactaaaaatatgaaaaaattagccgggtgtggcggtgagtgtctgtagtcccagctactcaggaggctgaggcaggagaatggcatgaacctgggaggcggagcttgcagtgagccgagatcgcgccactgcactccagcctgggcgacagagtgagactctgtctcaaaataataataataataataacaataataataataataatgcaggctgaggcctgggtggtagtgatggagataatgaaaaggggtcagattgggtgatattttgaaagtagagttgacaagatttgctggtagagacaatgtgtggtgtgagaggaagacggaaatcaaaggtgatacctgagcctgataggagaagacaagaggaaacgctaattggttcagggaaattaagagttttgttttggatatgttatgtctgaagtgcattttggatacccaattaaaagtgccaaatcagcaattgcaactatgcatctgaatctcaggggaaaggtggggctagagatataaattcacagtcatcagtgtattgattgtatttaaagccatagactagatgagagtatctagggagtgagcgtagttttaaaaagagaagaggttaaaaagactaattcctgagacactgtaacatgtagagacaaacaaggaaagaggaactagcaaaggaaactgagagcatgccagtgaggaaggaagtaaacaaggaatctggtgtcacagaggccaagccaagaaaaaatgtttaaagaagaaaaaaacgatacactacatcaaatcttgtcaaaagcaggagggatgagaggaccaagattgaccattggatttgctaatgccaaggtcagtgggactcttgacaacactggtttccatgtagcattgaagacaaatatctcattgatgtgagctcaagggaatacaggaaatgagaatatagagacattgtgtttaaactgttctttcaagaattgttatcaaatgattcatctgtatggatgttgaagccaccaagattaatgatggcactatcatcagtaaaaagttacagagacaggaatgtgagagaggatccttggaagaactgggcatggggaaaagggactttcagaagggaatttcaatgcttaatttatcaggtaaggtacattcattttgagggacaaatgacagagtccagcatttctctgtgcagaaaatgttaaaagctcaacttagaaaaaacagccttatttggccagtagtaccatcagggtgtgttgccagtctctgtaccaagaggctgcacgaggtgatgtttgttaactttgtgaatgtaccatggcccagaggttcagctgctgagaacagcttcacctttcagtggtgaactaatatagcccaggctctccaggccagtgtagaaaccaaacagcatgtggatttatttctagtggaaaatctaacagtaacatggaatggaatacagttgtcccgaagtatccatgggggattaattccatctggtaccctcctccactgaagataccaaaatccatacatgttcaagtcccttatataaaatggtgtagtatttacatataacctacacacttcctcccagatactttaaatcatgtctagattacttacaaaacctaatgaaatgtaagtgctatgtaaatagttgttgtattgtttagagaataatgacccctcaaaaaagtctgtacatgtctagcacaggcacaaacatctttaaaaaaaattttttttttaatttactttttttttttttttttgagacggagtctcactctgtcgcccaggctgtagtgcagtggcgcgatctcggctcactgcaagctccgcctcccaggttcatgccattctcctgcctcagcctcctgagtagctgggactacaggcgcccaccaccacgcccggctaattttttttgtatttttagtagagacggggtttcaccgtgttagccaggatggtctcgatctcctgacctcgtgatccgcccaccttggcctcccaaagtgaaaaatattttctatccatggtatatgttgaatgtggaagccatggatatggagagccaactgtaattgtgttcatgtaacaggctgtttttccctgttggaaaacgtgcttgggaagtcaaatagcagtgagaactctgattcattattacccatggaatccagaatacttagttgcctggtaagcacagaatcagaacaaaggaacttagataaacccaacaaataaaggcatcaggctaagatgaatccatttcacaataggaatagttttgccaaaggggtgaaagattgaaagtctattaaatgcagcatattgtgtatattccataataggaaaggccttgcctgtgagatgggaagtcttgactttttttttttttggataaaaccatcctcctagatggtattggaatgagccaccttcatctctggacactatttgatgcttccatggctaataaccttccaaaatttgaatccattttttctttgtatatgttaatataatgatttttcttttctttttttttttttttttagaagtggtatcccagtcgcccagcctggagcacagtgatgtgatcatagctcactgtaaccctgaactcctgggctcaagtgattctcccaactctgcctccccagtaactgggggtacaggcatgcaccactacacccagcaatataattatatttaagcaatgttccttggattctagttctgtagaccttgataatatacacacatgtatgcatgcatgtatgtgtgtgtctgtgtctgtgtgtgtctgtgtaaatgaagggaggaagggagcaagcattttgcattccaagtgcacaaacttttactctttactgctgtcttgttagccagatgagatctgccttacctattatacatactgggtctctggaggagcttcccttctaagataagggttctggtatttaaaatatgttgaaaactattttgttaatattacattcaggctgggcatggtggctgacacctgtaatcccagcactttgggaggctgaggtgggagaatcgcgtgagcccaggagtttgagaccagcctggacaacatagggagaccattctacaaaaaattaaaaagttagccaggcatggtggcacgtgcctgtagtcccagctacttgggagactgaagtggagtatcacttgagcctggaaggtcgaggctgcagtgagctatcatctcaccactgcactccagcctaggtgacagagtgagaccctgtctcagaaaaacaaaaatattacagtcatgacttggcctgaaagttctttctctttaaaatgactccctacaactgtttggattcattttgtatcaattctgctatttaacatattatcttatttccttcatttccaacctttacagtgtagtacaggaatagtctccaaatatggccaacagtgagtaaggtagacaaagaatttggagtagaaactgcatagaccaaacaccagtgactaaaagacacagtcttttaacatgtgtcgaaattttcaaagtacacaaagtgcaattttctactttctgaaaattctattcagtaaatgttagaatggcattcaggcaccatgtgcactgtaagttaagaacgttgccttaaattatttctgtgctaaagataagaatgaaaaagttaaggaaaaacaatatacatctatgtagtcattttgatataagtgtacaaatggaaaattatggaataggactagaaagtaatgaaactgggttcataagccacaggttattgcagcattttgtagccactttgacagtagttggcactgcttgctggtgatggtgggggctgggagtgttgctctgtctgtgttcacagacccagtcaatccacacattaccatttgtcttcttcgctctgcgctcatctgctctttcatcttgcagctattattttgagcacctacatacagaaatattctgagtgctttggggatccaactcaatttttaaaattttatatgagggaaaaaaagtgggtaaaatgttagcagtagtaagagcaattagcaatgaatgctaatgttaattattttctcttctcaacccccaatttttttttattatacttttagttctagggtacatgtgcacagcgtgcaggtttgttgcatatgtatacatgcgccatgttggtgtgctgcacccattaactcgtcatttacattaggtatatctcctaatgctatctctccccctccccccaccccatgacaggccttggtgtgtgacgttccccttcctctgtccgagtgttctcattgttcaattcccacctatgagtgagaacatgtgatgtttggttttttgtccttgcaatagtttgctaagaatgatggtttccagcttcatccatgttcctacaaaggacatgaactcatccttttttatggctgcatagtattccatggtgtatatgtgccacattttcttaatccagtctatcattgatggacatttgggttgctcaacccccaattttttaagaaaagtttttttctgataaaagtttctaggaagcaagcaacattttgagttccaactgctttaacatcaaaagcacccaaaatgaaaccagaaaaaaaatgacagttgagatcactacacgtttttaaaaatatctccacagagcaaaattatgaatatacaattttaacctgaaaattggcctgaaatgcatttttagatttggattgcaacagtcctaatgtcacatcaataaaatattgtaactgccaatgctacctacagatttgttcacaatttgaactgcagtaaagggatttacgagggacaatataaaaatggttattttatattcctacctgtgtttttttttaaagagcaggctttctgtagtgttacctgttctattaatatataaattatttgctttaattcaaagatattgccacttttatgttttctgctgtgacattgaggatcatttttctactagtggtttgtcctcattttctaaccatcacaaaaatgaatttgttttatatatgtattgtaagagccatattgaccatttgagggtcctaggtaggtataataaggatgtcactttaaagaagtttaaataatttttaaaatatgctatagtttggaaaaacatctcaatttgcattgcagtatcagtcattattcttgtagcataattttctggatggaatcatcattccaattaggccttgtgagttgaatctgtagtccaattatgattctcaggatacatttcagcagaattgcttatcagtttttatccagcttatttgaatgtgacatttgaattgttttttctgtgcttctcagttcaaatcctgtgctcaagaatatgtggcctgaaggcaaactgagcattacagaggtgaccaagcgacctctgactgctgctaccttgtttaagaattctatgattgctctagtagacaaccttgcatcaaaggtaattattttcttttctaaatatccattttaactcatagatttcctcttgatgtattataaagaatgtatgtatgatttgctttttaggtaatcatgtagattgaagaatatgtataaagtgaatgttataatagaatttttattcctgcatttttaaaaatctcacctcagtggaacgattgttggtgtcctagattagtatctgtcttgaatttgagctttttattctactgtcatggtcaagggaaaaatcttggatttgaaaaatatataaggcacagcatgcccagcaaaaggaactttagcgctgtgctgaaaacaggacctggccaaaataaataagtaaagtcttgaattaagttgtaaaatgtaccatttatatattgtgtttgagtacaaagtggccagagagttttaagaggaaatttaggatgcaagtattgtccttaggctgttttaaataattgaaatataaagacgtattggcctgggtgttgtggcttatgcctgtaatcccagcactttgggaggccaaggcgggaggatcacttgagaccagcctggacaatatagtgagacctcctttctgcaaaaagttaaaaaattagccaggcatggtggcatgcacccacagtcccagctactcaggaggctgaggcgggaggatcactggagaccagcctgggcaatataataagacctcctctacaaaaagttacaaaattagccaggcatggtggcacatgcctgtggtcccaggtactctggcggctaaggtgggaggatcgcttgagcctgggaggcagaggttgcagtgagccaagatcacaccactacactccagtctgggtgatagagcaggaccttgtctcaaaaaaaaaaaaaaaagttgtattattgacaattatttgtgttttttattgtttctttaaggactaatactatttgataacttttgtctgttttttcccttaaagaacatatttctacccctaactgctgctgttggcaagtttgataaattaggcagcattctgagccatgttatttttagtttcttcatttttatctttctcttctggtgcttctcctatgtagtttcttcttcgttatctttttttaaaaaatcaacttcctctctaagaatttgaatccatactgtttctggttacttcactatagataaattaggcaaatgccacaggaacacatctgtgcggtcgctttctatctccttttgtcaggattctttggcctcaagtgaccgcatataagcacaatttgttggcttatataatcaaacctccagaaaggcaggggtaaggacactggcactggaggctggaatgccgttaggactcttcactcttgtatctcagcttttctttgcatgtcaactgcagcctgcttcatccagcaagaagaaaagtgaacctggaaggaagacacaggacacaagaaacagttgaacactgaatttcatgaaagacttttaaatattcagttaactacagttagtcaattaactagaaaaagaattgttttgttttctaaacttggtagttaatgtgccatgtaaagaaataaaaattctagaaccttctataatttctgtatcaggaattgcattcaccttctaatgaaacagatccctgaattagtagcttaaataagagagacatttattactctctcctataaatgaagtatagaagaaggcatcccaggactggcatggcagctccaaagttattagagacccaagttctttctgtccttccgctctaccatcctagtgcttggcacccaacctcctggtccatgatggcagctggaacttcctcctttttaaagagacttcctggaagtttgacacactttagctacaccccatttgctatatagagttgtcagggaagctgggaaggacattttcattctggtcagcagtgcactcagctagcaataagaattctgttttaaagtaagaaaaagatactggacataaagtagggaactagcctagcaatctctgctacagcttcccaatccatgtgtgtatggagatcaggggagaagggagggagcagagataagcagaagaatatagacaacttatcagtacaatagaaggcaagaaggtaaagccagactgagaggttctagaggacagcagaaaaaaaaaaaaagagttgcatttagaacaaaataatatgatagaaataaatctaaataattggtattcatcataatgtaaatagactaagcagactagataggtggaaaatccagctatatgctccttagaggagacacacataaataacactatgcagaaagctcaaaaacaaagacgtagaaagatatcaagccacctctcaccaaaaacggttaaaagcaacattcatgtgaaagaacatagaatttaagaaagcaagtattaatacagataaactagtgatatcaaaattatccaagacaagccatgttgaactaacatggtacctaacaacatacccatacttcttgtaaattctataaagaaaaaaaaaacctgaaaaattttaaaggaaaaattgacaagtccaccatcatagtgggagattttaaaccagtgctgtcagaaagataaatgatagatgaagcagacaaaaaatgttagtgagaatgcagaagctttgaaaaccaaatttaaactttatctaatagatcaaaggaaccctgtacccagagaataggaaatacatatgcctttaaagtatacatcaaggccagacatggcggcttatacctgtaatcccagcactttgggaggccaaggcaggaggatcacttgaggtcaagagttcaagaccagcctgtccagcatagtgaaaccctgtctctaataaaaatacaaaacttagctgggcatggtggcctgttgtcccagctacttgggaggctgaggcaggagaatcacttgaacccaggaggtggagatagcagtgagcaagatggtgccaatgcattccagcctgggcaacagagcgagactccatctcaaaaaaataataaaataaagtatacatggaacatttacaagaattgaccacataatagatgacaaaggaaaccattttgggttcgtgtgtgtgtgtgtgtgtgtgtgtgtgtgtgtgtgtgtgtgttcagatggaatcttgctttgttgcccaggttggagtgccatggtgcgatctcagctcactgcaacctctctgcctcctgggttcaagcaattctcacacctcagcctcctgagtagctgggattacaggtgtgtgccaccacacccagctaaatttttttttttttgtatttttagtacagatggggtttcaccatgttgaccaggttggtcttgaactcctgatctcaggtcatccacccacctcggcctcctaaagcgctggcattgcagatgtgagccaccatgctcagccatctcaactattttgaagaagtgcatatacagatacagttttcatcttcaaagcaagtaaaataaaaatcagcattaaaaaaatgtaatatgttttggaactttaaaagtactctcctaaacaggtcatagtttgaagaagaaatcacaatggaaattataaaatgttaggaagtgcatgacaaaaaatttgtcagaatttatagaatactgctaaagtgatccatttgttgcctttgtaaaataacaagaaagactgaaaagttaatgagctaagcacaacttaagaagccagaaaaggaactccaaagaaaacctgaagaaagaagtaagaaaatattttttaaaatagtaaaactttaaagtaatggaacaaaaaagtaatcaataagacctctaataaagctgataaattaaaaaattatgaacaaaaaaagggctattactgtgcagacattatggagatttttttaaagtatcagaatattatggataactatatgccaatgaatttgaaaatgtagatggttttctagaaaaaaaaagttatcaaaattaattcaagaagaatggggcaacctgaatatatcagtaaccttaaagaatccgaataactgatgataaatccaccttttcccaacgttgccaaggacatcagatctagatggttttacaaatcagttttataaaacctttgtggagccattaatccctatcatatggaaactgttttggagggtgggaagaagagaggcaactactcaactcatttaatgagattaatattaccttaatacaagcttaatatgagaaaataaaattagagatcaatttaacttagaaacacagatgtaaagacctcaaaaatatatgaataatgcattttctggcaacatggtgaatgaggtgcccactaaagccaactgaaaacaactaaaatgttagataaaatataaaaatcaacatcttgaatctagccatgaactaacgaaaagtaagaaatatacaagccaggagctgagtgaatacagaagttaactgagtgaaggaaaaaacccctaaagctgcccctcaccctgtggggatttgttgaagtgtgtaactttgaatatagttattcaaggctgggtccttgaagtgaagcccagggcctgcccaaagtagggtatctaataaggaattctgtgcacacacacacacacaatggtgagtctttaaagggctacatgtagagtgaactagaagtaattccccattatcagtaaggaaaactgcctgtcttggtccttggcactcagccatgggtggagggggtgtgaatctctcttgggaatttataatcataagtgagcttttaggtggtttgcaacccaaactcatactatctgggtagcttgaaaaagcctcaaactgacaatttgattaaaggtggtccaggtcttataattgccccaggcatctgaaaaaagcaagtaaaactgttttccttaggaaactatcttcatactgtcacagaatccttggggtgtgacttttctcaccagaaacctttgtgcctggtggtgcctttgcctgagttttgctcaagcctgccaggcttgttccacctactcagcctcgcaggctgcactcagcttgccctaccagcctggattccacacttgccaagggtgagccaggcacagaatggcaaggggagtgtgaatgagcgagcataaggtccagccactgcacacagccaagcacacaggctgcagcagagcgggcagctccaggtgccggcacagacactggttccctgtgaggctgcggctggaccaggcatactgcaagcagcttccatggctggcactggggaatgcagtggtgcccagaagcttggaaataccaggaactgcagagccccaaagagtatatcagccctggcttggggagctcctaggtctgggctccctgaagggccacagctcttctccttctctcttcactcctcgtcacccacaacgtgacaagcaaagggcatgtttcagccctgtttgtgttacagctcttttagccctgccattcagtggattctgagttgttgtcctgtgtccaggaagaatgaggtatgcatacaaatagagggtgagcaaggcaaagaggtgctttattgggtgacagaacagctcagaggagaatctcagtgggtagctcctctctgcagtcaggtcctcccattgtctactcatctctcagcatagaggagaccagcagtatgaagctagctcctctctgcaggcaggtcgtcccatcatctgctcagctctcagcagagaggagacccatggtgggtagctcctctccacaggcaggttatcccattgtctgcctgagtctggctgagtctggggtttttatgggcttcagaggaggggaagtgtgcgctgattggtccataggcaggcctggaaaaagcactataagttctcactctggaccatggaactggcagcctggcccaaaggtgggatttcaccagcgacccacccctttctgcccaggcacctgtctgcctcctgccaccattaacctgccatccacagcacccacagagtccagactgttcgtgccaaggggtgcctccaggcccacaccaagctgccctcagcaccccgttggccttccgctgtgctctttggcatccaaagtctgaagggggccaaggtagcagggggctggcatgtcagcactgccccaagtgtgcgcatacccagctgggttgcaacagtgcccaggctcagcctcaactttgctctgaaatcagagtgggcgccaagaccagggagaggccagacgttgggagcagcacatccaagccaacaggggcaggggagcttcccatgtccccgggagtgcagaggtacccaggtctacagccatggctgggtggttatggcttcacccaggaggttggggctcctgcctgctcccagcccccaagagcacagggatgcctgggtcctgcaccgtagctgggcggccacagctgcacccaggaagtgcgatgatcccacccagccaacttggaagggggcggggcttccacctgttcctggctactgccagctccacggagcacacaaccccagatgcacctcccccactgcagccagcatcatggcagcagctgctccagatgggccaccaataccagaccttaaagaatttccacaaagctctaaggaaaattagctcacagtaaagaatcactacaagatactataagtaaaaggcaaactaaacaacaaacagcaggttcagactcatgaaaacttctgatacagaaatgatcagaaagagaatatgagaatgcttaatatacatcaagaaatgaaaggccagaaaatgagagagaacaagcaactagacaattgatagaaataaaaactaagtaattaaaattaaaaattcaatggataggtttaacatcagtttacataaagctgaagagaaagtagtgaaatgaaaataagaactgaaggattatccagaattccacttagactaagaaatgaaacatataaaagaaacattaagacacatgggggctggtggctcatgcctgtaatcccagcactttgggaggccgaggcgagcagatcacaaggtcaggagatcaagaccattctggctaacacagtgaaaccctgtctctactaaaaatacaaaaaaattagccaggtgtggtggcatgcacatgtaatcccagctactcagaaggctgaggaaggagaatcgcttgaacccgggaggcagaggttgcagtgagccaaaattgtgccactgcactcccgcctgggcgacagagcaagactgtctctgaaaaaaaaaaaaaaaaaaaagacacgtggaagagaaaataaagtggtcaaacatgtatcttatcagagttatagaagagaaaatggatagaacaatatttgaagaaatattcctgagaatttcaagaatattgaaggacttaacagaatcaggaagcccaatgaatctgaagttggaaaaattaaaagaaatctgcatatagacacctagtaaaatcctagaacattaaagacaaagaaaatatcttaaaagcagccagagaaaagacagattagattcaaaagtatgacaattaggctgagagaaaataaacgtaaaccaaattctatacccagggaatacattttttccagaacaaaggcacaataaagaatctttctgaaaaacaaaaaccaaaaacagagagtttatcaacctcacttaaggagattctaaaagatattcatcagacaataggaagagtatactaagtgaaactctgaaatgcaaaaagaaaagaagagcaaagaattggtaaatacgtagatgcatgtaaatgaactctgtaaaataatattttgtggaatggaaaatacagattagagttatcacagtaacaattgcatatcaattagaagagcaggtaattgtaattccagtgtttaaggtccttagttcagaaaaaaataataaaaatattgtttaacgttcaactctgatgagttaaaaatacatgtgaaaattttctaacataatcattgaaaatagtagaaaatagaggttataaattccaaactagtagagaaggaaaagaaaaaaaaaaacaataaaaacaaagaatcctccctgcccccaaaacaaaaacataaaaaagaagaaacaaaagaacatgggaaagctggatatttggtagaaacaaatataaatatattagtaattacattgaatgtaaatggataaaaaccaattcagactgaagaaaaagaatccagatatatgctatttattagtgacacccgtaaggaaatagaacaactgaaagtttatatcagttcgacagtctgggatcacctttatcccatttcagggcctgtagtagctcagtgttgggctgtcgtccattcacctttatctccctggtttagctattcaggattccagaccaaactacagtccctcatccaagaccccaggttctaactttggtacccaagtcccatgaaagccagaagctatgttcagccttatgactgtcttttccatatcaacagtagcttctaagacaaaaacaaccatgaggtgtaggctcactcaacttgattttagttttctgattttggccaggtctttcctcactatcttattagctccgagatgcacttaccaaaaccttttccccatattttgtctagcacttttttttagtaacttcatcaggaagattgataagtattacctagtgctccattaccagaagtagacgtccctggctcctcactttcacagagtccatagtgccttcagttcatgacttgtatccccacccagattataaatcttttgaatctagagaatgggttttgttaattttatgtattaatacctaataaggtactaaaacagattgtcagtaaattattaaatgaacttgaatttgctatgactatttgacagtgttcaaagcaagttaaatagaggtatatttagatagtgtagtctagctaatctatatactgattggtgtactttcacaaatggtgttttttttcccgtaaaatatatagggagagacaggtgaaaaagttcaagagaataagatcactattaacttttgcaatttaacctttataagacactctgaatttgccaaatttaggatttcttaggctgagtcagtctggatatttataaatgagagaggaggcagcatttataaattgagacagaatgctgattaaatatagagaaagtattcccactatattccttatccaaagacttttatatcactaaacaggatgaaagggcttccccccatttcttagttggttgttagtgtctcatccaatattgccacttcctatgcgtaatcactcagtactggtaatagtccattcaactattttctggttaataaagttgtattaatactcttcatatgatgccttataagattgcgttgcctacatgattttatacattattcagtccaaaatattttccaaatcacattgtaatttcctttttgacctaaggtttagttgttcagaagtatttttcttaattttcaacatataggattttctcattatctttttgctcttgatttctagcttagtcttatttcatcaaaagacatactctgtgtggtttcaatttttagaaatttgctaaatttgctttatgtatatgttttgtttgtctttaaaaaataatttgcagccgggcgcggtggctcatgcctgtaatcccagcactttgggagtccaaggtgggcagatcacaagatcaggagttcaagaccagcctggccaacatagtgaaaccctgtctctactaaaagtacaaaaaattagccaggcatggtggtgtgcaccctgtaatcccagctgttcgggaggctgaggcaggagaatcacgtgaacccgggagtccgaggttgcaatgagctgagatcacgccattgcactccagcctgggtgacggtgtgagactgtctcaaaaaaaaaaaaaaattgcattcaatattctatacaagtccattaggtcaagtttgctaataatattgttcaacttttctattttcttcctgacttctttgttttgtaaacattgaaaggtgttttaaactctgccttgattctgaatttatctgcttgtccttattgtacctttgattttttgtgtaaatatttagagaatttgttaggctcattcaagttagaactgttatatcttcctggtgtttgagtcatttatcattatgaaacatctctatttccatattgctttttgccttgaaatctgctttgcatgaataatatagctatgccagcttttcttttggctagagtttgcatggtatatctttttcatccttttactttcaatctttctatatccttatgtttcaagtgtgtctctcataagtagcatatagttagctttgatttttttaatccagtctgacaatttttgtcttttgaataaatcatttagttcatttacttttaatatagtgtgtgttgcatttaaatcaggcatcttgttaatgcttctatttgactcttctgtatttattttctttttttctgtatttcttttagattgattattgtgggagaaaggtaaacaaaactttattccttccccttgacagcttaacctcagttaaatttctagctctgttcctctggcaacctagtaagacatgtatcacttaacaacattacttatggtcagaattatccctgtcagtaaattgcatctgtcttgggagaatgatgtctggtgggttttatatactttgggtttgcctgagcttagtgactcttgtattaggtctgtcctttgctggacccttgaagctatgtcttctgagctgttctaagagatatttggtcctgtggggcatgaggcttttaagccaagttcacctcgcacacatgtccaatgtggatctcatctccttacacctaagctgtcacttgactgctgtgtggactgctccaaggacactgacgctacctgctagcaaaccgtgttcttggccttttgaagagattggtgccaaatgtggcctatgagtattctgagtcaaaatgtttagttagacctaagatcatactctttcccctccactggtgttgcaagtattttttatcattttatttattctctttattattttggaagatttacttaaatactgttatagtggttacttgacttattgcaatatcattcttgaatataaaaatctaatgttatttggtacttttgcctccttcctaggaaatacaaggccaatttaattccatttaccttcctcctaacttgtatgctattttggtcatgtattttaattatataccaaaataacatgcatgtattttaattatataccaaaatatatttggtcatgtattttaattatataccaaaataacatgcatatacatttttaaagccagtaagacattattatatctatttagatataaatatatttattatattagatatagatgttatatctatattatctgtatctatattacctatagctatttatacctatatgatctatattatctaatatctatatctattatatctgttatagctattagatgatatagatataatatatatctatttagattgtaatttacatctattatatctatttattcacttgtttatcttttttctcttcctatttttttaaaatatatcatggttttattttgccaagttactcatgaaaagcatgactttttttctttttcttttctttttttttttgagacagggtctcactctgtcacccagactggagtgcattggcatgatctcagctcactgcaacctccacctcctgggttcaagcaattcctgtgcctcagcctcccaagtagctgggactacaggtgcacgccaccacacccagttaatttttgtattttttggtagagatggggtttcaccatgttggccaggctggtctcaaacccctgacctcaacttatctgcccaccttggcctcccaaagtgctgggattacaggcgtgagccactgcacccaacccctatattgttgaccttccatctgggatcattttcttctgccttaacctcactctattatatttgaaatctgagggtgacaaatgttgtttttgtttaccaaaaaatatttctatactgttttcattcttgaagaatatttttgctcagtgtaaaattctacgttagcagtgtcttttggcacttcaaagatagtgttcctttgtcttctggatttcatagtttcttttgagaagttagctgtcagtctgtctctttgttgctccttaaggtaatcttttttttccctctggctgctttgattttcagaagtttcactatgatgtgcttaggtgtagattttttttaaaatatgcttgtagtttgtagaatctcttccatttgtagctccccttttttttaatcagttttagcaagttcttttcaaatatttcttctgtcccttctgtctcctctcctttagaactccatctcactgtgtcttctatacctcttagcctcccatctttattttccatctttttatctatccatgcttcattccagaaaatttcttctcacctaacttctagtacattcattttttttttcttcacctatttcttttttttttctttaagatggagtctcgctctgttgcccaggctggagtgcagtggcgcgatctcagctcactgcaaactctgcctcccaggttcaagacattctcctgcctcagcctcctgagtaaactgggattacaggagcgtgccaccatgcccagctaattttttgtatttttagtagaaacggggtttcaccatgttggccaggctggtctcaaactcctgacctcaagtgatccacccaccttggcctcctaaagggctgggattacaggcatgagccaccacacctggccttcttcacctacttctaatctactcttgtactgatccactgagttcttaatttcctttattatatttttcagttctaggtttccatttggcttggttctttttcatagtttctggttctatacaaaattctcattattgtcttttgtcaccttgaacatggtaagcatagttattttaatatctctatctgataactccagtgtctggatacctgcaggttcgtttatttttttattttgttttgctgtttctaattccagtttacttggctacttacatgtctggttactttttattttgttccaaatattatatttgcaaaattatctgcagaaataattggaggcccaagtttatgtgatttttcttcagggaagagttaattttgcttcttttagttacctaagaacaatagtattccaaatcagctattccaatttcaaggacttaggtgattcaaagctgaattatgggctctgtaaaggactgcctccttctacttcatccttattcctgttggtgggatcctaacccaaagtgagaggggtttacctgtgtcccctccttttcaggccttgctcgctaatctttgtcccactaggcccatgaagctgccagaatcactactcagatcccatctaccttctctggaactggcaaatttccccaggaaaaaaaggcagcctcaaacctgggttctcctccacggttttcttcctctcctggattctgacccagtaaattctccactgtgttgttagatctcccatgtcttctggcaaacgttttgtttattttgtttacctattctagttaaccctcagcacgggtgtcagtttaaattacctagtctgtcattactcaaagaaagcccccgtatcttcatttcataaattagctaattagttccagagagaatttacagccaagactcaagtgttctgattttgtacaatgcttattctgttacactggtgccaaacatgcagataaatctggtagcattttggcatttactgtgctcagtgccacttttcttggtttattcaccaaaaagtaaaggcattctattccagcaaaccagtagaaaatccttaagtaaacagtgcctccgcccgacttccccatcctattaagttttttaaaaaacttactataagccattttttaaagtgagctacagttgttcccccaatatagatgctccacttgaaaatcattacagatttagtgaacgtttgatcacacatcactatttttaaagtaggattctgcttgtgctttataataaaatataccaaaatttaatatctaatgaaagggttggtattccagaatagggaagaagtgtaagttatctatcaatccataacaaatcactgtaaaatatagtgcttaaaataatggttctttgtcatgattcaggggttgactgggcagttctgctgggctcaccaagcagctgcagtcagctggggcgagataggctaagatgagctcactcaaatggcgtgcctggatgactgagcatcttttcttcatgtagtctttaatcccgggcttcttcacatggtagaagtggtccaagagggcaggcagaccctctcgaggatggacttccagaagtaacccagtgttgcttctgctgcattctactggttaaagcatgtcacaggccaagccagattcgagaagtggtgtagagactccacctcttactgggaggtggtgcaagatattgaggtcatgtttttccttctgctacagatgacaagatgaaaaagggcaggtgtactaggcagaatagtggcctctgcatagcaacagcaactctctaacatcagctaagtgtcctacaattcaattcagttcttacactaactacccagagttagcattaatctaaaaaattaaaggacagggtccctaataagactctcctttacttcagacaccagctgcaagtgaggtccacagaacacctgcccttatatataacttgggtataaatttgaggattcccatgacccccctcttcaggtttgataattcactagaatgattcacagaactcgggtccaagcgcaggagcttctgtccccctggaatcagggtgcaccaccctctgagtacatccatgtgttcaccaaccaagacgccgttgtgaggctcagcgtcctgaggttttgttttttttgttttatcagcgtttcatcacaaaggcatgattgactaaatctttggtcacatgattaagcttaatctttagtccccctaacctgcccagaggtcaggcagctgtaagttccagcacatgacggagttttctggtgaccagctcccatcctgaagctatctagatgcccagctatgagtcacctcattatcataactaagacactcctgtcactgaagaaatttcataagtttttgaagcgctatgccagaaaccaggaacaaaggctggtagataatattttttattcttactattactataccatagtcatcccagatgtccacatcctaatccccagaacctatgaacatgatatgtgctgtggcaaggtggaattaaggttgcagatggagataaggctactaataaatgggcttgaaaataagggcttatcctccattacccaagtgagcccagtgctatcacgagtccttcagtgggaaggagggaagcagaaaagtcagaacgaagaggtgacatcataaaagactcaactggccattgctggctttgaagatggaagggggccaccagccaaggaatgtgggcagcctccagaagctggaaaataagagaaaatgggttttcttctggagctcccaaaaacaccaaccctgctgacacattgacttttgactcagttaaacctatttcagacttctgacctccagaaatgtgagataataaaactgtgttgttttaatatactagatttatgataatctgctatagcagcaataggaaactaatacagcagggcctagaaaaaggcaaaaaatggcattacctttcaccatgtaggacagcatgataaatgtactatcggagtttctttttttaggtgttgaaaactgttattctgttcaaaatgcaagtaaatttacatccttcaaatctctcctacttcttaaattatttactacccgtttctacttctagccctcagcagagctcaaaactgcctaatttaactacagagtattctgtatcttaatcaaagtgcatctgtgtgtgtctgatagataacagattcagagaagaaaaagaaattctttacacttgtaggatacatttgacctcattgattcatccagtgataatttattcattatcttcagtgtaccaggatctatgccaagcatggttttatatttaaaaggggttatgatctaatatgtagtataaaacttaattggcacagagggaaggattgctagctgagctccttcatagaatcagtgatgcctgtaggtggttttggaacttctctacttacccgtgaagtttaatctcttttccgaaagtgcaaactaatgcaataatattaataatgatggctgacacttaaggagcacttactatataccagagctgtccgtccctatcattccttaacataatattaacattaacaaagaatgtccttttacattctccatccattttcatcgttagctgctgcctttttctattgaattactccttcagctgctttaaccttgttttcataaatacacagaaactcgatctttacgtctctgttatttacttcctagttttatcccttttctactattcctaataaaccctaaaacataattaaacaaaaatttggctgaatgcatgagaacttctaaccttgaattgaaggagaacggaagaataactactttattcacaagtgtatgcctgagaaattagaggcactgagcttaacttgacacaattaacactaattacatgttagtgtccctagctgggaaattttctccagtgaaacttaccatttgctgatttatttctttaggaaccatattacgttcgttgcatcaaacccaatgacaagaaatctccacagatatttgatgatgaacgctgccggcaccaagtagaatatcttggactactggaaaatgtgagagtgcgtcgggcaggatttgccttccgccagacatacgagaagtttcttcacaggtgagaatagactcgtcagagaggcctagttcactgagaataagggagtcctccccgtacaatagtgcatcagcacatattaggcaatctataaatatttgttgggtgaacaaaagagctgaggaaattacaaatatgaaagactttcccagtttcaacatgagtccctgaattcatggtttatggaccatgaaaaagtttcagccttttgggaggaaatactggcatcatagcatagcagaaagagcactgatctgaaatcacattgtgggtggaattctgattatgccacttacttgctgcttgatcatgggccagaaatttaacttctatgaccctgtttttgcatctgtgaaataagtaaaataacatttcataggactgttatgagaaattaacctaagtaaaaagcctagattcctggtacatcatagctatttaattaacactgcctatcattactggtgtcagtaattatcataataataaaatattaaggagttaagcatggaggacctgaaatcagtctgcctggtttgattcctggctctgtcatttttcagttgtgtgactttggacaaattacatacccttttcatgcctgtttcctcatgtgtaaaatggggataataataataactaccttgaagcattgctagagggttaaataagataatatatacaaaacacttggaatagtagtacctccgtaaagtaatcactcaataagtgtaatatattgttgctattgttaatttattgttgataatgttgcttaatgataccatgtcatataaaaaaatgataatgataattgataacttggaatcacaagaatgctttaaattccatctgttttaaaacacttattgaacattttctataatctcgactatagttttccccccaaaaatgaataaatataaatttacataaaatataaataagaaaaatgcagaaaattaaaatactttagattagttggtcaaaaaagagtctctaaggagctgacaatgacaggaagcagccagccatacaaagatcagagcaaagagaagatggggcagagggaacagccagggaaaaggctctattgtggtagtaagtgaggcattttagatgccaaatgtagtccattgtggttggaggacactgacaggacagtggtgtgagatgagatcagagagatggacaagagccaaatcatgtcgaactttgtaatcagactaaactatttagattttggctaggcgtgatttaaaaaacaaagaaacaaaaccattggtggattttaagcatggaattacataaccttatggatgtcttaaaggaatcactgtggctactgtgtgaatagaaggcaaggagatgttggccaggcgcagtggctcacatctgtaatcccagcactttgggaggctgaggtgggcagatcatgaggtcaggagatctagaccatcctggctaacaaggtgaaaccccatctctactaaaaatacaaaaaattagccgggcgtggtggcgggcgcctgtagtcccagctactcggggaggctgaggcaggagaatggcctgaacctgggaggcggagcttgcagtgagccaagatcatgccactgcactccagcctgggtgacagagcgagactccgtctcaaaaaaaaaaaaaaaagggcaaggagatgtttaaggatgctattgcaggagtccaggaaacagggcttgatgacagtgccttcagtaagggactattatagatatgagagcagtggacagatttgggatatgtttgagggataaagttgacaagactctctcatggattggatatgatgaaataggaataaagaggaatgaaggatgaaaattatattttggcttgagcatctaggtaagcacagtaccatttgctgagataaaattgggtaaaataattttgaggaacaggatgtggaacaggagtaaagatggaatcaagattattctcttgactatgttaactttgacacatctctatgttcactttgaaatgcctactaagtatctaggcagaaatattaagccattagactttcatacctggagttctggaaagaagtttaggctgcaaataagagattttggagtcactggtaacatagattacatagaaagtctcgggactggatagtgaagaggaggaggtccatgacaatgtttagatttgtggtctggcatgaaagaaccagcaaagataagagaagcagcaaccaataaggtagaagaaaaaccagaagaggattatgttacagaagccaagagaagatggctttttttttctttttttgacagggtcttgctctgtcacccaagctggagtacagtggcgccatctcagctcactgcagctccacctcccgggttcaagcgattctcccaccccagcctcccaaatagctgggattacaggggtgcgtcaccacacccagctaatttttttttcatttttaatagagacagagtttcaccatgttggccaggctggtctcaacctcctgaccccaggtgatccacccgcctcagcctcccaaagtgctgggattataggcatgagccaccacgcccagccagaagatggcattttaagaagaaaagtgtagcaactttatgctgccctttatatgaagttcaagagcaggcaaaactaatttatggtgatagaaatcagaatagtggttagctatttgtatggcagactagaaagcagaatgggggaactctctgagatgatatatcttgatcagggtgtcggtttcatgagtatacacgtttgtcagaacttgaattatatacttgaattatatacttaaatgtgtatattttagtgtatgtaaatttgatcacaatttttaaaatgttttttaaaaactaaacttttttaaaaagtaaattagtgggccagaggatcaagctgaagtcttgttccagatctcatcacaaagaaaaaaagatgggaagtattaaacaaaggtctagccgcatgtaaggttgatccaggagcagcaaaacccatgtaacagaaggactagaggaaagaacaccaagaataggggagaggcactattcgaacagtggccagggatttgcatgaactgaaaaaagacgaatcttcagattaaaaggatacactgattgtcaagcataagaattttttaaaaacttaaaaatacatttgttcacttttagaatgttaaagaaaaataattatagctcccaagaaaaaaagacaaactgcctttggggagtgagaatcacgctgacatctggttcctcatgaacgtttgatcaagtagacgaaggagcaaaatgccttcacagtgtaaggaaagggctttcatgcctagaattgtattctgtgtcaaaataccattcaagagtgtgagtaaaataaacagcattttctggcatacctagtttgagaaagtttattactcatagaccctctgaaaaatcttctagaggatatacttcagcaaaaagaaagatgaatgcagaaaggaaacatgtggcaggatatatgcaaaaaagcaacattgagcaaagaaatctgtaaaactttttgttaaatctaaacaagtactgattgtaagggtggggaagaagtctttagtgataatctggaacaaaaattaaaatgggagtgagaagtagagataattaaagattttgtcctatttatggaaaggatattatagaccgtgattaactagacaggaaaagaattatgtgttgaaattttcaagtgagttataataatagttgtgaatattttgaaatgtttactggatgtactagatactgatttaaacatttcacatataggaagtcactggaactgacaaccacttgaggagtatacattattccccttttatgtggctcatccagtgatgatgagagaaaagataatattttctacagtgaatttttgcttttagattctgcagattttttgcaagtagtttaggtttgaacctgaatttttgcttgtgacttttcttcattttcatttattttactgagaaaagagagaaggatttaaaacatgctgataaccttaaaagctactaaagtcctttagggaggtaaaactccttgtcagaaagcagatgagttcaactttttaattagcaagttcagattgctggtttgccagagaaccagggtcatgcagtttgctggcatgaaagaaggcagagtgcctcttgcctgccatgggagctgagcagtggggctgtaggatagcaatccagtttctgaagcgtgcctgaaacaaacaacaccagcactacccatatgatgacccagatgtagacccctactatagtttggtgtaacaaatttgagaggtttctgatttcactttttttcatgtgacattgtttggtattacctctgtctttatattaaaactttttcatttggctttgatctctacccccatctagcaagtgagtaggctttaaatgatttcttttcattcattctgcaaatatctattgcctcatagtatggcaggcaacatgataggcacatggtatatagtggggaacaaaacaaagtccctgccttcatattagccacagactagggagggagactgacattaagcagataaacccacaaatcagtatgattacaagttgtgataaatcatgtgagaaaagaataaataaaactagttgccttagagagaatattgggggtagagggtttgttgatatacaaagatcaagaaaagactaaaggatgagaaggagccagactttcaaggactagataaaatgcattccgggcagtgggaacagcatgtgcaaagaccctgaagtaggaaggaggcaaccgcattacagaaccccaaagaagttaacatgattgatggatagtgaggaaggaaagcagccaaagacaaaaatgatttcaagctttttagaaaactactctgactgatgtatgcagaatggattggaaaggaaatggaaaataatttaggagtctgttgtaaactagaaggtggcttgcctttgaattgaagcaataaagatgaggagaattgttaaatatattttggaggtagagtcaatagaacttgatgatggattagaaatcatgatagggcagggaaagaataaaaatattctcaggatcctggctttagtaactgggtagattgaggtaggaaagactgaaggagtaattaagatgccttcaagacctgtatagacattggatatataaatctgaagctcataactgagggctagactagggataacacacaaattgaaaatatatgtttatattttatatacttataaaatatacatatttttgtttttatatttggaatgttttattaaaagtaagtggactagatgaggtaatgtggggagagaatacatagaaagaagtccaggtcttaggcttgggacacgcctgcatttgggggtatagtagtagccagagtagccagaaaatcagattgacaagatatatccagggaggcagaaggagagcatgctgtcatggaatctaagaaaagagatatgtcaagaagaaggaagtaattaactgtaattagggagtaattaacagatgcttcctacatatctactatcttaacaagaaatatgaaaagccctgtgaatgatttatattcctttgggtatatacccagtaaggggattgctgggtcaaatggcatttcgggttcaaaatctttgaggaatcaccacactgtcttccacaatggttgaactaatttacattcccaccaatagtataaaagtgttcctgtttctctgcaaccttgccagcatttgttgtttcttgactttttactaattgccattctgactgacgtgagatgttatctcattgtggttttgatttgcatttctctaatgatcagtgatgttgagctatttttcatatgttggccgcatgtatgtctttttttgagaagtgtctgtttatatcctttgcccactttttaatggggttgtttgattttttttttcttgtacatttgcttaatttccttttagattctggatattagtcctttatcagatggatagattgcaaaaattctctcccattctgtaagttgtctgttcactctgatgataatttcgtttgttgtgtagaagctctttagtttaatttgtcatttttgctttttttgcaattacttttggtgatttcatcatgaagtctttgcccatgcctgtatcctgaatggtattgcctagattttcttctggggtttttatggttttgggttttacatttaagtctttaatccaccttgagttagtttttgtataaggtataagaaagggatccaatttcaattttctgcatatggctagccagttctcccagcatcatttattaaatagggaatcctttccccattgcttgtttttgtggatacatgcacaggtatgttcattgcagcactattcacaatagcaaagacatggaatcaacccaaatgcccatcaatgaaatgatagactagataaagaaaatgtggtacatacacaccatggaatactatgcagccataaaaaggaaagaggtaatgccctttgcagggacatggatggagctggaagccactatcctcagcagactaacagaggaacagaaaaccaaaccgcacatgttctcacttataagtgggagctgaacaatgagaacacgtggacatatcggggtgaataacacacactggggcctgttggggtgggggtgggagaatggagatcatcaggaagaatagctaatggatgctgggcttaatacctaggtaatgggctgatttgtacagcaaaccaccatggcacacatttgcctatgtaacaaacctgcacatcctacacatgtacctcagaacttaaaaataaaataattattaaaaaaaaaaaagaaagaaaagacatatgagaaaactttaaagattcatgtaaggcacaaagcagactagatcaagtgggaaaacatctcttgttcttgaataggacaactcagcaccatataaaaattaatggattcactgagtgcagtggctcttgcctataatcccagcattttgagaggccaaggcgggcagatcacttgaggtcaggagttcaagaccagcctggccaacatggtaaaaccccatctctactgttaacaaaaaaattagctgggcttggtagttgcctgtaatcccaactgctcaggaggctgaggcaggagaatcacttggaccgggaggcgggggttacagtgagctgagatcgcaccactgcactcatagatagagcgagactctgtgtcaaaataataataataataatgtatttaatgttccaactcactaaatctatcaagggtgctttgggtctttaaaaattgtttattcactgaattctggtttttttgcctggaactgtaaaacttgattctgaagttcatttggaaaaatatgtgtgccagaataactagaaagacctttaaaaaagaaaagaattaggaaaaacattaaaatgtacttgtatcctctataattaaaaccatgtggtagtgatgcacagatggacagacacagcaatgaaacagaccagaaagtccagaaataaactgaagcacatatgataaaggcagcatgttaatcacagaggggaaagatggactttttaatagtgttggaacagctagacagccatttgttaaaagataaaattagatccatacctcacaccatataccaaaaaaaccctctaaatgatcagaaatctaaatgtgaaaaatgaaaacatacaagtactagaagaaaacataaatgcattactctataacccaagtgaagaaagcttttcatacaatgacttaaaatttagatgtaatataagaaaaaaactaaatttgactacatgtgttaaacaactttgcatgatggaaaaagctctgtgatagccttctaagatgccctctacctcctggtatccatgccctgtgtaatccccttcctgtgagtgtaggctagacctagtgatttgcttctgacaaagtagaatatggcaaaagtgataggatgtcacttttgagattagaccacaaaagactgtgactctgtgacttctgtcttgttcacactcacactcatgaagcaagccgctgtgtggtgagctgccttaatgagaggcccacatgacaaggagctgttgactgctcgtatgtagaaatgcaattaatttttgtgtgttgctcttatgtgcagcaacactgcttaattttcttttagttataatagtttttttatctagagatctgcttgatttcctttgaggaaagttacattatacataagtagtatccattttgtttttctgtcagtcatttaccaattatgtcttggtctcactatgtcgactagacctccagagcaatgccgagcaggacccatgacagagccacccttctcttgtatctgtttgtaaaaagaatgtttctaaggttacccctttatgaacaatatttgccgtaggattttggcaaatagactgtatgagcttgaggaagtcccttctatacctagtttagtaagagttgttatcttaaagtgttttattttactgaagccttttttgcataccttatgaggctaatgaaattctattgatagtttgctaagatttggttttctatgaggtgtcttgcattttattgaatagttttctattgagatgaccgtatggttttctcccttaaccctgtttctttttttcatccaggtataagatgatctctgaattcacctggcccaaccatgaccttccttcagacaaagaggctgtcaagaaactaattgaacggtgtggttttcaggatgatgtagcttatgggaagaccaaaattttcattcgaacaccccgaacattgtttaccttggaagaactccgtgcccagatgctcataaggattgtcctctttctacaaaaggtaattttatattttatatataaggataagattttgcttttaagttcttaaaaatttgttgcatattttctttaattcaagaaatattcctggaagatatgttgttttatgtctatgcatatcttaaaatgttttctgttgccttcacacatggaaaacttacttggttgccccagttcaaaattatttttgcccaagttcaaaattattttatcttcaaaactctgaagatattttgtttttaaagttggagagatgtctgaaccagtctttctgtcctttactgttaactgtgttttttccttcagcttaaatgcataaaggacttttttttccccccccgagacggagtctcactatgtcacctaggctggagtgcagtggcacaatcttggcttactgccacctccacctccagggttcaagtgattctcctgcctcagcctcccgagtagctgggattacaggcgcacaccaccacacctggctaatttttgtgtttttagtagagatagggtttcaccatgttggtcaggctggtctcgaactcgtgacctcgtgatctgcccacctcggcctcccaaagtgctgggattacaggcgtgagccaccacgcccggctgcgtaaaggacttttaaatcttgtaagtaaaaaatgttgccaacatgtttgaaattgcctccttcacctatcattacctactcaccaccacttgacctcagtgctgactcaatgctcgttagttgatggtgctgtacctgtcatcattgatctgtgcaaggccccttctcatttcattcactaattcatgtatttctttgtatcccccataccctttcccatatcttccatatgaactaaaataatgcaaaaaattgtagagctatatgaaaaatcatatacctctgtgaggatgtccttgggatatatacctaggtgaaaagttgctgggtcatagggcatgtgtatacctaattgatataaatagtgccaggttatcttgcatgagccagtttgcaccgccaacagctgtatatgagggttactatgtgccatatccctaccagtatcttccagctacctaaattttgtcagattaatagatagaatgatatctcattgttgttttactttgtatttctctgattacctttgagtttgattatctcattaaatgcttctttgcttgctgtattttcctgtaaactgtctattcatactttgtttttctactcgagctggtactttcttgttgattagcagaaatgccttcaatattccaaacattaacctcttatttactttagatgttatatattctcctattctgtaagcattctaatgaactttatccataagatgctttgtggaccgaattcttaattttgacataatcaaagtcttcaatattttgccttatagttagtgatttggaattttctttaagaaggcttttcatgtctctcagtcacaaagatattctgtattttcttctatgaactgtatggttttacctttcacatttaggtctttaattcatttagaatccaccttcatacatggttttatataggaaactagttttatttttctccatatggtgagaaagttttctcaatatcatctactaagcaatctgcccttttcccattgatttgcagtgccacttttattatatattaagttcctgtatgtagatagggaatagttttattcacacttacacacacatcctgtctctgtgtgctctattctgttccatttttctatttgcctgtttttgcactaatgcaacacagcttttattatatatattagtgtgttagagggttagtttatcttttctacttctttattaaggttgattaacctatacatagacctttattctgcagtatacattttaagtgcataagtttattaaattcaataatttttattaggattgaactgaatatagattaatttgaaatgattaacatttctacaatattaaatcatcttattaagagtgtaatataggtttacttaaatcatctttattgaactttagacttaggccctatgaattcatggttaattcctagatactttattatttttgttgctggggtgaatttttttattatgtttcctacatggcagtgttagtacagagaaataatattgatttatgttgctttatctaaatctagaacaaaacctttcttgatttatatttgttgattctgttggctttcctaggtaaataattatatcatgtataaataatgaattttttcttccagttgccaagatgtttctaggtgttggtttctttttatttattttgcctagagctcaggaaaacatttggactggaatactaaattctgtttcatcccaaaacattttccttctattaatttttttttaatgttgctttcattcagttctatttctcaagaatgcttgtaaatgtttctgttggatctctgttttctgccatagtaaattattttcaagtatctgttcttctctgtcttcaagtcctggagtccttacccttggatctcaagtacttacctgtaggcttgtttttagggtttttttggtagattcctctgcccccagatctgttactatgtctttttttctttctacctattcaagagattgattgattcaagctcagagttagactctgaaccagggtgaccatacctctcagtttgcttaggacagtcctggtttatggcaattgcctgttgtgactattaatagtaccccttttactctcaaagtgttccagtatggataaactacataatcactctaccctggaactcactttctttctacatggtgcccggtagattcctctttttaaatctacagcgatagtttgtttacttccttcacaattgtcagtgtcccacagacttcagtctgtggcagctctgctagccaaagatgagcccagctcatatataaaaagatgtaattccaggtgtgctactagggctgcagccactaggcttcttcctttcctggttctctctgacagcactgtgcttctagaaatgcagggtgccattaccagtccctacctctgctttttttctggtgagaaattagtctctgtctaggaaagagattctaaaagagaagggacagtggcttcaaaaattatcacatatgcagtgaagggaaagctgtccagtcttctctgtgagacagatctcgcatttcttcaccatgaggcagtggagtagggaatataagggtctccttccctatgctcaagaagaccattccagggtatcttatgtgcgacctactgattatgtttttttggatcaactccacaggccataaaattggaggaaatttctctgggcttttcggaatgggtcatcagtcacctaaccatgtgatgtgtgtttttactttttctgtatccttatagaaatttaatgggaagttaggagagacagtatcaggagctgttattttaaacaagaatctccaacaattgatttttatttccttttaaaataaaaatagctatactgataatataaataaattatgctcattgtaagaacaaatttaaagcatacaaaaaatataagggaaaatgtgaaaaagtcacctaaaaccccaccatccagaagtaacatcattaacattgtggtggccatcctttttgatatctttctgtgcatatagacaaacatatctaatataatataaagaagatcatagttcatatgagtgtatttctatgatcaactttatctttttctgcagtactttgtactatcttttttccccacatttttcctctctgcccacatttcttctcaccccctatgtcgagagtcctcaagactatcctgttttgatgattcactagaaggattcacaggactcagcatagtgttgtactgatgagtagaatttattacagcgagaggatcaaagcaaaatcagcaaagggaaaatgcacaaggagtgagatccagaggaaaccaggagcaggcttccaagagtcttctcccagtagagtggcaccagatgcactcaattcctccagcaatgagctgtgtcaacacatgccaagtgttgtctaccaggggagctccttagagactcagtactcaaaagtttttaccaggaactggtcattaggcaccttctgcctatcatgtaccaaaattccagattctcagaagggaaatcagatattcagcacaatctacattatttgtataaacatagtttaaacacagtaaaccaatcttattacttagggaaagttttgtatcaacgtagggagctgttgaccagcaagttcccagacaccagccaaggaccaacagacagaccactgtaagcatagtagtctcaggcctgctatgtaaactcttttatggggacccccattagtcttccctaaactttaatagacatctttatacatgtagccttccatactggtgccttcatttctatgcgctgaattcccaggagtgagattgttaagttgaagagtatatatggttttaatcttaagaaatcatatttcaacccacaatgcaagtgaactcttttctctaaatttttgaccacagtggcttttaccaggctttttaattttttcccttctgatcaataagaaataataccttatttctacattttttaatttccatgactacccttgagtgtgtgcttattggctttttggattgcctctcttgtgacttattgatattcttggcccatttttatattgggttgttcatccttttcctatgaatttgtgggagctatctgtatataatatgcattaatattatgtattacagttatttttgttagagttgtcatttgactctgttaatcgtaaactcttcgatgtgaaaattttcactctcaatataatgaaatttgtctttttcttcatagcatctgggtttcttaaaaaaaaaattatggatctgggaggctgggcgcagtggctcacacctgtaatcccagcactttggggggccgaggcgggtggatcacaaggctaggagatcgggcccatcctggctaacacggtgaaaccccgtctctactaaaaatacaaaaaattagccaggcatggtggcaggtgcctatagtcccagctactcaggaggctgagacaggagaatggcgtgaacccgggaggcggagcttgcagtaagctgagatcgcgccactacactccagcctgggcaacagagtgagactccatcttaacaaaaaaaaatgtatagatctggaatttatttttgtacatgattttgtcccaggcgaataactagctgttttaattttatttaaacatttctattttttccactaaattgaaattccacctttgttcagtgttaatcttccatacattcatgaatgtatttcaggactcaccattttattctacagtcaattcctatggcagtaccatgctgtttttgttatagtacagcataatagattttaatatctgagaacctggctttaagtgtattttcataccttttctgtgccataatagagatttaggccaggtgcaatggctcatgcctataatcccagcactttgggaggctgaggtgggcagatcacttgaggccaggagttcaaaaccagcctggccaactatggcaaaaccccatctctactaaaaatacaaaaattaacctggtgtggtagcgtgcacctataatcccagctactcaggaggctgaagaacgagaattgcttgaacctggaggcagaagttgcagtgacctgagattgtgccactgcactccagcctggatgacagagtgagactctgtctccaaaaaattagagatttattggtaagttgtagaaggttcagtcaagaatgttgactgtattagtctgttctcatgctgctaataaagacatacccaagactgggtaatttataaaggaaagaggtttaattgactcacagttccacatgacttgggaggcctcacaatcatggcagaaggtgaaaggcatgtcttaacatggtggccggcaaagagagagatgagagccaagtgaaacagattttctcttataaaaccatcagatctcatgagacttattcactaccatgagaacagtatgggggaaactgcccctatgactcaattacctcccacttgggtccctcccacaacatgtgggaattatgggagctacaattcaagatgagatttgggtggggacacagccaaaccatatcattaactaaaaccagaacctccaaaatttatcgttcttagagagatacaaactgtgttactttccgatgcataaaaaaatgtatagtcttccactatcatcatctaaaccattaactactcagtatcaagaattacagataatcggccacgtgtggtggcccatgcctgtaatcccagcactttgggaggccaaggcgggcggatcacgaggtcaggagttctagaccatcctggctaacatggtgaaaccccgtctctactaaaaaaaagtacaaaaaattagccgggcatggtggtggactcctgtagtcccagctactcaggaggctgagacaggagaatggcgtgaacctgggaggtggagcttgcagtgagctgagatcgtgccactgcactccagcctgggggacagagtgagactccatctcaaaaaaaaaagaattacagataatctgtttagtgcatattgttcctcttagtatacagtcagcccgctgtatacacaggtttcacatcctgtgaatattgtattttctatctgcattggggtgaaaaaaaaaatctgtatgagtggacccacgtagttcaaatttgtgctgtttaagggtcaacagtactcagtcgtgtatttgatattgtaaggaatttgtgaaatgagtagaaagatctctttttttaaagaaataaccatctagattgcaaaaactgttttattgattttatagtggataatttatagcaatacaagttcatgttgaaaaatgaaaaaatataattttatattatttaaaatatgttattttatattaaatgcaaatttaaattgttacatcactgttgtgtaatacttttttgttatatctttactctctacacatttattgcatatttgtaatagctgacttagtccttcataggattcctcaatctgcatttcctcaatcagtctactattaccaggcatttaggcgtttccaattcttcactctcacaggtctcattacagtgcacatccccgtttacctagagcagtgcttgacaagtactaacaattcagtgaatgttagctgctgttattactactagtgctgctactactaccattgactatttctaaatatccttgattattttgttggaataaattctcagacacgaaattgttggtttaaaagatgtacactgttaaggttttctatacccattttcaaatggcccctagaaagattgtaccaatttatgttcccaccaactaatgtgggaaggagtttgtctcactgatgcactggttattttcattttttagagcactctttgtgaatgactgaaaacctgaatgttttgtctgaatattgaaaaatgtgttttataaaaagccccagttatactatacccattaaaagaaatgaatcaatgtagccagtgagatttttataaaggtcattcttctctacctttcataatgcacatttgattcacttacccatataccctctacatttgagtttgtgtgtgtgttccttatatcacatttgaatgagaaatcactaagatggtgtttctagaaggcactgaagaaactatataagttttcaaaattacagctttaagaaaggaggtgctaagaaatcagtaaactatgttgtcatttcagcagcaaacacgtggatggagctgagttgaagtatacagtgatttagcgtattatgagataaatctgtccacactgattttgttattttagctttttttcttcttcaacctgggcctttctggtttgggatttatcattcatcttctatgtgtcatattcattaattcccagaaaataggacacttatttgttgcatggctggggaaatcctgaaagaagactgtagttttaacttttaactaataattaacaattagccaaattttaatgaaaacaatgtaccaaatgcataacaaagatttataatcctctaatattctgtaaccattcagactaaaatattttgttgtcttggaagaggaatgggatatgaaaaccttcaaaaaacttcctttcttttttggtagatatatagtttatagttatgttctcattctagggaatcatagggcaagatcaaaatcgtcaatagccaggcacggtagcatgcacctgtaatctcacctacccaggaggctaaggcaggaggatcactttagcccaggagttcaataccacccttggcaatatagcaagacccctatctcaaaaaaaaaaaacaagcaaaagggatcaaaatttatatataaagttatgttaagaatggattctcaaagggagatagaaaagaattgagaaagtttgtcttttgtgtccattaacaacaaatttggacaggtagataaattgaaagaatagatttcttgacccacctataacacaaataggtgcctttgtgaattgtttttatttgggggatttggccttttttaaagggcatctataattaattatagacagagatcttaattgctcactgtgtcacatagttggaccatttcagattgcatagctttgattgtagctctaggaatggaaacagctcttccagtgtagttaagagggcaaggcctttcctctgtcactcactgaaggctactaaacatataaattatttctcaaaatggtaatatcttaagactctaatcattttcctctgagcaatttgtaggtaacttagcatcacagttacagcttatgaattctacagcagcaagaactgtcaactctttggaaatttaaattatgctaccccttacctgctccatgttccatgctatgagttttccagtttttatttcaggcctaattgtggctcgcagcttgtagcatccatgatacagtgaactgtggggtccacagtcaagcttgaatttgaagtcagttggcagtcttccattgtagttgtgtgaaactacagacatgtctttataggaaataatagaaatacttgctataaatattcagatgcattcagtccccagaatgtatttttgcctatctggtagattcctaattagaggatgatagtaatttgattattaaatcattgcaaaattgatgcaattccaaaagcagaatagcactggggggcgaggagggacaaaggaatgagtggagaagaaagtctgtggaaagacgtgaaagagaaaaagatatgaaaaagataaagccaagaacagggaaaaaaaagcctcaagctagtgaaataaaatattcaagatataggctaaaattatatgattgtttctaattttatgtggaattcaaagtggaattatagggtagttagggatcttttcttaattcaaaataataaacatttgacattcccctagcaaactaatattatgaaaatattcaaaaatagggtatgtgattttatcaataaatcagtgcaggcataatgtatatacaaataacaggcacaccacgtacatatatgcacacaagtataatagtgggaaaggaaataacagaagcatgtaaaactcagcatcatttttgtgctggttcatgggaaaatttttttctgttcttatatcaggattagctgtacttctcctgggccactgtcctcaaactggcaggcatgttatggggaggagccaggctgctgtgtagcctgcttgtgagctttccttaagcaatgatgttagacagccttgaaatattcctgcacttaagggaaatgtttctagtggtttctacttttgattgatactggttgacatagatacatttgaacatgcagacatgctaaggtagtcatctattccagttgtgttaagagtactgtactttggcagggcatgggggttcacccctgtaatcctagcactttgggaagccaaagctggactattacttgaggccaggagttcgagaccagcctgggcaacacagcgaaaccccatctctacaaaaataaaaataaaatattaactgagcatagtggagcacacctgtagtcccagctactcagaagcctgaggcaggaagatcacttgagcccaggagttctaggctatagtaagacatgattgcgccaccgaacttcagcttaagtgacagagtgtgaccctgtctctaaaaaaaaatgaaataaattttaaaaagggtaatgtaccttaaaaatcaagaatagatgaattatatcaaattacttttcaacagatatcaagatgcttatgtcatttttttctcttgaattatcaatacagagaattctaaccaatttgatagcaatatgatgtttacctaacaagataaaatggacacttttctttttttgtctgtattttggaacagtctaaatagccttggagttaatcttttgaggttaaactcccttgtgaagccatctggaagggggtatttgttggagtgtacctcttcaacagcttactctagttctttgtgataattgatctgtttttattttgtgggattaattttggtaatttatattttcctagaaaatcattcagattctctaatttaattgaacagaattgaacgaagtagtctcttacattttattctcatttcctttgaatctgtagtcattccctcttaccatttcttattttgtgaatttcatttatgcttattatcttttttctttatcagctttagttaatgatgtattgtattattttttcctcaaaaaatcacctctgatttatttattctactattttcttttttcttttttttttttttttgagatggagtcttactctgtcatccaagctggagtacaatggcgtgatctcagctcactgcaacctccacctcctgggttcaagcgattctcctgcctcagcctcccaagtagctggtattacaggcgcacaccaccatacctggctaatttttgtatttttagtagaaacagggtttcaccatgttggccaggctggtctcgaactcctgacctcaagtgatccacctgctttggcctcccaaaatgctgggattacaggtgtaagccaccgtgcccagcccattttctgatttctaatttgttaatttttttctttatcttcatcaattcctctcctttttggaatataaagagcagaggcaatcagtttatctttctccaacttctggagttgaacacttcgttcagttttttctttcacatttattagtaatgaactgtgaaattttttgtggatctgcttctgctgtatctgtaacaggggtccccaacccttgtgccacggactggtactggtccgtggcctgttaggaactgggccccacagcaggagatgagcagagggcaagcaagctccgcggcctatcagatcagcagcggcattggattctcataggagcaggaaccctgttgtgtgtgaaatgcccatgcaggggatctaggttgtacactccttatgagaatctaatgcctgatgatctgatggaacagtttcatcccgaaaccatcccctaccacctcccagtccatagaaaaactgtcttccatgaaattggtccttggtgccaaaaagttggagactgctgatctgtaggacctgatatattattatttaattattttttatgtttacattttctctttccctgaaagttgtttaaaaaaatttttttaaatcatttccaggtgatacatgttttgtgtgtgtattttctttacttttctaattttgttcttaattttttagtttcactgctttatgatcacagaatgttaaatgttccatttctactttctggaatttattgaggtttactttagggcctggtgtacagtgattttttgtgagtataatgtgaaataaggtatatgttattttttaatatttttattatggaaaattgcaaatattcacaaaaataggaagaacagtttaatgaatctccatgtttccatcacccagattcaacaattaacaatattttgtcattcttattttatctaattcccacctcatgcttttatgtatgtttgttttggtttggttgaagtttttaaagaacatcccagatatcttttgtcacccttaaataccaatctacagataaggactttatagataaggacttcatactgttatcataccatataaaattaataattaatagtttctgttcattgttcccagttgactggaaactatcttttcacagatggttagggataggcgtggccacccccagagctgagacagcattgagaaaggagcacactcatctttatcaaagggcagcatcaacacctaaggcagtgagtggttcctggcagtctgacagttatctctgtcatttgggagttttgttcccatatatttcagaaacttgatatgtaatattaattatgattttcagtgacatatcatttcatctttaaaaattgaatgttttaaaggtggcttatgggctgggcacggtggatcatgcctgtaatcccagtgcttatttggagactgaggcagggggatcacgaggtcgggagttcgagaccagcctggccaacatggtgaaaccccatctctactaaaaatacaaaaattagccgggcgtgatgacacaaacctgtaatcccagctattcaggctgaggcaggagaattgcttgaaccccggaggcagaggttgcagtgagccaagatggtaccactgcactccaacctgggcgacagagcaagacttgtcttgaaaaaaattaaaattaaaataaaataaatgtggcttatgtatggcaaggagtggcgtctttagtttgtctaaattaacaatttcatattatttatatgttcttatatttatttgttaaatttgcattttgcattttttattattggattatattatggctttagctcccttatcacaagaaagatcttgtgaaggattaaaagtggctcattaaagcataaacatataatgaaaatagtaaattctgaaactgagaataatataataactgttaattataagtagactcaaagattaatatagtgtaatcattttcagtgagtacgataattttgtaaaccagccaaaagaaaaagtatgaatagaatcattatctgaaaattggattttattggttttgtcattcatttgcctaatgttttatttgttaggaaactgtcagatagagacatgaagtgatgggggctttcatatgatttctaaacaaagcactctgacttctttgtaaaaccaatcaagtgttttatttctaagactaaaagcaaaataattatttctcatataaaattgattacttttgtccttaaaaaagaaaagaaggaaggagggaagggggagggggaggggggaagagagggagggaggaaggaaggaaagaaggaaggaaggagggaagggggagggagaggggggaagggagggaggaaggaaggaagaaggaaggaaggaaaaagaaaagagaaaagaaagaaaacacaaaacctactgatatggtagctagtatttcctgagtgataggcactactctggatactttactattctggttatttaactaagtcattacaagaaccttgtgaatgagtgtccattattatttccatttaatagataagggagctaaagccactgagtggttaaggaccttggcagaggtcacacacggtaaacaccagagctgggatttgaacctaagaggcctgcttcccacacacactcttttgactgctgtacacttttgtaccatagtggcatcattcaagaaacagctatgactcacactattgaaaagtttgaaaaactagtcacaaaggtgatgtgttcagaggatgtcctcaaaggtgatgtgcatcatgctcacaaagaaagcagaatgcaatttgcaaaattgctttattaaatagccttggtaaagtggtaatgtcttctgagttattcactgtcaagtatgtggactaagatacagtaatacaattggaaaaaaaaccctgatgttgatgtatgaatcagctcttgacacgtgtatagtaacaaaaagtgatcgatgacttttttttttttttaactgaaaatacatgctccaggagaagagatttttgtttgttttggaaaaagtgactttcgagctatggctaggttgggaaaggtgcatttacaaagcgaccaagaaagcatcagctgaaacaggaagctggggtatgctactaggcaatgaaagaggttgcccccaatgctagtccattcattgctttattgatggggaatatttatggtcaaaaatatgctgcttggtcttgactgagtgttgaaagaaacaaaagcgtacctttgattgaatggtggccattgactccgtatttttccagtatgctgtgagaagaaatgggtagcatttacaacactgtgacatgtggctatgcaggaaaaggtgctcacatgcattttaaaatgagtaataaatgtggatttgttcattcattactgaatggaaacatgaaaaggaacaagacaaagctccatccagaagctgacaacccagccagggggcagatgtgtgcacccaaaccagtgaaatggagtaattacgaggccctagggtagtaggcagtgactgcaaggtgggctcagagaagaggcacctacctgagctggggagaggacactttctggaagaagtttgccaaaatcttaattaactctgttagattcacatcttacttggaaacacattaacagggaggacagatcttaatctgtatttcataagccatttatacagattgagttaattagagctggaacttgacattatagtgggttaactgtcactaaagctagtgggtaaaatggacttcctttgacaaatgtagaaagcaaagttttctacaaaaatattcaaacaaatattgttttctgtaacaaacatagactagtcttagtctttggaattactaaaacagcctttccatatcacaggaaagtgcttgccctgcatagcaaacagccaaatgggtaactagcaagcaaacacatgtggcagcagtgccacgtagaaggacagaattaaacttagaataacttgaattttataacaggtatataaatatttactaaccctttccttatttatctaacaagatgtaaagagctagctcaggacttgtcttcttaaagcacctggatcaacaaactcccattctgtcaaggttcctcattactaactactagttgagcttggcagcctctaatttggttatactttttttgtcatagtgtataatattctgtttccacattatactgtccatagtcttctgcaagttgtttttttttccactcagaataatgtttttaaaatttgtataggtccataagtgtactaatggcttatttacttttgcttgttattttactatttaaaagtcacagttaatttcctaataatagtcagtttttcagttttttgtcattctgtgaaatgccacagtgaacatttttgtacatattctcttgtctgcaagtgaataggtctctgtggggctgccattctcaaattttgagaattctaaagagcttaccttagaaaattctacaaaatgcaacaatatgcaagcacatattccattagctatcagagtgatgatgtcatcacatgtgatatagtctctggaaaattctatcataggctgagagggtgagaatttaaaaggcaaataacctgctggtattcttagaaaattagtttttatcttgaagatcccctaaaagtaaagggtctcagcagtgctcagggttccccaaccacactttgagaactgctactcttgggtatataccccagattgcaaatgctagattgtagagtctgcacatttttaagttcactaaagtttgcccagttgctttccaaaataattgtaccagtttatgctcaccaagaaatgtatgaaagcttttattcttctacatccttatcaacaattcacattggcagattttttaattttggccaatcaaattttgatccctgaatatgaccgttactttcttacaagctcagctgtgcataggggtatttgttacattgttgtagcagtagggatatcaagttatctattctaccttcttgccctactcattggaagtcctactggaagtttaagagagaagtggtgtggtcagtttgtgactgttaaatagatctgtgtcaaggaaacattagaagtcaataagacaaggaaggatggccaattaagagcctgttgctgtaatctaaggcaggggtccccaatccccaagtggcagactggtactggactgtggcctgttaggaaccaggccgcacagcagcaggtgggcggcaagtgagcaaacattaccacctgagctccgcctcctgtaagatcagtggctcattggattctcataggagcatgaagcctatggtgaactgcgcatgcaagggatctaggctgtgcgctctttatgagaatctaatgcctgatgatctgaggtagaacagtttcatcctgaaaccacccccacccccaccatgccggtgcatggaaaatctttcttccacaaaactggtccctgatgtcaaaaaggttcaagaccactgatctaggggaaagctgatgagaacttaaattgcagcagtggtagttaagatgcagaaaaatgtgagaaatatttaggagaccatgaaataattagcagactatgatagttattggacaggagattgatgaaaggcaggaatcaatgattcccaggtttccaccatagagtcctggatagctggtatcactgacaactgagatagaggtagaaggtacagaagcaggggcatatctggaagatggtagtagtgtggggtatgatgtgttcgaggtgcctatgaggcattcaagtagagatgaccagcaagcagttggatatatgagtcagagaaacaaaagaagtagcaaattttttttttttttttttttttttttttgagacggagtctcgctctgtcgcccaggccggactgcggactgcagtggcgcaatctcagctcactgcaagctccgcttcccgggttcacgccattctcctgcctcagcctcccgagtagctgggactacaggcgcccgccaccgcgcccggctaattttttgtatttttagtagagacagggtttcaccttgttagccaggatggtctcgatctcctgacctcatgatccacccgcctcgacctcccaaagtgctgggattacaggcgtgagcaaattttaaataagaagaaacagtcaacagcatcagacatagtaggtatgtccaacaccataatggctgaaaagtgcccacctagtctggcaattagtaggtcattggtttattaataaccggcatgttaaagttggtcaggatgagctcagagtgtagaagaaaaaccaattgccaaactcctccggcgaggaaataaaagtgttttgaacatttgttggtgaatcatggaaatgaaaataggtatagcaaaaaggtgtccgtaatgaagaaactaagaagcgttaattttccgtaagacatttagtaaatgttgaaacactgaagacttacccctacatatattactaagcagcgctattagaatagcattactatgtacaagtcactgaacttactatggggaaaaaaatttggtcgatttataatataagcctataactggtccatttagtatttaacatattggcaaatgtaaagcccttttagaacaataaaaatgcttcagcaacaacttaacattgaagcaacagtacattccctcacacccggccccactctccttttttctcttcccacctacttggtgaataaaacgataaaagcatatttggaaaataatggtgacatgtcaaaaataatttgtttcttatttatctcctctcagacactgccaataagaaaccattgccactccatccccagcccactctgctgtaagttggaagcagatgatttgctctcctgaaagagcagcaaatccgttgcctgggtgatatctcattactaaggcaaccaatttggcgcatcagtgtgaatctcaattttaaaatataattatgccaagagatgtacatatgcttgaggtttacttaaaagaaatctgttcgcctttgcaaggaaaacatttcctatgttaggtgaaaaaagaggggaaataccacttttattctttgctagctaaaatacacctttcaattgagcccccactatgtttagtaaaacagcttgcattggtttctccctcaccacttttttttttttttttacttgaggtgttccctttccaagacacttctctcttgagacttgtcactcataacccaacagctgttgtctccatgacaacattttctggcccctataggtggtgataggaaaaaaaggaaggaaaaaaaaatggctacatattcatttcacttttcttttttaattgctacaagctcaagagatttgactctttgtaaggaattaattaatgaaggggaagtgatttcgtgaatagatgcttaaattaaattacaaaacttctgaacaatttaatgagaattgctatcccaacctcaaatgaaaggtcttatagttaagatgtatacaatcaaaagcttgtctggaggaagactgtattacagaggtagctgaagatgcgcacagccaagccatgtaaaatcccagtgaattactgctgagcaattatttttttcttccttgccaacaataaaacatttgtttaaaaataaaaagagcatattttggtggagggagtatttaattatcaaccttattaaagaatgcctattaaatcatgaaatccttgcaactcattaagtttcctgtttgctgtagatgccaggaagctcagggctcagatttatatgtaagtccaggaaccatcctcagtttgggagtttcagtggaactgactccctttccttcctaccaccctgcccctgttgcccggctgtccttttattcttactttggtaatttagttgtctgtatacctttttttgtaagttccctctaatccttttaaaaataattagataacaagtattaaaggcaatgatgaaaatattttattgtaatagccgttcactgcttagtcaccatgctgacatttaatgtaaaatatcaccctaaaaaagatttttttgaacagacttttatgaaaagaaacagcttttctaaagtatgtaattttgccacgtatttcattgagctaagaaactttatgggtgacaaaatatatcctgtttaccaagttaggtacataatggcatacatgtggtttaagtgtgaagcctacagtattgaggtttattttattctcttcttgctatagcaaatgtatataactactaccaagagatctaagtgtatcaaaaattgctcatattctttgtcatggcacatgtaaacacattatgcttggactatcaagttttgctaacctaaaacagaaagtttatgaaatattcaacatgttctgggaaatgtgtatatttagagcattcagtttctattaacgaggagctatatagcagtcttaagctatatttttaaaaatttcagcaactgcagattatgaatacctttaatatacaaaaggtccctcctaagaaatgagatagatacctcactagaaaactgaacaaaaatatggacactcagaccacagaagaagaaaaatggccagcaaccatattttcacctaccaaatactcgggatttttcaaaatatcatacacagtgttgctaaggatgtacactactggcataagagtaaattggtgagaactttctggaggggtagtttggcaatgtgtttccaaaaaatctaaaaattatatttgcctctaatccagcaattatacctctagaaattaatactaaggaaaatcttaagaatatatgtaaaactttagttgtaagaaatttttttgtggccaggcatggtggctcacacctgtaatcccagactttgggagaccaaggtgggcggatcacctgaggtcaggagttcgagaccagcctggtcaacatggtgaaaccctgtctcaactaaaaatacaaaaattaaccgggcataggggcaggcgcctgtaatcccagcaactcgggaggctgaggcaggagaatcgcttgaacccaggaggcagaggttgcagtgagctgaaattgtaccactgcactccagcctgggcgacagagtaagactccatctcaaaaaaaaaaaaaaaaaaaagaattttctttgcaacatttctcatgacagtgggaaataatgaagactcttaaatgttaagaagttagtggagatgaagagcgattggctatgagtacaaacatacagtaagatagaagaaataagttctttttttttttttttgaggcagtgtcttcttgctctgtcacccaggctggagtacagtggtatgatcctaatatgttgcagccttgaactcctgggctcaagcaatcctcctgtgttggcctccccagtagctgggtctacagccaggtgccacaacatctggctaaatttttttttaagagatgagttctgactatcttgcccgggctggtgttgaactcctgggctctagtgatgctcctacctcagcctcccaaagtgctgaggttacaagcatgaggagaaataaatactaaagtttgagagcccactagagcgactgtacttagcaacaatataatgtataagtcaaagtcactagaaaagaggactttaaaggatatggtgttagtctgttcttgagttgctattaaaaaaatacctgtggctgggtaatttataaggaaaagaggcttaattggctgatggttctgcaggctgtataggaagcatggtgcggtcatctgctcctggtgaggccctcaaagagcttccaatcattgcagaaggcagagggggagcaggcatcacatggcaagagcaggagcaagagagggagacatctcatgaactaacagagcaagaggtcactcatcacaaaggatatggcactaagccattcatgagggatctgctccgtgatccagtccctcctaccaggccccacctccaacactggggattaaatttcaactggagattcgaaggggatagacatccaaaccatgtcagatgccgacacataaaaatgataaacactcggtcaggtgctgtggctcacacctgtaatcccagtactttgggaggccgggtcaggcagattgcctgagctcaggagttcgcgaccagcctgggcaacacagtgaaaccctgtctctactaaaatacaaaaaattagctggtgtggtggcgtgtgcctgtagtcctagctacttgggaggcagaggcaggagaattgcttgagcccgggaggtgcagtgagccaagatcgcgccactgcactccagccgggatgacagagcaagactccatctcaaaaaaaaaaaaaaagataaacactcaagggaacggataccccaaataccccaacttgatctttatacattctatgtatgtaacagacactcacacataacctatatataagtaaaaaatatatcaggaaaacagttatataagttatgatgtatctatacaatagaaaactatgggccaggcgcagtagcttatgcctataatcccaacactttgggagactgtggcgggtggataacctgaggtcaggagttcaaggccagcctgaccaacgtggtgaaaccccatctctactaaaaatacaaaaattaaaaattagctgggtgtggtggtgggcacatgtaatcccagctactcgggaggctgaggcaggagaattgcttgaacccaggaggcagaggttgcagtgagctgagatcgtgctgctgcactccagcctgggcaacagagcgagactccatctcaaaaaaaaaaagacaggaaaactatgcagccattaataatgacgatattttaacaaaatgaagagtgttcttcataaatgttaagtgaaaatatatgttacaaaacaggatattcaatgcgattcctctttaaccacattgttaattctggaaatatctacacacacacccattatatttactgaagaggacgtgatgagtcatacttttggtggctaggcgggcatcattcgtaactaaggaaaattaggactatttttattcagtagtttttgttaaagtcttaatgttgtcaaacatcgctatctattcaaacttagtactataatgagcgtcagtatttttaagaaattcaatttcaaaataagatgtttactactcagctgtcctgagttggttgtattgtatttgtgtggataagaaaccaaacactcatagaaaatatgttggtgacaagtatccttggggaactcaaaatataatcaagcatttataatttaaatgcaggtttacaaacaaagtactgtattcatgagtttattgtactttaaatcgattataaacaacatataactatgatcacattatttcagcctaaaattttaagtaacagtttttattataaggtaatacatgttcattgtgaaagatttttaatttaaagaagagaataatattacccatcatctcaccaccaaaagaaaatcactgttaacgttttgggatatatcattccagtctttgttctactctcttacatgcacgcacacacagacacatacacacatacacacacacacacacacacacacacacttcaaaaatcaaagagaccatatgcactgtaaatgagtattaccatttgaaaatcagcagaaccgtggtgatggttgtggtactctgcccctaaaccacttctgtgtgatctcccaggctccctcccttgacttggatctgcacagcatcacaatcttaggttttatggtgttgtgtctccgttcaaaaacccttcaatcacccacaaaattaagactagactttcccagagtctggctccaaccaaccacgtctcctgtgatgccatagcacgacattgtttgtttttactgaaccctcaaacatctctgctttttcacctgtatgtatacttttacacatactgtttgccttgcttacagtgttcttcaagttcgattctgcctcctcactaaagtcctcccaaccagaccgctgtaaataaagtcatctttacatctttgccagaacccatttgtcagttgtatgtggctgtatgagacagtgagtcaaagggaagcaggaacaatgtgcctgctgttagttttattgtaggatttacgttcgtgtaaggttttaggtcattctcacttcatttgtctgtaaaacaatagggatggtgtgggcatatctattatgatcaagtgtgaagtgtgttgcaggtaattttttactaaggttttgaagattgtgaatcattttataagtaggagttgattcaaggttattcccatggaatttatacgtgctttcttgagtgggcaaggaaggcaaatctcagggattgcacagctcccagaaaggtgttgcgcatatgaatgttcctcccaagctatgctatggaagaggcggggcagagaacctctcaaatagatgacttataaggagtctttagctcagaaattcccggtggattctgtattttttgtagtctttaaccagtgtttaaatcttagatcatttattaattttgcagatgtgtctgatctcttcagctagattataaattatggagggcagcagaatccttgtacttgattatgttccacagaggactcccagcatcatgccctgtacccagtagtcttaggtaacatttcgtcaataatgtacttatcatgattcaatactaggtaataatttgcttctggatttataagatttcttattagctatgttatgtatgaaagcaaagatatttttgaatatataagagctatttatgtgcatttaaatgagatactttagtaataccaagcaaatggagtaatcagtaggccctagagttattcccaactgggccaggcacagtggctcacgcctgtaatcccagcactttgggagactgaagcaggaagattgcttgagcccaggaattcaagaccagcctgggcaacatggtgagatcctgtctctacaaaaaattttaaaaattagccaggcgaggccaggcacggtggctcacacctgtaatcccagcactttgggaggccaaggcgggtggatcatgaggtcaggagatcgagaccatcctggctaacatggtgaaaccctgtctccactgaaaaatacaaaaaattagccgggcgtggtggcaggtgcctggagtcccagctacttgggaggctgaggcaggagaatggcgtgaacccaggaggcggagcttgcagtgagctgagatcgcgccactgcactccagcctgggtgacagagtgagactctgtctcagaaaaaaaaaaaaaaaaattagccaggcatgttggcccttgcctgtggtactagctactcaggaggctggggtgcgggcggggggtaagggggaaataaaatagtacccacctcatagtatagttgtattaaataagttaatacatttgacagaatttgaacactttgtaagtacctgtgtatttagtttttgttctttgttttttggtgtgtgtgtgtgtgtgtgtgtgtgtgtgtgtgtgtgtgtgttttgaaacaggatctcactcttatcaccctggagtgcagtggcacaattatggcactgcagcctcaacttccagggctcaagcaatccctcccgctttgaaacagggtctcactcttatcacccaggctgaagtgcagtagtgtgattatggctcactgcagcctcagcctctggggctcaggtgatccctcctgcctcagcctcccaagtagctgggactacaggtgtgtaccaccacctcagctattgtttttattttttgtacagacagggtctcactttattgcccaggctgatctcgaactcctagactcaaatgatcctcctgtctcagcctcccaaagtactgggattacaggcatgagccaatgaatggtttgggtttccattcattggaatagttaactattgtcacagttacatgacagaccacctgcgttagtgtcctaaggctgctgcaaaaaaaattatcacaaacttggcagcttaaaacacagaaatttattctttcacagttctggaggaaggtttgaaatcagtttcactgggccaaaatcagaatgtcaacaggaccacatttcttccaaaggttacaggggaaaatctattccttgcttctcccagcttctggtagctgccagcatcccatggcttgtggctgcctccatggtcacagtgccttctcttctgttgtcatattttccactgcctctgttttacaaggatatatatgattgcatttaaggtccaaacagataatctgcccatctcaaaatccttaacttaatcatatatgcaaagtttttgtgtgtgtgtgtttgtttttgtttttttgtgtgttttttttcccccttccacagatctgtagatgatgataacttaaagctggtaacgttcacagagatttgcagttggctattttggctaatttttaaggaccattgttcagcctaccacatcactctaaaacttggtggatataacagtcagaatttatttgttgctcatgcatctagggtttggtcaattttggctcagtttatccaatttatatcgcattggccaaagcaggtcatatcaatgggataacccatggaggtcaagaaggcagaagtgaatatttgctcaactataatgtaaccgagcatggggttctctgtagatgacaataacttaaagctaagttagcaacgtacttatttgggtgaagaagaaaatccagaattaaaagcaaagttatttagtaataggacagttttctatagttcttatttgatggttaaatcaaggagctctgtctattgtgggcctagtctggctaaatacatatattcctgaatctaataatcgtagaaaacctgttctaggattttttatttaggggaaaaacctctacagacatggaaactccaggactcctttaggctacctgccattatatagttaaacagtggattccatggagttatgaaaaagaagcaagggttttctgcccctttggaagaacagaatatctgctagatagcctctcaagatgagaagtgaacctggagattgctcaccagctgctttcttgaagccaaagctatattaattacagtattttctcatgtcatctttggcctatgagcttgggtatctagttcatctaaataatccaaccaagagttgtttccttacgcattacttggagttaatttgagaaccagtatacaatacttgagtttgatagaatttcccagtctaattttttttcttccctctcattccaataatagaggaattatatcattctcacaggcccagtgaaaaaatgaatgacacacagcgtttattgctttctaggtcttgttgactttaagagagagaataaggatgtgcaccttttccctggtcacttgataaaatgcagtgacattgaggtattgacttttttttccaaaaaaaaatgataaagagaaattttccatgaaaaaatcctgtaactagaatgaatagggaagccggaacttaatttagaacatccacattttcatactctaacagaaccagctgatttaagatgaagagtttgtattttcagtgaaatttttatgtaaaaggaaaattcattgaaaatcagacattttcatgcatcaagttgttcattggcaaattggcagcagtttttcaagttgatgcttattcatgctagtctgctgtagaaccatcaaccgtcaacagtgaatttgaaattctcttcagacttgagaaaatacatgacagctgccatgtattttcttccttgaatgtttcatagtttgcttggctcatcctcacagttgtgtaataggatgggctgtttctttttagtgctcttataccctaaggttactgagcccttggatgtaacacttccacagggcctttttacagatcagcgagtctttaaacttcaaataaagatatttagtctattcaagccagtaatcattccttcagcaaatgtgtttattgctaggtactctttggaaatacaggaataaataaaatgaaaatagtccttgtcctcatggattacacattctagtcacacaaaacatgagtgaacacataattacaaattgtgtaacagtcatgaaggaaagaaaatgctgagcgaggcaagcattcagaggacaagggaaatacatttttggcttttaaaaagatgggggaggagccaagatggccgaataggaacagctccggtctacagctcccagcgtgagctacgcagaacacgggtgatttctgcatttccatctgaggtaccgggttcatctcactagggagtgccagacagtgggcgcaggccagtgggtgcgcgcaccgtgtgcgagccgaagcagggcgaggcattgcctcacctgggaagcgcaaggggtcagggagttccctttccgagtcaaagaaaggggtgacggacgcacctggaaatcgggtcactcccacccgaatattgcgcttttcaggccggcttaaaaaacggcgcaccacgagactatatgccacacctggctcggagggtcctacgcccacggagtctcgctgattgctagcacagcagtctgagatcaaactgcaaggcggcaacgaggctgggggaggggcgcccgccattgcccaggcttgcttaggtaaacaaagcagccgggaagctcctgggtggagcccaccacagttcaaggaggcctgcctgccactgtaggctccacctctgggggcagggcacagacaaacaaaaagacagcagtaacctctgcagacttaaatgtccctgtctgacagctttgaagagagcagtggttctcccagcacgcagctggagatctgagaaccggcagactgcctcctcaagtgggtccctgacccctgacccccgagcagcctaactgggaggcaccccccagcaggggcacactgacacctcacacggcagggtattccaacagacctgcagctgagggtcctgtctgttagaaggaaaacttaacaaacagaaaggacatccacaccgaaaacccatctgtacatcaccatcatcagagaccaaaagtagataaaaccacaaagatggggaaaaaacagaacagaaaaactggaaactctaaaacacagagcgtctctcctcctccaaaggaacacagttcctcaccagcaacggaacaaagctggatggagaatgactttgacgagctgagagaagaaggcttcagacgatcaaattactctaagctacgggaggacattcaaaccaaaggcaaagaagttgaaaactttgaaaaaaatttagaagaatgtataactagaataaccaatacagagaagtgcttaaaggagctgatggagctgaaaaccaaggctcgagaactacgtgaagaatgcagaagcctcaggagccgatgcgatcaactggaagaaagggtatcagcgatggaagatgaaatgaatgaaatgaagcgagaagggaagtttagagaaaaaagaataaaaagaaatgagcaaagcctccaagaaatatgggactatgtgaaaagaccaaatctacgtctgattggtgtacctgaaagtgatggggagaatggaaccaagttggaaaacactctgcaggatattatccaggagaacttccccaatctagcaaggcaggccaacgttcagattcaggaaatacagagaacgccgcaaagatactcctcgagaagagcaactccaagacacgtaattgtcagattcaccaaagttgaaatgaaggaaaaaatgttaagggcagccagagagaaaggtcgggttaccctcaaagggaagcccatcagactaacagctgatctctcggcagaaaccctacaagccagaagagagtgggggccaatattcaacattcttaaaaaaaagaattttcaacccgcaatttcatatccagccaaactaagcttcataagtgaaggagaaataaaatcctttacagacaagcaaatgctgagagattttgtcaccaccaggcctgccctaaaagagctcctgaaggaagcactaaacatggaaaggaacaaccggtaccagccgctgcaaaatcatgccaaaatgtaaagaccatcgagactaggaagaaactgcatcaactaacgagcaaaatcatcagctaacatcataatgacaggatcaaatgcacacataacaatattaactttaaatgtaaatggactaaatgctccaatgaaaagacacagactggcaaattggataaagagtcaagacccatcagtgtgctgtattcaggaaacccatctcacgtgcagagacacacataggctcaaaataaaaggatggaggaagatctaccaagcaaatggaaaacaaaaaaaggcaggggttgcaatcctagtctctgataaaacagactttaaaccaacaaagatcaaaagagacaaagaaggccattacataatggtaaagggatcaattcaacaagaagagctaactatcctaaatatatatgcacccaatacaggagcacccagattcataaagcaagtcctgagtgacctacaaggagacttagactcccacacattaataatgggagactttaacaccccactgtcaacattagacagatcaacgagacagaaagtcaacaaggatacccaggaattgaactcagctctgcaccaagcggacctaatagacatctacagaactctccaacccaaatcaacagaatatacatttttttcagcaccacaccacacctattccaaaattgaccacatagttggaagtaaagctctcctcagcaaatgtaaaagaacaggaattataacaaacttctctcagaccacagtgcaatcaaactagaactcaggattaagaatcccactcaaagccgctcaactacatggaaactgaacaacctgctcctgaatgactactgggtacataacgaaatgaaggcagaaataaagatgttctttgaaaccaacgagaacaaagacacaacataccagaatctctgggatgcattcaaagcagtgtgtagagggaaatttatagcactaaatgcccacaagagaaagcaggaaagatccaaaattgacaccctaacatcacaattaaaagaactagaaaagcaagagcaagcacattcaaaagctagcagaaggcaagaaataactaaaatcagagcagaactgaaggaaatagagacataaaaaacccttcgaaaaatcaatgaatccaggagctggttttttgaaaagagcaacaaaattgatagaccactagcaagactaataaagaaaaaaagagagaagaatcaaatagacacaataaaaaatgataaaggggatatcaccaccaatcccacagaaatgcaaactaccatcagagaatactacaaacacctctacacaaataaactagaaaatctagaagaaatggataaattcctcgacacatacactctcccaagactaaaccaggaagaagttgaatctctgaatagaccagtaacaggatctgaaattgtggcaataatcaatagtttaccaaccaaaaagagtccaggaccagatggattcacagccgaattctaccagaggtacaaggaggaactggtaccattccttctgaaatgattccaatcaatagaaaaagagggaatcctccctaactcattttatgaggccagtatcattctgataccagagacacaaccaaaaaagagaattttagaccaatatccttgatgaacattgatgcaaaaatcctcaataaaatactggcaaaccgaatccagcagcacatcaaaaagtttatccaccatgatcaagtgggcttcatccctgggatgcaaggctggttcaatatacgcaaatcaataaatgtaatccagcatataaacagagccaaagacaaaaaccacatgattatctcaatagatgcagaaaaagcctttgacaaaattcaacaacccttcatgctaaaaactctcaataaattaggtattgatgggacgtatttcaaaataataagagctatctatgacaaacccacagccaatatcatactgaatgggcaaaaactggaagcattccctttgaaaactggcacaagacagggatgccctctctcaccgctcctattcaacatagtgttggaagttctggccagggcaatcaggcaggagaaggaaataaagggtattcaattaggaaaagaggaagtcaaattgtccctgtttgcagacgacatgattgtttatctagaaaaccccatcgtctcagcccaaaatctccttaagctgataagcaacttcagcaaagtctcaggatacaaaatcaatgtacaaaaatcacaagcattcttatacaccaacaacagacaaacagagagccaaatcatgagtgaactcccattcacaattgcttcaaagagaataaaatacctaggaatccaacttacaagggatgtgaaggacctcttccaggagaactacaaaccactgctcaaggaaataaaagaggatacaaacaaatggaagaacattccatgttcatgggtaggaagaatcaatatcgtgaaaatggccatactgcccaaggtcatttacagattcaatgccatccccatcaagctaccaacgactttcttcacagaattggaaaaaactactttaaagttcatatggaaccaaaaaagaccccgcactgccaagtcaatcctaagccaaaagaacaaagctggaggaatcacactacctgacttcaaactctactacaaggctacagtaaccaaaacagcatggtactggtaccaaaacagagatatagatcaatggaacagaatagagccctcagaaataacgccacatacctacaactatctgatctttgacaaacctgagaaaaacaagcaatggggaaaggattccctatttaataaatggtgctgggaaaactggctagccatatgtaggaagctgaaactggatcccttccttacaccttatacaaaaatcagttcaagatggattaaagatttaaacgttagacctaaaaccataaaaaccctagaagaaaacctaggcattaccattcaggacataggcgtgggcaaggacttcatgtacaaaacaccaaaagcaatggcaacaaaagacaaaattgacaaatgggatctaattaaactaaagagcttctgcacagcaaaagaaactaccatcagagtgaacaggcaacctacaaaatgggagaaaattttcgcaacctactcatctgacaaagggctaatatccagaatctacattgaactcaaacaaatttacaagaaaaacacaaacaaccccatcaaaaagtgggcgaaggacatgaacagacacttctcaaaagaagacatttatgcagccaaaaaacacatgaaaaaatgctcatcatcactggccatcagagaaatgcaaatcaaaaccacaatgagatgccatctcacaccagttagaatggcaatcattaaaaagtcaggaaacaacaggtgctggagaggatgtggagaaataggaacacttttacactgttggtgggactgtaaagtagttcaaccattgtggaagtcagtgtggcaattcctcagggatctagaactagaaataccatttgacccagccatcccattactgggtatatacccaaatgactataaatcatgctgctataaagacacatgcacacgtatgtttattgcggcattattcacaatagcaaagacttggaaccaacccaaatgtccaacaatgatagactggattaagaaaatgtggcatatatacaccatggaatactatgcagccataaaaaatgatgagttcatgccctttgtagggacatggatgaaattggaaatcatcattctcagtaaactatcgcaagaacaaaaaaccaaacaccgcatattctcactcataggtgggaattgaacaatgagatcacatggacacaggaaggggaatatcacactctggggactgtggtggagtggggggaggggggagggatagcatcgggagatatacctaatgctagatgacgagttagtgggtgcagcgcaccagcatggcacatgtatgcatatgtaactaacctgcacaatgtgcacatgtaccctaaaacgtaaagtataataaaagaaaaaaaaaaagaaatatatttttgagaggatggtcagggaagacctctctgaggaggtgctattaagctgggacctatagatatgaaggatttaaccctaggaaaagttcaaagagggagaattcaagccaggaaatacataaataaggaggctgtgagaaagagcttgagcatttgaaagaccttttaagcagtttcaccatagtgtccatcttctgtcactttttgatgctattacacatccatttcttcaaggttcagtgcagcagggtttatgtctatgctggagtttaggttttggttttctggaaggacacctggagggcggctatagaggagttccatgaaatattgatcataagccagttgagatgaattaaaaaagacaaaaaagaagggcagattttgatgatcctaaaatatttccatggttcacatacagaaataactgtttaggcagcctaatgcttgtgttcgtttgaaaagcagtcttgatttgttttctgaaatcaagacatgcatttctgacttcgaatgaaaccactcatttattatgacatatattaaaaactataccgtatacccttttcatcatactttatgccttttgcaatcaagtaatgtatttatatgtctgtgtgcatatatatatatatatatatttatctatctatatatcccctgatgacttcccagtgactttttacacctctgtttcagaggagatatataaagatttcaaatattaacccttcttattgcctgaccaggtgctgacctagattcacaccactcacatggaacatttctcctgccatcttcatcatctgtagccaaaaacttgtttgtatttcaaagaatccagagctttagtgggcatttcacacatttttaattatggataatctactggaataggcagaatctgctgccattcatggagtgattataaaataaaggctctctgctcattatgattcaattctcctaatgttttaacaaaaacataaattaattgtatgggcatgtaattgattttaaagtagggaaggcctttctaactatagcagcagtaaaagaattcacaaaggcaaagtttgctagatattcctgcgtaaaaatttaaaacttctggccgggcacggtggctcacacctgtaatcctagcactttgggaggccgaagcgggcagatcacgaagtcaggagatcaagaccatcctggctaacacagtgaaaccccatctctactaaaaatacaaaaaattagccgggcatggtggtgggcgcctgtagtcccagccactcaggaggctgaggcaggagaatggcgtgaacctgggaggtggagcttgcagtgagccaagatagcgccactgcactccagtctgggcgacagagcaagactccgtctcaaaaaaaaaaaaaattctatttttcataaaacatcattgtatcacaatatgtttagttgcaaatacagaaaatgcaattcaaactggcatagagagtaacagatttatttcacagaacatgaaacctctattcagccgtctcttgggtcgtcttccttctaagtctggctcccccttgtggttgtgaggtggcggctaacaatttcagccgccacaggttctaggttcagggagagtcgcctctagaagtcccttggacattctctcagacaggagagaacgtttttctctgaaacacctagcaaaattcctcctgtttcattgacctgaaccagtaaccatggccaggaaatgataaaaggcaaaatgctaagaaatctttgtaaatgtaataaaaagtttattttcatatacaaaaagcccttacagatcattatgtaaagtaatgaacatgttatggacaaaaaaaaaaaaaaatagagaaacaattcacaaaagaaaaaatctaaatagctaatgaatttttaaaagttgaataaccctaattaaagcagtttaatcggagctacattatcccatcaatttatttaattcttttaaactatttatatggtagattttggaaatgagggctttaatgtgtggcagccgaaaatacaaagggattacaacagcaattctgttttgagaactttgccatgaatcattcatgtgcttgaatttatgtacaaggatactactaaaatgttactgtatatatcactccaaaaaaaagagaaaacatcagaaatatctcacaataggggattggttaactgaatttcatatttgagtactgcaaggatgcttagaatcacatcataggaggatatttgatcacatgggaaaatatttctgatatatcaagtaaaacacattgcaaggcattgtatgattctgtatagttttgtataaaaatgtacacaggcataaaagaaaaatgagtacatttgactacataaaacttttttaaaaacaacctctgtatggtagtataccataaacagtatcaagagatcatcaacatactgaaaacaaaacaccagtgacaaaaggatggttcacttaatttatgaagaattcatacaaattaataaaatagaaacccaaagaaaatggataaaagatagaaatacacagttcaccaaaagaattacaaattactaagaagatataaatttatttttaaaataatagattcaacagtaatagatgttgattgaaaaattaatcatattcctgttgacatttatttaaaatgtgttctgacttgattgttattatataactcaattaagaaacctcaattttcaaatactgtgttataaaacatttaggaagaaatagatgaggtaatacaagcacaagattatgtttctggtaggtatgatactttatcagtgatagatagttacagttatatgtacaagttgaatgtaacatgattaattaattatgaagaccatataaaacttcaacatcacaggagtatatccagcattctactttatctaggtttttctctataacagtgacatttatttctgtgtcacattattccaacatgagctactcattactgtgatcatttctgatacccactgttatgataaaccatgcacccaaataacacagttgtattcccttagcaatatattttttcttcttgtaattgagttatgaccagtaacagtcttcatagttaattgtgttatgttcaacttgcattatgtaaacttgtactgttgaaaaagtatgtccttaataaatatacattgtcttatcctgtcattcccccttctatcaattacagtctaagacaggaaaatgaaaaagaagtatgtttgatgtttaccctaagtaaatgggagccttttccagattattcccttccctgcaacattctaaaatcccctttgaggaagcatcttcgcccagtatctctgttatagtgagcactggaaactgatgtattttgggatgcagggctgcattgaagagcactggttaatgcctacaacaagagccaggctactagcaaaaactggaaacatggattacgtttctctgtagaagcagacttcatagggctgaaaaatgactgtttcccaaaaccaagcatttgccagcaagaaaatattatatatgacttaaagaagcttgtgtcaaatatattttctgctttttatggtgaattattagtaagaaacatacagcagcacagtacaaacaaatgtcaagaataagtactttaaaaaaaaaacctattcttaatgtatgtcaagtgtctaggacaaggcatggcacataccagtaaaacgatgtgttctctcccttctcttggggtaataccagtcatcagatgaaaatcaaatatagtgtttatcagttccatgtctactttggaacagaaaaaaactttgcaataacattttaaaatgtttactcattatcagtagctgttatgatagaatgctggtatatgctcttatgaatcatctaatgttgcatcctcagtgtacaggtgaagaacccaaagcctatagagtttgaattgcctgatttcccagtacttggtgggaaatgcttgcctcttcctccaaagtagggccgtttccactccacccccacacagtgccagtcaaggagctgttcgtcagaacgttgaaacagcctcactttggagctcaggaattcaagcttcatacatggaagttgacattgttgtggcatttgatcagatcttacttttaaggaattagtcatagttgtttcccagttatctcataggcatatttggttcttcctagaatatcatagatgtttcccattctaatcattgcagtaatatattatacatcaagaaaaactggaagggaaaataatccaaacaccagtattttgtaaagatacaaaaatattttcaatttaatacattgacacaaaactgatacttggatggaaatccagttaccccaaaacaattaagaaatatcgatgagcatctaatgtgtcattgggcctatatgcaaaagattatctggaaactggaaacaattatccagttttgctatatcactatatcacctaggctagtaactcttggcctcaagcaatcttcccacctcagcctctcaagtagctgggaatacaggcattagcctccatgcccagctcttcaaattttaagtattacatttttccgaagccttgttcatcattaatactttttagttatcctttgtttatgagcacaaagttgacttagctcagctatcaattcctattttattttattgccaaaattttaaatcagatattttcttccttcaaaactgtttccccaaactgtgatttcattctcttattaaaaaatgtagcatgttggcggggcacagtggctcatgcctgtaatcctagcactttgggaggccgaggcaggcagattgcctgagctcaagagttcaggaccagcctgggcaacacggtgaaaccccgtttctactaaaatacaaaaaattagccaggtgtggtagcacgtgcttgtaatcccaattactcaggaggctgaggcacaagaatcacttgaacctgggatgtggaggttgcaatgagccaagatactgcactccagcctgggcaacagagcaagtctctgtctcaaaaaaaaaaaaaaaaaaaaaaaaaaaaaaaaaaaaagtagcatgtttatgtaattccttacaatggtcaaccagaagttaatgaagaaagccttaactaaccaataaagagacttttttttctttaaagtatggtcgaagccaaaagttttcaatatgtatatagtttggcaacaaaccatgctctctgccttttactaagtgcaacagctgcagtgtacaaaacccacttcctctcagtggccacatctctgccctttattattattggaatactataaacctactcctattaacaatcagcacaatgaaaactgtgctgatgccattagagatcacactcaattcaacactttatgattggctataatccaagcactttgggaggctgaggcaggtggatcacctgaggtcaggagttggagacctgcctggccaacgtggcaaaaccccatttctactaaaaatattaaaattagctgggtgtggtggtgcatgcctataatcccagctactcaagaggctgaggcaggagaatcgcttgaacccaggagttggaggtggcagtgagctgagatcacaccactgcactctagcctgggtgacagagcaagactccatctcaaaaaaacaaacaaacgaaaaaaaacctttatgattgggaattatctacgtatatatgaagaatgtagtagtgtagtagtttggattatgtttgaaaccaagcttcctgttaattattatagcaagtccaagtctctcagagggaaaattaaataataggcattattgctttatataccattagactgctttaagtgtgatacatttaggagatggcatgatcaattcttggagccagacagagctaagatacagttttatcatttactgtgttatccaaagtatatcactctctttgaaccttaacatcctcctttgtaaaatgctaaaaacatctgcctattgggactattggaaaacttaaaatgagatagcatgtgtcccctggcacagagcccagcacatgactggcactcactcccttcccttcctccaatctgccaaataccacatcatgtttgttctgtaatttttgtttccttatgcagggccaggactcaaatgtaaaatttaaggcggtaccaaaaatgtggtcaggatagataatatgttcatgcaatatttttaaaaatctgaaattaatggaacaaatctgtggtgaacaaaagatcaaacttttaaataaagacgggatccatattattgaactttttccttttgcctcaggctccaatatggcccgacatggcacagcctttatatataactcagtgcaggttaacatatgaattaacttagcatccattaaacatgtttccagttttttaaattagcacagactaatttacatactcataaaattgccatcattttcaatttttatatatactcaccaatattcagaaagcacaagtacaacaaactccttagaagaaaattcaaatttttaaaaaaggtataatgaccactcttgcttatgtaaaattgttaaaaatacattgtgcagttgttctccactatcccttaaagatacctgttgttttattttgaaataattttagatttacagaaaagttgcaagaataatataaagaattcttatgcctttcgccccagcgcccaaatgttaaaattttaactatatttgctttatcatattgacacaggatttttcttggcccctttgctagactcgcagcccgggcaccctgtctacttggcccactgcactcagcccctggcaggagggagcacgtgggcgagcgagtatgggatctggctggccgctccaagcaccaacatagaagcaagctccatgcagggtccatgaccaaaccaggcatattacccccaggggaatgcagtgatgcccaggcaggggtgcctatgactccagagccccaaagggagtgttacaatatgcttattagctcttttagctctgccatctgcagcccaacaaacagggatgtgttagcagctccatcagccttttgccccactctggcctgcagctccgggacaggcatggccctgggccagctcaggaccaccactgcttctcttctatggggtggctgctctccattgacacaggcagagggtcagtgttacagcctttctgaatatctggtcctaagctcttgtcctgcatccaagaagaatgaggtcatgctgacaattgaagggtggtaaaggcagaacattttattgagcaacaaaacagctctcagtagagaggggacaggcgggtcagatcatcgctccagtgtggctgagtctggggcttttataggcacaggataagggagtgcatgctaattggtttgtgagtatgcaaacatggttaaaacaaaggcaccagtcgaaagtggacatggtgtaaaaacagggaagggtatatgtaaaataggtgaaaggtggggatcaatcaaaggaaagcacaccaaatgggaagacaggttctcagtctcatccatggatttgacttgtagcttggacttcaggctttaagctgtttttggcttgaaggtaaggtcgcaccagggacccacctatgtctgcctaggatttctctgtctcctgcctctatcaatgcttgttctttggttctctctctctctctcaatctgtatatgtgtatatctgtgtatatagatctatttgtgtgtatatatacaattggttttggaactatttgagagtaatttgcacatgtaataccctttacccctaaatatttcatgtatattttctaaaaacaagagcattctcttctgtaactatagtataattatcaaaatcagaaaattcacactgatacaatgatattttctatgagtttacttggtttaggaaaatgtctttcagccaggcacagtggctcacacctgtaatcacagcactttgggaggccaatgagggcagattgcttgaggtcaggaattcgaaaccagcctggcttacatggcaaaaccccgtctctactaaaaaaagacaaaacttagccaggcatgatggtgcacacctgtaaccctgggctactcaggaggttgagacaagagaatcgctaaaaccaggaaatggagattgcagtgagccaagatcacaccaccgcaactccagcctgggtgatagagtgagactccacctgaaaaaaaaaaaaaaagaaaaagaaaatgtctttcctgacaaatgtgtatgcctcttattagctaaataaaatgtgtataaaataccccatttctgttactgctttgacttttaattaaagtaagctttatacacaatagctttcatagtctaggttttctggtataattactctttatcttatttgaataattcttttattttgtttgatttcattgcttcccaaaaggatagaacctggttctttggaaattgtagagcaggaaaacacttcctctacctgcttagattcagtgcctggggcctgcaaatttaactcacaaaagacagattaactggagaaaaggcatacaatttttactgatgtaaggattttatatgcacaggaacttcacagaaaagaagtgaaaaacctaaagaagtggtagactcagggtcttatataccattttaaagaaaggcaataaaatgtgactagacatgagataggggatctgggattctagggccagtaaattgtgagaaagtgactaggaactgcatgaaaggaagtaatggaagataaaggctattttagtaagacctatttatgtagactcatcttgatgtggactcttcctctctggtggtgagagtgttcttatcttcctagtacaaggagagggcacttttctcatgggaaatatatccttttcagggagataggggaagggcagagagcttttcccacatctactatttcttagttgtctttagctcaaaataatctttatgccaaagtggcataattttgggtggcatatcctgatccccttcaacattagtactctgtgtacaaagaaatctgtagtcagttatggtttttttcaattctgttaaagtagatttacataaaaattctcagagcttcggccaggcgcagtggctcacacctgtaatcccagcactttgggaggccaaagcgggtggatcatgaggtcaggagatcaagaccatcctggctaacatggtaaaaccgcgtctctactaaaaaatacaaaaaattagccaggcgtggtggcgggcacctgtagtcccagctactcaggaggctgaggcaagagaatggcatgaacctgggaggcggagcttgcagtgagccgagatcacgccactgcactccagcctgggcgacagagtgagactccatctcaaaaaaaaaaaaaagaaaaagaaattctcagagcttctaatgtgctaatgtacaccatgaatctccataaagggaattgcagtatgtagcttttccaaacttattgaaattggaacccttttttcggggagcattccaaaagccctgtgttccagaatgtacttttagaactctgtggaatcaatgttagggtatacctttggctggatctttcaaatatcagctattttggcaatctagagaactagtcaaaattgagattatttgcaaaccactaaagcaaatgtatactgtgttattattttgatggagtactgtgtgttttgaatgctgggcatttgtcacacaaggtcaaagcctgacctgtactctttaccaggtggtaagccacctcgctatcagacagaggtagacttggagatggtagaggctgtaggagtctcctgaaaaagctgaaatattgccagacaccactttggatctgctcagatgctcaaactcttgaccaaaactctgtagttctacatcaaaatgcagtttagatagtcttgagagattttcaagatgaattaccaagtttttacctcctcttttaagaaaacaaaaccaaacaaaagaaagcagtcactttcctacagctccacagagtgtttacaagattgaatcctggaaaatctgtcagagttacttaacctattatctggagtaattttattttcatttgtctgcaaaataattgcgatttgggtttcaatagtgttgatattgggctgttcttctgatagtaattgaccaaaaggttcaattacttcttgaagttacagttataaggaggctgtcagatcatgtcatcatcatagtgaagaaatcattaataggcagcaattgtgtgcactaaagaattgcaaggttaatgaatctggacaaggccatatatataaaatgggcatgtcctaaacgaaggttcatgggtcaattaactcggcaagttagtctcccagaccaaggtaagacagctcaggggtggtcacttctaaattatgttccaccaagcacataccaataccaccacctgcaatagttaagttcatcaggacggcttgtaatgatcagactcacatgtactttttgtgtgtgtgtggctcttcattttaatgatttttacatttgtttattgactaaagatttggttcttttgtgtcttagatttatcgtatgtcttccaaaatattattaatttatctgtaaaacgaaggaattttgtgtcaggaattaagctaatagcctataaattatattcactggattatattttcttcttgttacatattaacctgctagtccggtaaaaacatgagcaccagcattttaaaaatagcatatcaagtctttattcattttgtcccttatagaaatggaagaggaataattcagaaagatttttctgtctctgagtcttcctttaaaatagctcttagagccacacccttcatcagtcaatcatgaaatatcctaaattgaatgtgactgtcatattctaaatttgatggaatgtgtccataccaaattttgtatatttataatttgctcagagttcattcaacgagagttcattatttacataaataaaccctcctctaccacaactttttaacaaccgtaaggtgtcagaactctgcccaaataaccatatgggttatgtagacttatctcaatgtggactctcaaagttccccattatgtagactcatctcaatatggacatctcgaagatccccatagggggaacttaaagatagaaatggaagaaagatgcttctaaaaattgtccttaggcatggaggacctgagaagctaggagctgaaatgttgaacaattctgtttgtggaaaccaagagaatgtctaattcagagtaccagggagctgtgaagtagtgatttatattgacaacaagacagaaagagcccccaatgcccataatgactagaattttgaaaaacaaaacaaaacaaaacatggggaactaggagaaaaaaaggaaagctgacctgtgtttgattctgagacgaaacggaagatacataattgccctacttcttaatagagtgtaacctagaatcctacttttttttgcaaagtttaatgactgttagatgttgctttgaaacgtctgactgctgaagaagtatgcagcagaagaaaaaatggtagaattaagatggcattatgaaacatctggttaaacatgacagttgtgtttatatccactctcttaacatctcgaaaagagcagaaaaggaataaaaattggataaacctacgaggacaaatagtaccatagtggaaacaacagaagacaagaggtgtcagcataagtttagaagtaagtaaatgagtcgttactcccaggcaagtgcctgcagagaacaaggcaaacaggcaagacagtttgccttgttctgactgtagggctgtagaaagattctagactgggaaggactgggtgcctctgtaggtagggatgaggggtggccctgacagaggaggttggttaaaatctatataaagaggaattagacactaggtctctccccagaccacacaaagctaagggactacctcagcctcattctgatagatggcaagaagtttcttgtctgagtaaattgaacaggatttagagaagttctgaacttagggacaccaggcttagtggaggagaggggtcaggtaccatattgagaccaaggatattaaatgaaagtatagacactgaggagtaagattccccccaccacccaccccagaccccttcactctgaggattctggcaggaaagagaaaacacttcatgatcctgacattctggggttccccacagatggctactcccaacctaatcaccctgtagtgaagttccccatccatgaagcacttatacagagcttctaagggctgttcacccttcagtgagagtggagggccaacgatccctatacatttgaggaaggccttgggcaaggccaagactaagacaaacaggaaaactggggatttagaggtaacaggtgcaatacaaggaacagtgcaaaaaataaaaccataagttatatactcagaggtgggatgagatgttgcattcataaagtaagagcaacatgcttttaaaagaaatattacaagagcaaggatgagctcttgaagatggaaaatgtgacagccgaagtgaaagattcaatatcagacttggaagatgaagtagaatacattcattcattcagcaaatattattaactaggtccttggcattgttccaaacagtggaaatacatcagtgagcaaaacagacaaagatccccagcctagtggcccttaaattctagtgggagagagcataaataacaccataatatgtaagttacgtgatatgttggaagggattgagtgctgggggaaaaagaaaaagcagagcatggtaaggagaattaagagtgctgggcgggtcggggggcggggaggtggagacaagttgaacttttaaatcagaaggccagggctggcctcccttgggaaggtgactactgagcaaagatgcagagaatgaggaagtcagccatctgatggctgggagcagattattccaggcagagggagcaactagcacaaaagccctgagacaagaggatgcctggcctgtgtagggtccagcagggaggccagtatggcgggagcgagcaggggagaggacagcgggagatgaggtggggaggagacagtatcagaccacatagggccatgaacgctataggaaggactttggcttttctgctcagggaaatagccactgcagagtttgagcagagaagtgacatgatctggctttggtcttaaaaggatcactctggctgctgtgttgagaattggcacctcagttgcaaggatgtgtgcaacgccatgccagcattctctgtttatacctgagtcgttccctgtcagcaggcctctctgtttgccgctgtcctcttttctgagaaatggtcccttgcttgctcctctgtcagtatgctctctacccgatatcctctgctgacttcacctcgcaggtcccagtgtgtgtccttcagctcccactcctctggcctcatatcctaaagcatgtaacgtctggctggttctacttttgtgttaatattgtttgaagcagggccccttttggctcccttgtttgttgaacctctcagccatatgcaaataagtattaagcacttgttttttaatataacatttaattttctgctttctgaggctttgtcatcaggcacagtcctttacaaacgtaagctttgtatgactcaacaaactcaacagtttaagctgctttaaacaaagagagaaaacaggaaaatctgtcttataccttaaattccaaagctgcagacccttggtgggaaaaccaaccaacaaccctcctgccacacatacacacaaacttttatggaagcgtatctatttaaaccaaatatgcttagattataagggaaaatgcatgaatcattttttcctgtaaaatcattttcctctgtagttttcaatgcttgtcctttgatgttaaaaaatagagcctaagggacttctcataaagttggtgatataactgcaggttcacaaaatttccttcccacagaattgtgtaagattaacaaatatcaaatgtaaaaataacaaagaacatgccatcaaccccgaaaccaagaaaagattccaactccataccatcaactttgagaagtgtcatccaaaaaaagaaaacttgggccaaattgaaagaagatgcttttaaaaaatcgatatgttcttcaaagagaagaatggagcatggagaagtacaaggaggaaattctgaaaagtcgtactacttttgaaggtgctacattcagtataaaggtgtaccagagggagggcttagaataccccacaccttcatcagggaccctttctttcatcaagaagacttctttcacaagcaagaagagtaggcaaggtttgccatctttcctgcctctgatatatcaataagtgggtgtaaaatgaggaaagcctctgcaagcaatgattattacagccgaaccaaggaaaagctccactagacatgaaaaaggaacacttggccccataacaagccaaaagcctatgatacaacccagatttgaagcaaacctctgatgcatttatttcatagaatgaagtaaagcagttacttaaagcccctgcatgctctcctctcctcttaggcaactgaatgactggataaggtgtataaaccatggacaccagtccatgttataggtggaagaataaaacaatatcaaatcaggcactgtttgggggcaaatggcagactgagaaagaatgacttaacatttactaaacagttttcaggtcacactgacaagtgacggaggcaaaaaatctgcacatacaaaaaaagaaagtagcacaattgccgggtgcggtggctcacacctgtaatcccagcactttgggaagccaaggcgggtggatcacaaggtcaggagatcgagaccatcctggctaacacagtgaaaccccgtctctactaaaaatacaaaaagttagccaggcgtggtggcaggtgcctatagtcccagctactcaggaggctgaggcaggagaatggcgtgaacccaggaggtggagcttgcagtgagccaagatcacgccactgcactctcgcctgggtgacagagtgagaccctgtctcaaaaaaaaaaaaaaaagaaaagaaagtagcacgacccactaaaggtaaataaagaacagactttcaaatagtcataacagcctatgcttattgggcactgactactcaccaggcactattttaagtgttgcgtatgtattaactccattaatcctcataacactacaaggtaagcaccattattatccccattttacagctaagaaaactaaggcacagaaggaagcttgcccaagtttacacagctctttttttttttcttttgagacagtctcgctctgtcacccaggctgcaatgcaatggtgcgatctcagctcactgcagcctccccttcccaggttcaggcgattctcctgcctcagcctcacgagtagctggaattacagacgcgcaccaccacacttgcctaattttttgtattttttagtagagacggggtttcaccatgttggccaagctggtctggaactcctgaccttgtgatccgcccaccttggcctcccaaagtgccgagattacaggcgtgagccaccgcgtcccgctgcgcagctcttaagagtgggaccaggatttgaaaacaggcagtctgagtccagagcttgttctcaactactctgcttttataactcaagaaacagacaacattttagacaactgctttttactttcaaggaaacttaagagaatagaaatgtattggccatacaccttttcttgaaagctactgggcgtggggcggtgggggagaactcggatccaacgtggaagagtagtttaaaaagccccaggatagggaactgttcagtggatacaggtaatatcaaagaaaaagattcagttaatgtgcctgacaagtaaaaaaattactgctaatcatttgatgggtctgtaagagcatttggcaaaaattagcagtaggtttatagtaaataaagcaaattttaaaaacaaggcagttactaatgataggtaaaaacaaatacacacaataaagaaagaacattcatacttcttagcacagcaatgaaccaaatatatgtgtaatatataacacaatgcaatataacatatacatatcatatgtaaattattcaatatataatagagttaatataggtaatgtaaacatactttaactatgattgggaaggtagatgagaagaaagaatgatggtgagagagctaaatctccatcttgtgtgatttggatagtgtctaaaaggatcaaccaagaaatcataatatacgtggttttttgggggggtatttttttttttgggacagggtctcacttccatcgcccaggctggagtacagtggtgcaatcttggctcactatagcctcaacttcctgaactcaggcaatcctcccacctaagcctcctgagaagctgggactacaggtgcacaccaccacacatggctaatttttctgtatttttgatggagacagggtttcaccatgttgcccatgctggtttcaaactcttaggctcaagtgatcctcccacctcaacctcctaaagtgctaggattataggcatgagccaccacacctagccatattatctataaatatgacagtaaatatggaagaagcatctaaaatagtttgtgttgattgagactggaggtagggaggtgggtttagaaggatgaagagaagggctagtgtgtttttttatatgcatttttgtgctatttcattttttcaactattaaaaacctaaataagccaacacagatgaaattataaaggttgtcagaaaagaccccctttataaagtaggtttcttgtaaaagaaataaattactgcttaaaaagtacttacttataaaatgtttttttcaatttgctaaagaatctaaccaaaaacattctaataggaagctctataaaacacttcttgaaaattaaagattgatatcctttatagatgtggctccaaggagtcttaaattcctcccaataaaagaaaaaagcaacaaacagtaggaaacttaaaaatgtgttttgtctaagaaattaaatcacatactttcaccctgtaattgtatttttttggcttttcaagatgctaaagaagggagctttatttttgcacttgggtggaggcgtaacaaagccatctgtacagtggatttggctacaaggaagggagccattttgactaaaaagggctgctgtactgacgccacatgagatgacgagttagtttttattgcctcattgtctttaaacattctgtttatatgtgaactctaggttaccatcacaaattgcccatgtgtcatgtttcccttaaatgttatggtttttcttgacccattggggtcccttgatgatcttcttgcacgtagtgtgcaaacaaatctgtatcgtgcagcaggctgaaaagggagaacactgcaagcacatggtgtactttaggagtccgcatgaggacaaacctaaaacaactgagtcaaatgaggcattgtgcaagttttgcttagaggaattggtgggcacagacggggatttttaagaagaaataaaagaaacctgagggagtctgcagaacccatactgtgggctttgaactagaggttgaaaatcttggctctgaaaggccagggactagggagggaaataatataatcaacctaagagttggaacagttatttaagtagcagcaataaatatactggggcatgatggcgatgtgtacaaggagttcatcgaagaaagcaactagggttgtttggcatcttggagactggtagcagaaagggaaagaaaggggtttacacttccatattgtggaagaaggagtaaagtggtggtggagaggatatacaggggaagagccagtgattaattgaagatcgcaccaaatttgtttttgcttgagaagttgagaaatatgggtacctgacaaaggatcctgaaaaaaaataagtatctctgactttaccatgcttggatgaagttggcattgaggcgtttatatagtgtcattgatttgtgagcactgaaaaacttttaacaaagattcacaggatattagtacgtaatctgatttaccctttacccatgaatctttgagagtttacatagtgccgcgggagaggaggtgcacaggctgtgtgtaaatcagtttgtaaatccaaagtggcgttacaccagtggccagcatgtataatctatgtaaagttaggtttcacaagaaaactatagatgcttatggcatgatgttctgactcatctcgcttcccttcagcattcctaaaatatttatccaaagatatttgcattttggctttcttcttttcatgacagtaaagttaaaacaggactcagcttcaggctcagcacacacttcagtgtagaataatgagcagctagacagctgaaacaaaatgactgatgtgactccccacgccatctgttggtggcaggtggaactgacatgctttggctctggctgatttttgtgcacacttgcaagttgcctggttgagtttgtaagtagaggagctgctataatatcaaagccatccacaactcagccggtcaataacgttttcctttttctttctctattgtgaaggtgtggcggggcaccctggcccgcatgcggtacaaaagaaccaaggcagctctgacaataatcaggtactaccggcgctacaaagtgaagtcgtacatccacgaggtggccagacgcttccatggcgtcaagaccatgcgagactacgggaagcacgtgaagtggccaagccctcctaaagttcttcgccgttttgaggaggccctgcagacgattttcaataggtaagaacgtgctgctgtgtgctgcatccatttatggtggcacagttaatactatgcaaagtcacaagtctgagaccgtgatattgactcagctatttgctgttatgacatttacctttaccttatgttttcagttttgtagatttggctttcaaagagcatctgcttacccctcaaaataaaggaactgccaatttgtttttcctgtagcagctgacagcaatgtgccacaacccctggacacaagccatagttaagataagctactagcatgctgtttctacttacttttattagctaaaaataaaaccaccacgcataactcaaactagaaaatccattaatcctttcaaagcagtggttctcaattctgctgcaccttagaataacaaggagtttaggaaatatgccagcacccaggtcctaccaccagagagtcctgtttaatggcgctggaggggtggggcccaggcagaggtccttttttaaagtttcccacgtgattttaaagtgcagccaaaggggaaaataactgtttttagagcgagctgtcttttaaataaataaaaacccaagtaaaatttggtacctttccaactggtctttatttttttataacctgccctggatctgagtgtgtagttattccaagtcctttctcctcgctttttgagcttatttattgccagtatacaccagatatatttagttctgtcttagatacagccatctagtcacataaactaagctacttcttctcaaatatagtcattttatcatgatactccataaagaacactttgaactaattgatatgctgaatgtacaagaactaatgtataattctgtgctaaatcagatgttatcttctttagattttgcttgaaatataattgatggaaggtatcaaaagataaagaaaaatgcatggaagaaaactctttaatatatatctcatatgcttttttaaaaaaagaaataattgctcataagaagaaaaaatacagaattattgaaaacaaaagtacctcaaccttcagttctcagatatagtactataaataattagttttcaatcttggcaggctttttacgtagtcacatatgatttgagcatttttttccccttttttacacagataagattatatgtatggctatatgactttactcaaaaataagtcttgaagatctgtccataccaataaagatctgtgtaagattttaagagctgcaggagattgttattgattttgattagattgcactacagcctatacagtcttctatttagattttgaggttttacttgtggtctagaattgattgttttgtacaaaattcaatgtactcattcagcaaatacttactgaatgtctgctgtgttgcaggcactgacctaggtttcagggatatggtgacaaacaagaaagatgtgaaagacagtcccagccttcccaggccttataatcaatggcatttgaaactaacaggtctgctacatttgttctgtatacgcacacgtgcgtgcacacaagcacactcgcacgcgcacacacactgaatcttgccagttgtgtccatctagtccagggttctgcaaactttttctgaaagagccagatattaagtattttaggctttgtaggctacagatggtctctgtcacatattcttctttgttttggttttggtaaacatgtaaaaatgtaaaaactattcttagcttgtgggcagtaccaagacagaccattggccagatttggcacaggctatagtttgccaacccctgatctaggcactatcaggaattttttgatctgtggaatacagagagagatgtattaaagaattctactgtgattgtaacattcttatgtttgtttttctaaaatctcaatgtgcatctaatcatgtttcagttcactcctgttcttcacagtaattctttttaattgagctttctccatgcctggctttgtccccttttcatgtcattgaggctggtgatttttatggctgcagctgttgttggctacacgtatttatagacagcagtttgcttgattaggatgagaagcatgggtggctttctccatggttgtataggtcaggtcctgaatcccccagtgtgcttctgtggcctttggagtcagtcagggacagaccttgtcctgagccactgtgggcagtgaagacaggacaggctgaccaggtttgtagactggaaacagaccagtagacagagcaaagatgtctctccaccagtcatgaaatttggagatcaagggctgattcgagaagttgcttaggaagccactgagtattgtaagacccacctgtcacagtgtccttgactttgaccaccaactgctctaagtctgtcactcttttagtctcttctggaatgatcttaggacagtctgtcttgttggagtgttggttgtccataggaagtaaagaaaggattccactattctactgagccatgacttcttcatggttgttgctttggcaacctactatctctgaccaacatgtggcctgcctcactgcagccagccattccatgtgcagggaacaggcacagctttcaccttaaaatccttcatctcctgcccttgctaccagtccctgccacttcaggcttcaggattctcatctatccctctgaggggttttctccttccactgagtagagtgcactgccctgagtgagccgcttccccatcagctggatcccatctgctttgtgtcttccagaaagtcattacactttctactttattgacattcccattttctggtgttgttataaatgtttccttatttttatatttatttggttatttcagtgggaattttccattttagttaaatctcattctatggaaacaagtttgagaacagccggccttgattattcgtctgatcaaaaggaagttctctgtttgcttccaacctccgtacttcaagctcctgtggcagaagagaggatataagcatcgtgcagggctagggtgccgccaagcgcataagagaacttgtacctgttttttcccaatcaggaacaggttatttttggtttaagctttcagttgcttagccaaaaaattttggagtcatccttaaatcctctctggcccccacatctaatccattgtcaaattctgtttgttcttccttcagaaatatgcagaaccaacacttacctccacctccacctccacctccctgatccaagccaccttactctagcatgtgtgtttcggaaatagccatctaacaggtcttcctgttcccagcctatagcaaccacaatgacccttttaaagcatgagtcaggtcatgtcccatctttgttccaaaccttccgatggcttctcatctcattcagaggaaaggccaaagtcctgatcatggtctcatggctttgtggattctgaccctgactctcccagctccttacactgctcctctgacgcaccaagcaagctcacatcccggagcctttgcacttgctgtgttctcttctcttcctagaacactctggtgcaggtctccgtatgaccagctccctcacggcctgtaggtctctgctcatctatccttatcagtggtgcctgcccagaccaccctatataaaccaccctatataaaccacacccactctgcattccttccatcttccacactcccggtcctccttgccttaccttcaccatcctacatactatatgtctactcatatatttgctatctgtcacttctctccagaagacaagcagctagcagaaaggacctttgttttgcttattactgtccccccactgcctacaacagcactgggagtttagcaggcacctagaaaaccttcgttgaatgaatgaatgatgaatccaattttctatgccctaaatataaatattatgagagcccatgtatcactaagttctagttgctttcaaaacacacaaacaacaaagcaagttttaggaaagatctgtctacataaaatgatatgtattttagcaacttctgtgtgtattttggaggcattttactttttttagcatgccagtgctttgatttctttctacttaatgacagcttcagttatttttgagaatgcatggagcccaggcgtggtggctcatgcctgtaatcccagcactttgggaggccgaggcaggcagatcacttgaggtcaggagttcaggaccagcctggccaacatggtgaaaccccatctcttataaaaatacaaaaattaaccaggcatggtggcacacacctgtaatcccagctacccaggaggctgaggcagaagaatcacttgaacctgggaggcagaggttgcagtgagctgagatcatgccatgcactccagcctgggagatggagggagactcaaaaaagaaaaaaaaaaagagagagagaatgcatgggattgcatttctaaagtctaatacatgttgtctatttacttgtagatggagagcatcccagctcatcaagagcattccggcctcagacctgccccaggtcagggcaaaggttgcagccgtggaaatgttgaagggtcaaagggctgacctcgggctccagagggcctgggagggcaactatcttgcttcagtaagtccaagggaacaaagtgaaatctacttctacttcctctactaaaaaagagaagtacatatctccaaagaatttgcagaaaggataaaacacttttagaaactaaataatttctatgagatactaaaacattttattgcttctaaatgtacagtatttgatgtttctcccgtgtttaaaagggttctgtgtgttgtatccatatgtattaaatacactctataacctggcctttgaccatttaaaccttcccttacatcattcagtgacgattttttaattactacctttatattaattattcccagagctacactttatcctctctcccattccctattttaaaatttgtataggatctttgatgttacaacaaccatttagtagcttaccatctggggtgaggagataaagagtgcatgtgtgaaactatataagtgtagttataaagcagtacactgaaagattgcctttccttctaaaatgctaagcatactcattttgtcttgtttcctttctttttcagaagccagatacacctcagacctcaggcacttttgtccctgttgctaatgaattgaaacggaaggacaaatacatgaatgtcctcttttcctgtcacgtccgtaaggtaaggcaagcttaaaccagatcatcttggaaaggaaagactgattcagatgaaactcacttaagcaagcctgtaataaaacataacagtaggtacataactagcttcatcatcagttcactagacctgtctgtgctgaggcattgtaggaatggctgaggtgactacaactttacagttaggctataaagccttcctaagggaagtgataacctttttttttttttttttttggagacggagttttactcatgttgtccaggctggacagcagtggcgtaatctcggctcactgcaacctccacttcccaggttcaagtgattctcctgtctcagcctcccaagtaactgggattacaggcatgcaccaccatgtctagctaactttatatttttagtagagacagggtttcaccatgttggtcaggctggtctcgaactcctgatctcaggtgattcacctgcctcagcctcctaaagtgctgggattccaggactgactcaccatgcccagccaatttctttttaaaactagaaaaaaaaaacaaaaaaactagattgcggggacctctttaaagtcagggatttgtatttcactgcatgtgtatctttcatagcagctgtatatctgctttatatttaattgtcatttagtactttttatacctacattatttcttttatttattttttttttttgagacggagtctcattctgtcgcccaggctggagtgcagtggtgcaatctcggctcactgcaagctccgcctcccaggttcatgccattctcctgccttagcctcccgagtagctgggactacaggcgcccaccaccatgcccggctaattttttgtattctttagtagagacggggtttcaccatgttagccaggatggtctcgatctcctgacctcgtgatccgcccgcctcggcctcccagagtgctgggattacaggcgtgagccaccgcgcccagcctatacctacattatttctataaaacagggtttgggagaggaagaactgagttttaaaaagaggagtagggcatattgagattcggaaggtgagggaaaagttacctgctatgaatgtatttgcttgtctggtgcaggatacttgggctgctatttacctggagatgatagcagttgggcaaatggaagttgggaagtggaaggcaaaggacgtagctagtcttaaaaaaaaaaccttaaaatacttgtttagaagaacacagaagaattgaaattatcattaaaagagtattttgtagaattatccaaatacattttaaaatattaatgaaattataatttttaaaaaatattaactaggttgatccaagaagagacagtaacataaatatggcaatagacaaaggaggaattaagaaaattatcaaagaattacctcataataaaggcccaagtttaggtgattttacacgtgcttcatttcagatcttttaaaaaataataattacagtagtattcagatcaaaataatgaaatatgatttttcaactataaatttggcagtctttaaagtgtttataataaccaatgtttataaggatgtaagaagacatttttggtcggagtataagatatagtcatttagagtggacaatttggcaatatctatcaaaatttaaaattctcataccacttaatctaagaattccacagcccatatttaccctacaaatatatctgtacaaatacccagagagagagagatgtacaggtttgtacattgtaacagccagaaaaactggaaaaaatgtgaatatatatcaataggtaattaatcaattgtgtatgtacacagtaatatacactgatattaaattagcgggaggccagacgcagtggcttatgcctataatcccaccactttggaaggccgaggcgggtggatcatgaggtcaagcgatcaagaccatcctggccaacatggtgaaaccccatctctactaaaaatacaaaaaaattaactgggtctggtggtgtgcacctgtagtcccagctactcaggagcctggggcaggagaattgcttgaacccgggaagcagaggttgcagtgagccgagatcgtgccactgcactccagctgggtgacagaacaagactccgtctaaaaaaaaaaaaaaaaaaaaagtgggaaaaagatatctatgtggggagaaaaggacaaaatgtgtgaaacagtggttttcaagacagtggacatcaagcaaggaaagacaatgttccctgaaatatgaagaaaaaaatgaggtgatgagccctgcaatttgccagttttctgtcttgagagactttccagtcccaggatgagcagtgggggaagcccaggcagagcccagtagacaaagacagagcttttcaacagtgagagagactaaggcagctagaatttgcggagcagagtatcagagaggagagagttgcacagagagaaaactctgaagatctgtagagttcactttgactgttcgtctgagtactggtcagcacatacatatgtgcatatgaggaaataactcaaggctgggaaacagcaacccaaaaggattataggcaacaatgcccagtactcacacagggttgcaagtagtgcctgttcacaccagccagactggaaaacctcatgatttatgaggcaccgaatagagtactgacaagagattgcctcagtagggggttataactagcccttgaccaaacactgttctgatcctacctaataaatcttgaaagcacaaccagagataatcaaactgttcccaagtaacctaaccagaacaaagccaaaaaatttttataggaatacaaaaatatccagctcacagaaggtaaaattcacaacatatgacatccactcaaaagtttccaagcatacaaaacaagagactacaactcataaggagaaaaaaaattaatcattcaaactgacccagaactgatatagatgatagaattaacagacaaggtcattaaaataattattataattgtattccatatcttcagaaagctagaggaaagatttaacatgttaaataaacacatggaagatttttttaatgacctgcatgaagttataaagatgaaaaatacaatttctgggaggaaaaaacatactcaatgggattaacagcagattagtctttgcagaaggaaaactagtgaatttgaagatatagcaataaaaactacccagaattaaacacagagagaaaaataaaaggctaaaacaaagcatcaggaagctgttagataacttcctgtggcctaatataggtgcagccgaagtctctgagggagaggagagaaggagagaaataaataatattttttaaaataacagctgatatttccccaaaatttgatgaaatgttaaatgcacagatccaagaagctcaacaaacactaagcacaagaaacatgaagtaaactatactacggtaaattgtaactaaattgctcaataccagtaataaagagaaaaaagacacgaaggaacaaagaaagtatgcatccaatttcttgtcagaagcaatgcaagtaaggagacagtggagcaacatctttaaagtactggtgaaaaaacaacaacaacttagaattctatacccagcaaatatatctttcaaaaaccaaagtgaaataaagactttttcagacatatctgaagataaacactataggaaatgttaaaggaagtcatccagacagaaggaaaattataccatatgaaaatgtggacattcaccaaagaatgaagagcaagtgaagtggtagctacatagacaaatacatgtcttttcttacttaaatgtctttaaaaggtaattgactatataccaatgtttatggcagcataattcataataaccaacaggtgaaagcaattgaaatgtccatcgatggatgaatgaattaagaaaatgtggtataggccaggcatggtggctcacacccataatcccaacactttgggaggctgaggcgggtggatcacttgaggccaggagtttgagaccagcctggccaacatggtgaaaccctgtctctactaaaaatacaaaaattagccagatgtggtggcacaggcctgcaatcccagctgctcgggaggctgaagcacaagaatcccttgaacccggggggtggaggttgcagtgagctgagatcgcactactgcactccagcctgggcaacagagtgagactctgtctcaaaaaaaaaaaaaaaaaaaagaaagaaagaaaatgtggtttagccatacaatggataaaaagccataaatacatgctacaaccaaggtgaacgttgatattatactaagaaaaataaccagatacacatggataaatattgtatgatcccagttatatatggtacctagaatgatctgattcatagagacagaaaatagaatggtagttctaggggttggggaaagagaggactggggagttattgtttaatgggtatagagcttcagtttggaatgatgaaagttctggagaaagatagtggtgattgctgcacaacaatgtgaatgtgcttaatgccaatgaagcattgacctatacacttaaaaatgatccaaatagaaaattttgttatgtgtattttaccgaattttttaaatgaaaaaacacaattggctacttaaacagaaacagtgataaagtagtgtagagtttataatatatgtagaagtaaaatttatgataacaatagcacaaagatgggggaaatggaaatatactgtcgtatggtttttataccataaagtgatataatgtcagtagactgtgatatgttataaacgtattctgtaaatcctagaaaagccactaaaatggcaatacaaaaagttataactaataagccaacaaaggagagaaacgaaattataaaaaaaaatctcaatgcaaaagaaagcagagaaatgtggaaaagggaacaaagaacaaatgggacaaatagaaaacaaattgaaaatgataaatttaggcctaactgtattgataatcacattaaatgtcaatggtctaaacacaccgcaattaaaaggcaaagattatggcttcttagcatgtggatgtgtgcaccacccccaaagctctccaaaccccataattttgagtttatggaggttttattacacaggcatggttgatgaaatcattggctatgggtaattaacttaatctccagcccctctcccctccgtgaaggttaaggggtggggctgaaagttccaaccctctaatcatgccttggtctttctggcaaccagccccaatcctgaaactatctaggagctcctagtcaccagttatctgattagcagatagaaactcttatgttgggaatctgggactaagactaaataaatatcataacaaaaggtgattctataacctctatcactcataaaatcacaagagttttgggagctttgtgtcaggaactgggatgatgagcaaatatatgtatttcttattatatcacaatcagtgtttgaacattataaggaagaagaaagaggtcaactcaacgtgatagaggcttgtttgttttgttttttgttttgtttttttgaggcagtcttactctgtcacccaggctagggtgctgtggcgcaattttggctcactgcaacctctgcctcctgggttcaagcgattctcctgcctcagcctccccagtagctggaattacaggtgcacatcaccacgcctggctaatttttatatttttagtataggcagggtttcaccatgttggccaggctggtctcgaactcctgacctcaagtgatctgcccacctaggcctcccaaactgctgggattacaggcatgagccatcgtgcccagtcctcagtgtgataggggctttttaacaaaatagagagcagctggttacagttagaatgaaataaatgtcatcaaggaaagactgctggcagtatcttggggtgggttaccacactccagagtttagttctgaactctgagatttagaaactctattttataagtatacctagagtcgatcagactatcaagaaaagacttttgctaaccagattcacacacccatgcaaaaaaaaaaaaaaatgtataagctataatgtcagtttgtaaatataacaaaggaatgtaccatgtcagtgagtcctcatattcactatctagtacactttagtatcaagcagctggaaaatcaaattaataatcagagcagttgatcaaagacagttggatggttttaagaattaggtcatttactacagaaatgcctgatgtctctatctttccagcaacgacaattttatgtctgacagagaacatgtctttacctgggtcctgctggattaaaaactgaagcattcttattcatgtccctgtatttccaagttcaaagcaaaatactctttgttcaccctatagcttaaatacgactttagaaactgttcaatcccaaggctacgccagcgtaaacttgataggatttcagtaaagccctcttctttatgcttagattctctctgaaacagccactttccattaaccacattataaaatgtcctttaaggtgaaagacttctgcaaatagctactctcaaccatgatgtgttttctccttatctgcctctccagataaacttttatctgtggccccctgtggtactgactaaacctatagacagatcacttgtagtgtttagggaaaaacaaatgctagggatttttttctttggttgaagattttagttttggataatagaagaaacaagatgagggtttatctaatacagagtctataatctagtttttctattactatatgaatttaagtggaagaaaagagtgcttttttgccataattataagtctggaatttacatctatatgtagaattttttcctttgccattttaatataactaaattatgcagtctgaggcttttactttgttacctgatgtccttcccactcaattcatattctgaggataatttaagctgctgaaacagaaggtaaagatttgtgatatgttctctttagaaattacattttttgcatataaaaacgtaatattttcaaacagtgttttcatacaattgctgctttgaggttttcgtttgttgtttttagattaactcgggaacatataaaaggacatgggacctacttgttttgactctggaatgaccttatgaaattatgtaacaggttttttaaatcatattcttttgccctacactcatatgtttttcagtatgattccacaaaagatgacgtgcatgacttttacttattattgtttcctttcttttatatatatatatatttttacagagagggtcttcttctgttgcccaggctgtgactgcagcctcaaactcctgggctcaagcaatgctcttgcctcagcctcccaagtagctgggattagctattatttggtgcctattttagatattctctatgaactctaagattcatacaagtgatagtaagtgttcttcaacatgagttttacagaaccagtgttctattgaatatttgtaggtgctgaaaaagggtttcatagttaaaagtattttgtaaatactgggttaaacatgctctttaagtgcagaattctcacagcctttaatatattcatgggatcctgactgttagaaggaaaactaacaaacagaaaggacttccacaccaaaaccccatctgtacgtcaccatcatcaaagaccaaaggtagataaaaccacaaagatcgggaaaaaacagagcagaaaaactgaaaattctaaaaatcagagcacctctcctcctccaaaggaacgcagctcctcaccagcaatggaacaaagctggatggagaatgactttgacgagctgagagaagaaggcttcagatgatcaaacttctccgagctaaaggaggaagttcgaacccatcacaaagaagttaaaaaccttgaaaaaagattagatgaatggctaactagaataaccaatgcagagaagtcattaaaggacctgatggagctgaaaaccatggcacgagaactacatgacgaatgcacaagcttcagtaactgattcgatcaactggaagaaagggtatcagtgattgaagatcaaatgaatgaaatgaagtgagaagagaagtttaaagaaaaaaaaataaaaagaaacgcacaaagcctccaagaaatatgggactgtgtgaaaagaccaaatctccgtctgattggtgcacctgaaagtgacagggagagtgtaaccaagttggaaaacactctgcaggatattatccaggagaacttccccaacctaacaaggcaggccaacattcaaattcaggaaatacagagaacgccacaaagatactcctcgagaagagcaactccaagacacataattgtcagattcaccaaagttgaaatgaaggaaaaaatgttaagggcagccctcgggttacccacaaagggaagcccatcacactaacagctgatctctcagcagaaactctacaagccagaagagagtgggggccaatattcaacattcttaaagaaaagaattttcaacccgcaatttcatatccagccaaactaagcttcataagtgaaggagaaataaaatactttacagacaagcaaatgctgagagattttgtcaccaccaggcctgccctacaagagctcctgaaggaagcactaaacatggaaaggaacaactggtaccagccactgcaaaaacatgccaaattgtaaaagccatcgatgctaggaagaaactgcatcaactaatgagcaaaataaccagctaacatcataatgacaggattagattcacacataacagtattaaccttaaatgtaaatatgcaaaatgctccaattaaaagacacagactggcaaattggataaagagtcaagacccatcagggtactgtattcaagaaacccatcttacatgtagagacacacaggctcaaaataaagggatggaggaagatctaccaatctaatagaaaacaaaaaaaggcaggggttgcaatcctagtctctgataaaacggaccttaaaccaacgaagatcaaaagagacaaagaaggccactacataatggtaaagggatcaattcaacaagaagagctaactgtcctaaatatatatgcacccaatataggagcacccagattcataaagcaagtccttagagacctacaaagagacttagactcccacacaataataatgggagactttaacaccccactgtcaacactggacagatcaacgagacagaaagttaacaaggatatccaggaattgaactcagctctgcaccaagcggacctaatagacatctacagaactctccaccccaaatcaacagaatatacattcttctcagcaccacgccgcacttattccaaaagtgaccacatagttggaagtaaagcactcctcaacaaatgtaaaagaacagaaattataacaaactgtctctcagacctgtgcaatcaaactagaatgcaggattaagaaactcactcaaaactgctcaactacatggaaactgaacaacctgctcctgaataactactgggtacataacgaaatgaaggcagaaataaagatgttctttgaaaccaacgagaacaaagacacaacataccagaatctctgggacacattcaaagcagtgtgtagagggaaatttatagcactaaatgcccacaagagaaagcaggaaagatctaaacttgacaccctaacatcacaattaaaagaactagagaagcaagagcaaacatattcaaaagctagcagaaggcaagaaataactaagagcagaactgaaggagatggagacacaaaaaacccttcaaaaaatcaatgaatccaggagctggtttgttgaaaagatcaacaaaattgatagaccactagcaagactcataaagaagaaaagagagaagaatcaaatagacacaataaaaaatgataaaggggatatcaccaccgatcccacagaaatacaaactaccatcagagaataccataagcacctctacgcaaataaactaaaaaatctagaagaaatggataaattcctggacacatacaccctcccaagactaaaccaggaagaaggtgaatctcttaatagaccaataacaggatctgaaattgaggcaataatagcttaccaaccaaaaaaagtccaagaccagacaggattcacagctgaatgctatcagaggtagaaggaggaactggtaccattccttctgaaactattccaatcaatagaaaaagagggaatcctccctaacttattttatgaggccagcatcatcctgataccaaagcctggcagagacacaacaaaaaaagagaattttagaccaatatacctgatgaacatcgatgcaaaaatcctgaataaaatactggcaaaccaagtccagcagcacatcaaaaagcttatccaccatgatcaagttgtcttcatccctgggatgcaagactggttcaacatatgcaaatcagtaaacgtaatccagcatataaacagaaccaaagataaaaaacacatgattatctcaatagatgcagaaaaggccttggacaaaattcaacagcgcttcatgctaaacactctaaataaattaggtattgatgggacgtatctcaaaataataagaactatttatgacaaaaccacagccaatatcatactgaatgggcaaaaagtggaagcattccctttgaaaactggcacaagacagggatgccctctctcaccactcctattcaacagtgttggaagttctggccagggcaatcaggcaggagaaagaaataaagggtattcaattaggaaaagaggaagtcaaattgtccctgtttgcagatgacatgattgtatatctagaaaaccccatggtctcagcccaaaatctccttaagctgataagcaacttcagcaaactctcaggatgcaaaatcagtcttcaaaaatctcaagcattcttatacaccaataacagacagagagccaaatcatgagtgaactcccattcacaattgcttcaaagagaataaaatacctaggaatccaacttacaagggttgtgaaggacctcttcaaggagaacaaaccactgctcaatgaaataaaagaggacaaaaacaaatggaagaacattccatgctcatggataggaagaatcaatatcgtgaaaatggccatactgcccaaggtaatttatagattcagtgccatccccatcaagctaccaatgactttcttcacagaattggaaaaaactactgtaaagttcatatggaaccaaaaaagagcctgcattgccaagtcaatcctaagccaaaagaacaaagctggaggcgtcacgctacctgacttcaaactatactacaaggctacagtaaccaaaacagcatagtactggtaccaaaacagagatatagaccaatggaacagaacagagccctcagaaataataccacacatctacaactatctgatctttgacaaacctgacaaaaacaagaaatggggaaaggattccctgttcaacaaatggtgctgggaaaactggctagccatatgtagaaagctgaaactggatgccttccttacacctcatacaaaaattaattcaagatggattaaagactaaaatgttagacctaaaaccataaaaaccctagaagaaaacctaggcaataacattcagacataggcatgggcaagaacttcatgtctaaaacaccaaaagcaatggcaacaaaagccagaattgacaaatgggatctaattaaactaaagagcttctgcacagcaaaagaaactaccatcagagtgaacaggcaacctacagaatgggagaaaatttttgcaatctactcatctgacaaagggctaatatccagaatctacaaagaactcaaacaaatttacaagaaaaaaagcaaccccatcaacaagtgggagaaagatatgaacagacacttctcaaaagaagacatttatgcagccaacacacacatgaaaaaatgctcatcatcaccggccatcagagaaatgcaaatcaaaaccacaatgagatgccatctcacacaagttagaatggcgatcattaaaaagtcaggaaacaacaggtgctggagaggatgtggagaaataggaacacttttacactgttggttggactgtaaactagttcaaccattgtggaagacagtgtggtgattcctcagggatctagaactagaaataccatttgacccagccatcccattactgggtatatgctaaggattataaatcatgctgctataaagacacatgcacacgtatgtttattgtggcactattcacaatagcaaagacttggaaccaacccaaatgtccaacaatgatagactggattaagaaaatgtggcacatatacaccatggaatactatgcagccataaaaaaggatgagttcatgtacctttgtagggacatggatgaagctggaaaccatcattctcagcaaactatcgcaaggacaaaaaagcaaacaccacatgttctcactcataggtgggaatggaacaatgagaacacttggacacaggaaggggaacatcacacaccggggcctgttgtggggtggggggaggggggagggatagcattaggagatatacctaatttaaatgacgagttaatgggtgcagcacaccaacatggcaggtgtatacatatgtaacaaacctgcacattgtgcacatgtaccctagaacttaaagtataattttaaaaatctatatataaaaaataataaaataaattttaaaaaggaaaaaatatatattcatgggatatgaatatccctagtggaggctgtggtttgcagtatttctgaaaccaacttgtccatggacccttactttcacaaaacctcacataaggctagaactgaacagcttagaaaaatgctgctatataaagacttggaaccaacccaaatgtccaacaatgatagactggattaagaaaatgtggcacatatacaccatggaatactatgcagccataaaaaatgattagttcatgtcctttgtagggacatggatgaaattggaaatcatcattctcagtaaactatcgcaagaacaaaaaaccaaacaccacatattctcactcataggtgggaattgaacaatgagatcacatggacacaggaaggggaacatcacactctggggactgttgtggggtggggggaggggggagggatagcattgggagatatacctaatgctagatgacgagttagtgggtgcagcgcaccagcatggcacatgtatacatatgtaactaacctgcacattgtgcacatgtaccctaaaacttaaagtataataataaaagaaaaaaagaaagaaaaatgctgctatagaagctcttcactcactgtgtttcaagttttctgacaagtgccaatcctctgttaatagcaaaagctgttgctatgtaaagttatttactaaggctaataattattccaccatatagattctattttactctcaattacagacaccatttttgtcaagttgaagactgaaaaaaatgtgctttggttattaaggaaatgcttagagaattgactgatttctaaaactatggggcaaaggggagaagattgaataaaattcaaactaaaatttaaattttagtttgctatatcctccctatagcaatatatcctgctatgttccatcctgccaatcttaatttcattagctaaatagcctaccgaagctaaccatgttttcaaattgatctctaacttctttgtttgcatcttagaaataagaatttgaaggaggggatggaggatatagatcacaactatgccttcttttctagttgaggagggctttttaagttttctgtttgttggtttggtttgcattctttttccttctagttactgaaaaacatgatatcgtagtggttcaaaaatgtttagtgctaggtacgttgattagtatccaagtctagctggacatagtggcgcatgctggcagtctcaacaacttaggaggcaggaggatcacttgagcccaggagtttgaggctgcactgagtcactgcttgagccactacacactatcttgggtgacagagtgagaccctcatctttttaaaatacatatgtgtttattacccaagtctaagtagctaactacttataaaatatcctgtggttaattctgctcttaggaaaagatttacctgaacatgtgaatcttctctgaccctctgtctaataaagtagcattctacacacacacacacacacacacacacacacacacacacacacacacacaatttctcccaatctcataatctagtttattttctttatatcattatatgaaattatttttacttattagtttcctatttgtcttatccctatatactagtctcagattcttattataaccaagggcttcatattatttctttgtataattgggttattttccttttagttattgaattgtattagttctttacatagtccagatacaagtccctttttagatatatgattttcaaagtttttctcccattctctgggtttgcctttttacttacttgatggtgtctgggttacatatgtttagtcctttaattcttctgtggttttcttgttttccatgttcaattgtaaaatttcaattgccaaattccacaagtatgggaacagctactccttttaaatctttattgcatccagtagagtggccatacatggttcacatctattaaagaatttgtcttcacaatcagccaacttgatttccttattgatgagatactatggtttattggtttgttctcttacaggtaaatcgatttagtaaggtggaagacagagcaatttttgtcactgaccgtcacctgtataaaatggatcccactaaacagtacaaggtgatgaagactatccctctatacaatgtaagtcctctgtgcttctctctggataaagattcttaacctggtgctcatggaccactaatgggtcaatagactgagttctagaatctttggggctttaggatgcccatgaattcctgaaattttatgtgtcatatgttttgtagaaatgtacagttttctaaaaggatccaaagtttccaagagataaatgcagacattttttaaagtgtaaggactactgattctttgtgatctttctctattcctgatccactgtttaaatgcactggcgtataatgcattttcttatttgttttcataaggtttgtttttatatggaaatggtagaaaatcggtaggggattacttaaaatattactttttctcttttaaatgtaaaatttatgctgcttccagaattcttttcaccatatattttgtgcatatttagttgttgattgtgtgatctttggtgtaagtccactttattgttcactataaccatacagttttctaattccgttatcattttttatttgaaatacgaaatttcgtgggtatctccttgaatcgcaatatgagtttgtttgtttgtaatttgtccttcttaatagagtctgctttacaagtgactgtttattctgattcttcggaaagatcctaccggaatattggatcttttcacgtgtcaggtgattttcctctgttagttgttaaagaaggaagactgtgtttgtctaatactgggaactatgaggagtattacttagagaatattttaaatccttttggttgctgcaagagggaataggaaacatattgttttacagttttattttgctaagtcaggggtccttttagttataaggtacaaggaagacaaactattcctggctttgctgaatgctttagaatgatttagactatggggtggagatccgtcttcactatgcacccctcacccaaccccctcacacacacaccttttttcctttcaatagaaaggccaatagattgcaactaaggctaaaatgatatgacactcttttttattttattttatttattttttagacagtttgactctgtcccccaggctggagtgcagtggcacgatatcaggtcaccgcaacctccacctcctaggttcaggtgattcttgtgcctctgcctcctgagtagctgggattagaggtgcacgccaccatgcccaggtattttgtatttttagtagagatgaggggtttcgccaagttgaccaggctggtctcaaactcctggcctcaagtgatccacccgctgtggtctcccaaagtgctgggattacaggcataagccaccacacccagccctaaaacactcttgattatatatagtcttcttatatatagacttataatcttctattgcagttacagtttaagcctaataaccctccaatcttgaagtaggagatgaagatagatgaggcagaaaatcatattttgtccaagtctaaagaagtgtgaaaccaaaaaaattaattgtggtatgtgttttgttccttttccttgctttctattaaggggagattcatcaggcacatgatataaattcaataaatagttaaacagctctttgaaccgaagttgttttcccttattcatgtcaactggtttttatagtcactgtttccctttatcttcatcattatcattgctaattgttattaataatatcatgacatcataaaaactaacaatgtttaactacagtagtaaaggtaaaacgtcagtgggatggatacaccccgttgcagatgctgtcaacaccctgcccataccgtctcgtattcccataccatatttgtgcataccagcctgatttccagcagccaacatctttgtcaaaaagctgccctcaggctgccaaacctgctttgcccttactcacagagggctggaagtgcctaggcactcattgtgtgataagtgtggggtataaatactccatctccatcactcattggccaagacagttccaggctgtctcacaccatctcctagagcttccctgcaggagtaaacttgcccacagtggtggctgccttctctccccacttccttgccagtgtgcctgaacctcccaaatcaactctgtatactcatcagcctttatctcagggtctgcttctgggtggaactaacttcagaagggcagccaccttttcagagggagcaagttcgatgtgatggggaacttccaactagacctgtcattgtttttaagtctgaagcaaatatgtcagaatattaggtgtggatgatagggacatgagtatttgttatattattatttatacttttctgtatgattgaaatattttgaaattaaaaacaaagtttaagataaagaacctttttaaaacatgatgatgctaataatagtgttggagaagctgggaggggatgaaggaaagtgatttcaattttaaccatattgaatttgaggtttttgtgaaacgtacaagtatactttccatagatagttggaagtctgatggtatagagtgggaaagaattcatcacttcagatttaagagtggactcatgtatagttggaggctgaaattatgagtcgagagagagaaagggggtggattattcaaaaacatccacagttaaatggtgggaaaaagagaatcactgaaggaaatggaataaaaaggaaatttctttatggacctccattttctcatctctcttttaatggactaaatgagctctaatttcccttcagttctatactttttaaattattctacgaaagaaaaaaactatgggaacatcatgtttcaaaatcaaatcggaaagttttcagaaataagagtagtcaataaaaacatacagggcatagctaagggcatccatacttctctcattctccacctttcatttctccttctatagaggctcctttcctgttttagttagtcctttcttgctccaaggacagactgtaagcgcattctgtcttaagtaatgtttctttccacccccccgccacccgagacggagtcttgctctgtcacccagactggagtgcagtggcgccatctcggctcactgcaacctccgcctcctaggttcaagcaattctcctgcctcagcctcccaagtagctgagattacaggcacctgccaccgtgcccagctaattttttttgtatttttagtagagatggggtttcaccaggctggtcttgagctcctcacctcatgatctgcccaccttggcctctcaaagcgctgggattacaggcatgagccaccacgcctggccccattttttattttagtaaaggtaccagggtagtaagggaatcaaatcccatggaaacccaggaaatgctaccattcaggttttaaggcagctttaagggaccctgctatcgtttagcctcctccacaacctgagttttgcatagcctatgtttctgccattctttctctttttctctttgtctatcttcttactcacagttacttctttcttgctagacagcatgggtcagctttaggctaaggtctgagtcagccaactcagcaaaccattagagtttcatcttgcagtaacatattgaacacagtgtctcagatgaggcctcgccatagcaaccaatgctgggtgatccagatcggtacttttgttcatgccgaatgcttgcaaatctatgcatagtctttccttactttttctggtatggcatggataattcctactattcattttggggtataactgatctcctccctccactatttatcactgtcatccttaggcccaagccacatttggaccttggtcacagatcacgctgaatattggggcgggtcattgggttttcccagcagaaaggagcagaagagaagtgcttcagataggccaggttggccaggcatcctaggtccttggattcttcccagctactcccactccaattgccagcatcccagtctttgtcaaacaggacctaaaattgtgctcatgaatctccaggatgggtgaaaactcagctgatgttgcaatttggtagtttgtctaatcattcttgaacgtagtcttcatgagtgctttcagcagaaagtggttcctctgtttccttaactgcctccagccacgcactatgggaccaatatttgttgttttcctaatgcactataaaaaatacccatccaatcccactatccttacatctcctaatgcattgaacttctataaatcagcaactaactttaatgggcacaccagccatctcccatgggtcaccagtgataggttaagtaacatcttcctccgtacagaccatgaactgctggctttccacactgggtggagcaatcctcctttgcccctccttgttgagatgctgcagccaattgcacaccccctcttgagagttgctttttgcagcatcctggtgctcatttcttcctgctaggttttgagttgtaatgaacagagacttaagggacctcgagtagacaggagatgggcgattttaaattgcatctgggtcagagagaatgacagtctagaaattaccttctttgggattttaggcagttatacatcagatcatctatacatcacaccctcaataactaaaccattcaattcagataattactaagtgttcattatatgccagccacatatgtattaggaacatagaggtgtcaaaacaggcaaaatctctgcaagtcttggaatttacattccaatggggaaaagtatatgtgtgtgtatgtatatacatacgcacatgatatagtccatagaaggtgataagggaaaaaataaaatcaggaaagaagatagaacgtgtgaggtgtgttgtaagtttaaatagggtgaccaggcctcactgagaagttgacatttaagcaaagacttgaaggagttaaggaatgaaccgtacgtgtacttggtggaaagtattttagacagaaggaacagcaaagacacagagacacgagcagggaggaaggagccttctgggatgggggtgggggctggaaatgtgtaatagcttgatctggtggggggttcacagatgtatacatttgtaagaactcatcaagctgtttacttgagatttgtgcactctagggcatgcatgttataccctaataaaaatgggaggagaaagagaagaaaaagaagaagaaagcaagctatctatgaagggggtaagaggaggatgtaagtaaagaggaaagtgaagcaaattagttaaatgatcactcaagcctgggggagatttcagtgtacttaaagagagggatgtgtgaaacactagagtgaagagctcttcattgtacctataggtatatactcctttgtgttcctaatattgattatatgtactttttctcatttcttccaagatcagttttgctgtaggtctgtctctcttattgattttgttatcttttcatttacctctgctcttattttttccttcttcattctttaggttgttctttttctagcctttttagttgggggcttaactgttttttttttaaatttagtcttaaaaattcattgaatttgtaaatttgtatttaagaatggcttgagctgaacttcacatgtgtgatactacctttgttgttcagttttaattattttgtgatttccattgtgagttcctctttaagccatgagtagtttggtagtatgtttttaaattactacatagatagtaatttgtggtaagtgtgcttttgtgttctgtgcgggggagatcatttttctccattgctcttcagtgccatatttgtcataaaccgagtgtccatacacctcttccggattctctgctctgttctattggtctgttagatatccttgtgccagttactgttttgattactgttggacaaaggtattatgaacccaaaaattacaataaattcccagataccctcctttccgtcttacctcctcccaacataacactgtcatttgccacaaccatatgaagggaaaaagagcgggggatgatggtaaaaggaattctgtcagaaaggacagcttcctatttgcctatttatatatatatatatgtgtgtgtgtgtgtgtgtgtgtgtgtgtgtgtgtgtgtgtatatatatatatatatatatatagtacttaagtttgcatgttttctttctcatgaagtcaaatgcctttaggagtcagatgggcacatacacgaatgcagcatatacctcatgacacggcagccgccactccgctccaaaaggtttgggccatgcctgaatccactgggccaaagctttggatatgcctagaaaaatcagaagtctgcattttatgtgaaatctcctaattgttaagtattatgaactaactttaaaatgccttgcaagccaaataaaaaaaacatgtctataggccatattcagccccaggtttccagtctgctactcttattaaaagaggtcttgtcatttgttatttgaagtgagctataaccagactccttggcctcctccatgccaaactttaaaaactcaaaatctatgttatgtgttattctagactttatggagcagagatagacactaaccatttctcactcacttataaggagctataattgggtgcaagctttaggagaatatattttctactttagttagcaaggaaggaagggaataaaggaaatctctgataagcaaatctttcctaacttaagagcattctgttccctcagagttcactgctaattctatccctctgactttttattatgaaaaatttcaaactaacagagtttgaaagaatagcacagggaacacccatgttccccacccctatattcactaaggccttattttttgccatatgtgttttatttctgtcttgtgacacttcacccttgaaatacacgtgtgcatctccgaagaataaggacattctccttcataaccacaataccattttcatatctaaaatattaatatttccataatatcatctaatattcagtacatatttaaatttccccagttgttcagactaccttttttttttttaagagacgggttctcgctctgttgcccaggctggagtgcagttgtgcaatcataactcactgcagccttaaactcctgggatcaagcattcctgtctcctcagccttccaagtagctaggactgcagatgcacgccactactcttggctaaactttgaaaattttttttgtagagacagggtctcacgttgcccaagctggtctggaactcctggcctcagccaatcctcctgcctcagcctcaaatcccaaagtgctggaattacaggcatgagccacaccacacctagccaaagactgccttttaaacctgtttttttaataacagaattctgtgtaggttcacatttacatatgtagaagtaaaattattccatcatatggcacttggtagttacatctctggtctgttttagtccacactgcacttccactcacatatacccctaccctgtttttttcccatcatattgactttttaaaatagctttcttgaggtataattcactgttacagactgaattgtgttcccccaaaatttatatatcagagtccaaacccccagtacctcagaaagtgactgtatttggagatggggtctttaaagtagtaattaagttaaagtgggatcttaagagtgggccctaatccagtatgactggtgtccacatgagaggagattacaacataggtacagagggaaggccatgtgaagacagagagaagacagccatctacaaggcaaggagagaagccgtcagaagaacaactctaccggcagggcgtggtggctcatgcctgtaatcccagcactttgagaggctgaggcgggtggatcacgaggtcaggagattgagaccatcctggctaacaaggtgaaaccccatctttactaaaaatacaaaaaaaatagccagatgtggcggcaggcacctatagtcccagctaatcgggaggctgaagcaggaggatgatgtgaacccaggaggcggagcttgcggtgagccgagatcacaccactgcactccagcctgggcaacagagcgagactccatttcaaaaaaaaaaaggaggaacaactctaccaacatcttaattttaaacttccagcctccagaacttcaaggaaatacatttctgctgtttaagccacctagtctgtgatactttatcatggcagccctagcaaactaatatatttacataccataaaatttgcccattgtaagttatagttatttttagtaatttatgcagttgtgcaatcatcacataatcctgtgttagaatattactaggctggacgtctgtaatcccagcactttgggaggccaagatgggaagattgcttgagcccaggagtttgagaccagcctgggtaaaatagtgagacactgtctctacaaaagaaagaaacagatctgaatactagatgtgcttgttgctaccggggattcatttcttttaggtcctctcagctggcacaggacagaaatatatgtgtataatctgtgtatatacacatctttataaatatttttatatgtgaccatctttatatgaagttaaacatgagtttatactagtgtctctcactctagtccatgaccacatgagtcattctagccttcccccatcgcttatctttaaattccctgtccaaaagtgagaaacctggcttgcaccatccactgtccatttacctaattgttcatttccagtatccatgcatagcagtatcagaattgttaacctgtactcctgtgaggcacgactttatcaaatagagtacagtgctacatgcacttccttttccctttagtcttacacactccactcatttccaaagttacctaggtcagcaccttttctttccgccctcttcagtgagattgatacctttttttttttttttcttgagatgaaatctcgctttgtcacccaggctggagtgtagtggcgcaattttggctcagtgcaacctccgcctcccggattcaagcaattctctgcctcagccgagtagctggaattacaggcgcccgccaccacgcctggctaattttttttgtatttttagtagagacgaggtttcaccatcttggccaggctggtcttaaactcctgacctcatgacccacctgccttggcctcccaaagtgctgggattacaggcgtgagtcactgtgcctggcccatactttttaatataagtggattctcttgtcacattttgcattccttcctgaaaccccccaacctcctaattttttttaagttgcccacaaaggttcactcttgatgctgttgagttctgtaggttttggcaaatgtatagtgtcatgtatccaccattacagtatcacacagaacagtttcactgctctaaagatcctgtgtgcgtaacctgttcattcctttccctctttcccctgaacctacgggaaccactatcattttactgtctctacagttgtgccttttctagaatgtcatataattagaatcatacagaatgtagccttttcagattgtcttctttcacttagcagtaggcctttaaggttccgtcatgtcttcccatggcttgttggcacattttgtttttttagtcaagaaatagttcattatatggaggtgccgtaatttgtttctccattcacctattgattgcttccactttttggcaactatgaataaagctactaaaaacatttgcaagcaggttttttgtatggacacaagtttttaaatctattgaataaataggagtgctattgctcaatcctgtgataagactaaatttagctttgtaagaactgccagtattttccaaagtggctgtatcattttccatttccaccaggaattaatgagtttctgttacttcccatcctcatcagtatttgatagtgtcttttttttattttggccattctaataggtatgtagttgtatcatgtatttttctattatcctaaaatatataactcagtacacactggattatcaattaatctttatgagaaccatctctccactctttgtcattagttggtttgttttcaggagacaaagcttgatcttcatgtaagcctaagcaaacataattaaaagctgaatttggcactttttccccctcttccattagcgagaattattcaatttaccatttaatgatggttctagtcacacaggaaagataaaaacaggaaatcgtgacaggtttttgagactcttttcagcaaacactgttctcacaaatggcatggtcatataattgtaaacaacatgaaacattaagttacgggtgacccctttctatgtataaatattgcacactaaggttagggtttcagccaactggaatctgcattattgtcaaattggcatcatcccctttgagtcaccaggtatatttgtatgtaatattgaattaaagcattagttgtaaaattgttaacaaaggttaaaatttttacagggacagtagggtcagaatttgaatgttttgtgagctgggggacttgtggttgctgaggcttgatatggaaaacagaagcaagaaatagcctacataattagcaatattgtgtccaaaactttgatcacaatctctttgaaaatcatactagagatcactgtaaattggtgggaaagattgctccccgtggctgaagcatgttgcttgaataaatgcacttctgccactagagttcatgtggacattagtcctcccaaaccagcatccatggagcaggttgccaagattgagtttaatttgcgtaaacaaaaaatctgtttgccagttttgagtgagagcacagtaaccgaaacatataaccttacctcagctagaattcttcttacccttcttttgttgttgagtcatgatgtgtttggtctgaagaatgtttgaatctgcccatgaatgttgttttgatatagtccctttttatcagtatgggcttgatgactaaggaagcagccaattaattgcacaaatacctcctttcgttctgtggagaatacaaagcaagcaggggagagaaaagagacaattatctgaaccgatgtgactgttttgtaaaggtaaatggactgtaattatgccagacttcatgctttattgctctatttgacgtgacttgctagaaagatatcatttcgtttggaagatggattgtccttgtaatgcgtacagggtgaaccctgctgaaatccatccgcccgccggtctgtgccccatcaccatttctaaagcaccctaccctcatggcagtgtcccaaaggaaggggtttccatggtaacctcaatggatacagtcagctgacgtctggcaccgcctgtgctggtgtgcgctagcctactcactccctcggccctccctcaatcctttcaactatatttattagttctctttaatggaaagtatataatcccttaatgtcagaccttgagtggcactcagctttattaatttatttaggtaataaatttaccttcctaattaattctcagtagtcctgggagctgtattattttaaacatcttgcacaatgtttatagttctgcgtgttataacaaagagagccacttagcaaaattagatatttggaaacctctcttcttagaaaaaaagtaatgtctatattatagagaaatttagaaaaatacagatgaaatttttttcttattctgatggctttggcaatgaaacattctttccccgcctcttataatttctttttaacactcaatgactttattattggatttgagtgagccacgtcgttttaaaatacttctaagaaatgtgacgactaagccacattctctctctttttttgttaataagagagaaagaagtcagaatttcagagctcccccgttgatggttttcctgacatgtgttcagaagcaaacgccttttgttacactggttagagacagctgcttatgccaaacgctactaagcaaactgctttcttttttttaatgtgtttttccttacatgtgcaaaaatctgaccaataagcaaacgatttatagtaccaaaagtcactgcttttgggcacaaagtagagtccattttcatcagtactgtacttggaaattcaatttcatatgtaaaagatgtctcaaagcaacgtctgaaagcaccaaccactagggccaatttaacgttgttaaagaaacacaatgccttttaagaactaaagtgtaagcaaattagtacagtaccaccttaatttatccagaggtcagattgctagaggcaagatggctttaaaacaaagccatacacggagatgtatatattttttacatctctacatttgcagaaatagatgtcactaagctgcggcaataataggcttcctttagacagctgtctttatcagagctctcttttattcagtaaacattttggagcacctcccatgtgctgtgcatttggcaggcactggtggtgcgagcatacatcacgtagcctctgcctacaagccttgtggacccgtgggagagacagggaagccaccagtccatcggcacagtgcctaggttgctcactgtggcagccccgtaggtgcacagcacagtaataccttgctctgaagagaaaactggtgctcagaaaggtgaagcaatctgcccaggtcacaaagctcaccaagaatggagctgggcttcatcatttgtgtgtgtgacctagcccctaatcccaagtgtgtttgacctaggccagttccaacagccacctgctacctgcccctccctttgacagataacacatgaaactaaaatcctgtttggggcccagagcagtggctcacacctgtaatcccaacactttgggaagctgaagcaggcagatcacctgcactcaggagtttgagaccagcctgggcaacatagtgaaaccccatctctacaaaaaatacaaaaattaaccagtagtcccagctgctcaggaggctgaggaaggacaattgcttgagcccaggaggcagaggttgcagtaagctaagatcgcaccattgcactccagcctgggcaatagagcgagaccctatttaaaaaaaaaaaatcctgttttaagaggaaagaaataacagaactaacattcatcgcatgtgtcatgccaggtgtttcttaaatgatttaaccagactatatctcaatcactgtaagaatcccaggcaggaagtctcattttatagatgaaataaattctcagagaagttgaccactagcgcaatgtttcagtgcaggttcttctaatctcagagccagaggtagccacaaaattaggtatctttctacctaacttaattgccaaagttgctctctctctctctctcattttctttatttatctatttaagtctttcttacattaataatagctttctaaaatagtttgtcttaaccttttgaggattagtgacttgtatgcccgcaggaaactgaataatcaagatgagagtgtttgtattggccctggtctgcatatcaggagctccgaaggtatggtccattaggatacaaaaaagggctgggcacagtggctcacgcctgtaatcccaacattttgggaggtcaaggcaggcagatcacttgagtccaggagttcaagaccagcctggccaacatggtgaaaccccatctctactaaaaatacaaaaattagctggacatagtggcaggtgcctgtaatcccagctactcgggaggctgaggcaagagaatcgcttgaacccgggaggcggaggttgcagtgagccaagatcgcgccattgcataccagcctgggcaacaagagcaagactctgtctcaaagaagaaaaaaaaaaaaaagatacaaaaaaggaaaacaagaaaaagaaaatatcttcatttcttttaggggggaaaaaacagcacctttaaagagagctgccacgttatacttttatttgtacagtttgtttctctcaattgcaatcctgcctcctcaaagaagaaaaggtactactacagtctcaagaaggccagaaaaaatatagtggttttactgttaacctgctatttagaagatctgatttttattttatttagttttcacttttaaagccaaataaaaaatgttagtatgttagtagtcttaactcaggggttctcaactttagctgcacattagaatggcctggagagttcttaaaattactgatacccaggtcatactccagatgcatgaaatcaaatctctgctggtagagctaggcatcagcaagcattaaagctccccaggccggccgggcgcaatggttaacacctataatcccagcactttgggaagccaaagtgagaggaccgcttgagcccaggagttcaataccagcctggccaacatagcaagaccctgtctctacaaaaaaaaaaaaaaaacttaaagaaaaaataaaataaagcttcctaggtgactgcactatgcagccagagatgagaaccacttatctattctgttccccaaattttttcacttttgttgttttggctccttggaaacatctgttaaaagttggacttgctcccaaattcagttctgccattagagttttttatcacttacgtatatgtgtgtgagagagagacagagagacacagagtgctaaggtctgaaggtgttcccccaaaattcatatgtcaaaatcctaacccccaaagtgatggaactcggagatgggacctttgggaggtttctaccctcataatgggattatcgacttatacaagaggccccagagagaccctcgcccttttgccatgtgaggacactacgagaagttggcagtctgcaacctggacgagggccaccagcaccctcatctcggacttctagcttccagaaccgtgaggagtaaatctctgttgtttataagccaccagtttatggtattttgtcatagccacctaaatggactgagacagagttggagagagtgtgtgttttctagaaagcctcatgatcgcgtatctgtatcaaaaattaaattttctttaagtcattgaccatggtttaatgtttgaggacagtctcatcaaaagattttccttaaacaagagtagtataagataaagaaatcaccttatatttgatgattttcattccttatagtggacctctgcatatattgtctcacttagcaacgaccccccatccccaccactaccacacacataccactgggaggtggcctatactggtcctggactgtagccattaaataaatgagtttgtttctttgttattggctgaggtccagaacaaactttctttacacagaattgttacgatgaagttctgcactacagggggaatctgatttttttaatataataaacattagaaggatttcattttattggaaccatatctaagcatagacctctttacagtgtgccatggttagaggtatatctagtgggaacaagtaaagttgacaggctcagggtcctctctcctgagttagctgaactactactttggctcctgttgagcagccattctgcttcttgggagccacctctgatgtccgcccttaccatcccctctgatagcctttcacaaatcttgttgagttgtaaaaatatcttatattgcatttaaagatcattacaccataaatggtaaaggacaaaagaaaaatcacaccccagtggggtctggcaacacaagtgttaggatatttggaagcagatgggtggttgttgaattcatgccccattttaacagtagcacccatctcagttgaatgttgaggcccaaaatgaggtatatgaaataatgcgtggaaagtcctcagcatcgttcttatcacatagtcaggtgctctagaattagaaactgctctttgcccccttgcaaactggcaatcccatgcctgtagaaatcagagtcggatgaagtcagctttcagtgccctcactgtctaatctttgatctcggttttcattcccctggagtgttctcccagataactgaatggcttccttacttcattcaggcctctgcccaaatataactttaaaaggcttgttcagaatgataccctcagctccatcttatccctctgtatgcctttacacactttattcttcttcacaggccacatcaccacctgtcacattattagagttcttttcagtctggctcccccacacccccattagaacatagactccatgggagaagggtcggggactctcttgttcccagaacactgcctgccatacagtaggtgttcaataaatgagtgttgatggttgagctggagaggtcaagactggtgacaggaaaagcagttaagatgctgcttaagaaattacaaggacctgtactcaagcaaggaccataaagagggggagatgggttcaagacctgtttatgtgcgagaacaacaggctttggtgctggtgactcaccaagatgggaaatacaggaaaagaagcagggatgtggtagcagagtgtgagaaaggtcagtctcaaatgggcttcatttgaggcaaggcccaatacacagtcaaagagcaacctaggatggagactgtcttagcatggggtgctgtaacaagaaaccacagaccgagtggcttaaacaacaggaatctatttcccagtctggaggctggaagtccaagatcagggtgccagcatgtttgagctctggtgagggctttcctttcagttcacagaggactggctgccttctcattgtatcctcacatggggaagagaggaggaagcaggttctggcctgtcttttcttatagagacactaatcccagcatgagggctccaccctcatgacctaattacctcccataggccccacctccaaataccatcacactggggattagggtttcaacatatgggaggtcacagacattctcagtccttagcagagacatggatttggaagccgtggacaagagcttggggaggggcatgaggagagaaaggagaaagtacctgcaaggtaaccagtaagaataaagcttttaaggctgtaattaagggttggctttgataaggaacacatgggaaccatcagtcttctaagctaggagaacctttttaatccatccatagcttttactgtcttccacacattcaataaattctatcatctaccacttacctggcaggtaaggagggaaataaggacgagaagatgcagcttctgcttgtcgtttagtgggagaggcaaatgcaaacaaaaataatcacagtgcagcttgttaaatgcaaaagcaaaggtgagcatgaagttctatgagagggtgcagaatatggcagaaatggcttttcaggacaaggaaacgtttgaggaggctcatacgtacaggctgagcatccctaatccaaaatccaaaactctccaaattccaaaactttttgagcaccaatatgacgccacaagtggaaaattccacatctgaccgcatgtgacaggttacagtgaaaacgcaggcacacagcacagcttattcaacgtccccaagggaaaaataaaattaccttcaggttatgtatataagatttataggaaacataaatgaatgtcattttagacttgggttccgtcctgaagatatctcattatatatgcaactattccaaaatctgaataaaatgcaaactctaaaagatttctggttctaagcactttggataaggtatactcaatgtgtatatgcaaatacttgtgtatgtttgcgatgggctctcgtagcttttttcaaattcttaaaaggagtgtgtgctccagcctgtgatgtttgcctcctggctcctccccctacatcagaaaccactgcaggagaaactacatttctgatttgtttggggcattatctagaataagaagttgggccttcaagttctaaacaaaatggaagagatgcatttctccctacctgtctcactgaatacagctaaaaaccctagacattatatcataaaacaaatttaagaagattctgaatgctggagagaggaaagtggaccagctagggacctcaggactctggaggaacttggcaggggggggttccctggcttttctttttgcctcctttctatcccagactgcctgctggagaagcccgccatccagaaacaccagcaggcacagagaagagcctgctctttcttgccaaaagtacaagaaaggggtaacctagcaaaacagaatcctttgacaataagcacccttctccagaaaagcaccagggggaaaatatgcagatacctccacctctcatcagcaaaggcctagtgaaaagcctagccctccaccctcacctggcagtaaagaggtacccctctcctgacccttccctgctgggctggtgtcaaggaggctcagtggggagccagcctaggggtaatgaggtacccaacccctctcagtatgtcagtggaagcagagggacatgcctaggtttccacccactcctggaggctatgaggcgcctgtcatactccccacaagagcggtgtcaatggaagccatgttgaggggcctggacttccactcccatccggcagtaaagtatttgtcctcaccttctgctcctggcccacttttagtggaagcctgctaaaagagaagatttaagtaagatccagagtctcctaacacaatatccagaatgaccaggatacaatacaaaatcactcatcatatctaaaatagttgttattgcacaccgactcagaataggataaggaaaataagcctaaaatgatgagtgaataatctttttttattttgcactgagagggtcaaaaaaattcaattaaagactaataaggaaagcagcttaattaagttggtattttaagagagaggaaaaaataaatttaaaatagataatatagagcttgattcaattagtaaaacaattagctttgtaaaataataatttgactatctaggacccaattatttagtagttttacctaaatcaatggttacgtgtaatttgaatcacttggggagcttttacaaactgcagatgcccagcacaaaccagaccaaatgtatcacagtcttccctgtgattctcatacatagccatggttgagagccattggcccaaaagaaccataatcagaaggaaaatgggaggatgtttatacctcccaaatagatgagacagagtcaaaataggtgggacagagtttgtgtggtaaactttgtatgttctttccaaaggagcgccttcttggccatttgtcttgctttatgtacccttgtgatgaatttgattatctcattcccaagcccaaaacaataaatctgaagcagtaattaaaaggaagtcagcatcttacacaggcaggcatattgatgactgcaatatatgaaaactgaaagtataggaagactcagagatttagttcagttccactagatggcttggtattaaaaacttgttgaagtgatttcttgagctatgtcctcagagcagtctatttgggattaaaattgaatttttcgtgaaactactgaactccaagttacaagacgagcccaggaactcaaactgccagatactcagggaagtatctggcttgtcttagattttaacaaaaagaagacaagattcttgcaacaaaaggaaaaattcaccaagcatttaaattaatggaggagttgcgaggcacagtgactcacgcctgtaatcccagcactttgggaggccgaagcaggtgaaccacttgaagtctggagtttgagaccagcctggccaacatggtgaaaccttgtctctactaaaaatacaaaaattagccaggcatggtggcagtcgcctgtaatcccagctactcgggaggctgaggcaggagaatcactgaaacccgggagtcggaggttgcagtgagctgagatcatgccattgtactctggcctgggcaacagagcaagattccgtctcaaaaaaaaaaaaagaattaattaattaattaacagaggcagctatgggaggcccagcttcctgtgtgtcactctctagaggaatttgtatttaattttgttaagtaccaaatccactgtgatgagaacattatgtgggttgtaaatgttcttcttgatggtgcccttgatccctgtcaggatgtggaatattgggaagaaattgaagtttgatatggagatgttttatttattcagtgcagtgaggtgaattggtgttggaaacttactgaagagttttgctgagtggctttcatcaagctgttaaaatcaagggttgaaagcccttgtcaatcaatgatataaacttagcccttttaatcagttgattacaattattttccttgacctgaataatgttgatcaatagtactaggctcacaacaagcacttgggaataaagtcgattatactggtttcaagacagtttttcattactgctcaaagctcatgttttgtagaaataggttttgttttaccattaaaacagcatgtggctcacacatactggtatgatgtttggatcatgtgatccaggcgtgcagtcacagagagcctagtagccctgaagatgcatctgttttaaagcatacttactaattaacattcaccataacaactttgaatccctaagaaaggaaaagaattttattctgtttcatgaagtgggaaaatatttataaatatggtatttttactgtttatctgatgtgttaaaataataacaaaaaatttttgaaagtgactgtctgtttataaaggaattaattcttagttatcccaaacaatgtattctttctatgatgcatttacaaaattaaggtttctctctgttactgtcatatgttcttgggtcagtgattcagaataggtgggccgcgagcagtggctcatgcctgtaatcccagcactttgggaggctgaagcgggtggatcacctgaggctaagagttcgagaccagcctggccaacatggtgaaaccccatatctactaaaaatataaaaattacccgggcatggtggcgggtgcctgtaatctcagctgcttaggaggctgaggcaggaggattgctggaacccaggaggcagaggttgcagtgagctgagatcatgccattgcactccagcccaggccaacaacagacaacagcgaaactccgtctcaaaaaaaagagcaaagcaggtggcttctctctgctctgcagtatctgaggccttagctgggaagacttaaagactaggggtgatttaagggctggggctggaatcatttgaaggcatgttcactgaggtgactgacacctcagtggggaggactcggagactgaaactgctgaccggagagccttatgaggccttttggagatgcttggcttcctcacaacatggtggcctcaaggtagtcagccttctttattttttttattaactttttttgagacagtctactctattgcccaggctagagtacagtggcgtgatctcagctcaatgcaacctccgcctcccaggttcaacaattctcgtgcctcagcctccagaatagctggaactacaggcatgcgccaccatgcccagctaatttttgtatttttaatagaaatggccatgttggccagcctggtcttgaacacctggcctcaggtgatccacccaatatgctgggattacaggcatgagccaccacgactggctggtagttggacttcttatgagctgacttagtgctcaaaacatgagtgtcccattaaacgaggcagaagctgcattgccttttatgagcaggcctcagaagtcacacagccccaattctgttgcattttattcgtcaaaagccagtcatatagtaagcctagattgaaggggtgaggatatagacctctatctttctatgggaggagtggcaaaaattttgcaaacttgttttaaatcctccactttctacccgctgattaaaaattatttttgttactcttacttaaaatgcacttaccagccaaccactgtggttacacctgtaatcccaacactttaaggacgccaaggcaggaggaccacttgaggcctggaattcaagaccagtctgggcaacacagcaagacctcatttctaccaaaaaaaaaaaaaaaaagtttttaattagtcagatgtggtggtacatgcctgtagtcccagctacttgggaggctgaggcagaggactgcttgagcccaggagctcaaggtttgagccatcattgcaccactgcactccagcctgggcaacagagtgagaccctgactcaaaaaaatgaagtaaaataaactagaatgtgcttacccactcccaagatgtcccaaaagtctcatctccttataataccaggtttaaggtcaagggccaggatctcatctaattcaatccaggcacagttccttaagtagagttcctgcaatctgaagaccaactaaaaggaaaagttacctgccccgcatacccaacatgcagtgatgatctaggggtgggatacctaccacagacatttctgttcaaagaggaggggaatgaggggcacaaaacactcactgaccatctgtgtttgcaactaagtagctttcttagctgcttcctgtccacaggtccagagcctctttgcattttgccatgtctatgttgctttcagtccagtcctttgaaattttgatggtttcactgtgtatcaatttataatcactccattagacaaaaaacacgcccacaaatctctgcaaaataaactctcccataccttgggctcctcgtgagctattgtgggacaagacccttaagattcaggagccctgttgtttatcggatagaatttgtaaggcatgccctaaagatctttagagcctcgtttagtctgtctggaagatactatggatgccttcgatctttctaaggttttaacaaaggattttacaatcccactctgggtttgatccgttgccctgaaaccatttcttaatttgagaatcatttgccatctggagaagctgggaataagaaacagttttattttcaagcctagcaattgcaggcttctttatgtttcctctaaattttacatgagagcagaaccattctttattaaggtcctctctctcctctcacatttttttcatagacagcaagaagaagccagatggcactttcagtattctgtctagaaatctccttatctagatcatcacatttgttacgtacattttctattttctgccttcccataggcaacagtgttgtcaaattttctccttaacaaaggtccgctttcctctggctcgaagtagtcttttccctgttttcctcaggccctcactgacctcctcttgaaggcctgccatgattcccccaacagtctctcagaacctttccagcttccacctacttcccaaagccagtgccaactatctgggattatgttataggagcaccctactcctgttccaaatttttattccaattactattgctgtgtaacaatccaccccagacttagtggaatgaaacgaccgctactttattatgttcttggattctgttggtaaagaatttgaaagaggcactgtgaggccagcatgcctctgctccacaatgtctagggcctccattaggaagattcgaaggtgggggttacttggtgagtgagagttggaatcactggagccctcatacactcacttgtctggccccggctggcagagctcaagccaggactgctgaccagagcacctgcacacgacccctctgagaggtttggctgcctcacggcatggcacctcaagaccatcagcctgcttgcatgagggctctgggctcaagcaagttgttgctttcaagagatgcttgcttataaagggataaactctcagttatgccacagcttccaccatttccatgatgagcccacacagctgagcttcctgagttatagctagttgaggagtaaggagggaacaagatgtgggggactgggaagggagaaggagggagattaggagagacagatgaacagaacagagaaaggtgaaaagaaagtcaccaggtgtcctgcaaaaagccagagcaaactgtctcccaagtttctgaatggaaaacagaatgaacagaatgttctccatcaaagagcagccaaatcaatttgttaattgagatcaaaagaacataagcattatctctgcagtctaatcaaagaacagaagttgaatagtacatccaaaaacccaagtgtctgtgtcaaaatacgagcaaacacctgcagaaattaagtgaccgctacaatttcatgaaagttctttgtgtgtcaggcatagctttggacggggtgtggggggcgggggcatggaagggcagggaggtggggggaataccaagaatgaagtcccttagaggtgtatgtagagagcagtaaccaaagaagaggagagattctccaggacagaagattgtggaacagctgctactgggaggaagtttggaacaaagatgctccagagttaaaaaaaaaaaaaaaaaaaaaattaaaacattattatagtgatgaaatagcaataaatacatttgagtatttaccatcttactgtaaaatgaagtattgttttatataccatggtatactgtaaaataaaaacaatacaaatgcaaaacttcatacttggctgaaaaaagtgaaagccagcgagcctgaccccaaggagatcattctggttggacaagcacacggataatacataaatgtgaactattaataaataaactgagttatattgaggtatttctttttttttttttttttttttttttgagatggaatcttgctctgtcgcccaggctggagtgctggagtgctggagtgcagtggcactatttcggctcactgcaatctctgccttcctggttcatgcgattctcctgcctcagccccccgagtagctgggattacaggcacgcaccaccacgcacagctaatttttgtatttttagtagagacagagtttcaccatgttggctaggatgatcttgatctcctgacctcgtgatctgcccacctcggcctccaaaagtgctgggattacaggcgtgagccactgcacctggcctatattgaggtatttcttactagtgaaccacccttacccttgtgaatatacgctcatggtcatggtgtttatcttgttgcatccagtttgttaattattttggattttgcatctgtatttgtacgttacattgatttctgggtgtgtttgtttttgtgtatgagagagagattcagcaggttttgctagcaggataaataaaatgagtcagtatgatttttctctttttccatattgtagagcatttaagtatgatagaaattacctgggcctataacataacctgtgcctagtaagaactagaagagtatttttctgataatctaaaaaaaaactttttgctagttataaatagaaattaattgttttatctttctttaagtcaattttactaatttatattttcctataaaatcatgcatttcaggcctggtgcagtggcttacacctgtaatcccagcactttgggaggccaaggtgggaggatcacttgagcttaggaattcatgacagcctgggcaacatgacaaaaccctgtctctactgaaaatacaaaaactagccgggtgtggtgacgtgctcctgtggtcccagctgcatgggaggctggggtgggaagattgcttgagcctgggaggtagaggctgcagtgagccgagatcgtgccactgcactccagcctgggcaagacagctagaccacatctttaaaaaaaaatatgcatttcattaatatgaaattacaattacaaaagtttttctcttctaatttcttcttcttcttttttttttttttttgtttttttttttttgagatgggtctcactctgtcacccaggctggagtgcagtggcgtgatcagctcactgtaacctcaaactcctaggctcaagcaatcctcctgcctcagcctcctgagtagctgggactacaggcacgcaccaccacatccagctccagctaattttttttttagctggggtttttgctatgttgcccaggctggtcatgaactcccggcctcaagtgatcctcctgtctcagtctcccaaagtgctgggattagaggcttgagcaactgctcttggcctcttataattttgaaagtcaacacaccctttcttaaatccctttctcattcctaatgttaaatatttgcggttttgcctgttttttccttggtgagactctgccaagggtttggtctgttcaaagaaccagctctttaatttattatgtatgttgttctcattcataaacttctacttttatcttaattaattttataaacagggtatatttttgttttttgcttaaatctataacccctcgtcctccaataaaggagttgtatcctgttcacatttcttacagcaactggcaaaaaaacttttcttaaattcaatcgtgttatttaaatgctttctattttttatgctcccacgctatttcattcttttttctgttgctgcattggtcaagttttatttattctctttttactactggttagaaccttacacatcctttttcatcttaatgattactgttaaatatttgagctgatctttcctaattgatatcaagaataaaatggatttacttatctcctcctgtgaattgtgacaaaattaatagagttttctttttgtttttgagacggagtctcgcttcagtgcccaggctggagggcagtggcatgatctcggctcactgcaacctctgcctcccagatacaagtgattctcctgccccagcctcctgattagctgggactataggcaccctccaccacaaccagctaatttttgtatttttagtagagacggggtttcaccgtgttggccaggccagtctcaaactcctgacctcaagtgatcctcccgtcttggcctcccaaagtgtcgaggttactggtgtaagccaccacacttggccaagttttctgttttaaaaaaggatataaacctgaattttattttcctgtgtagataacttatttttgtatgcctaggtacttgaagattttttcctttattctacaggtctaaaacttctctgggctacacatccagaagatcctctaagtttggctggtacctgtgattcctttctgtctaaagactgggatgttttcttctattattctttaattttctaaagtatctattcagttactgcttccattgtgtatgtaatttatcatatttgtcttttcgaattatttctctttctaatatcggtctgttttgcgctgatttcgtaaatgagaatatggattagagattttcttgtatagtgagctctgctctctagcgctcattccattgcagaggaggagaggacatctgctctgatttctcaggccggcctcctcttccagaactgctcagctctttacctatctagttgtgttcactgtttggtccttcttagtaaggagaggctgggagaattgaaatgggttgcaatcagagactctttttgccctgttcaaatcttcaaggccaaagaaggggaaggcttagatttatcatagcatagaaatctcatagattaggagaaataaggaagcaacaggggcagggggagccttgataaggagtttcccttttgttcggagaaacgcatctatgtgttatggctgcccaaatgcaatgaggtagtgaccccttccccagctgaggtgtttcacaaaataccttccatttgcatggtgttgtaaggttttaaaattatattttcagtgataaagttttgctgacttattttcacttagagtgtaagaccctcgaagacagagggtttttttgcttatttactttttgtactccagagttgctactatttgatccttaccacaaccctgcaaggtagacaaggcacctgatgttatccttattttgcagaaaaggagacagatgccccaataaattaaatgagtcactcaagatcacatggctgaattgggattaacacccaggtcatccttagtacactaatccccacttaccatcctttcttccagaactaaaggggacgttctgggtgctgtttgtcctgctttggcaacaatagggacttaatctttcattatttgtgtagcagagcaacttaagtactgttttccctcatttcttctgagactgacacaccactaggcctgggcgtacacatgaagaattcccatccacagcagataaagccacctagacagcaagggagagagaaggggagggagagaagcccacccgctgagagggggttgtggccgagagcagagtcattggctcctgtcctctggtccaggtagcacctaggaagggatcctctatccctgtggtttcagcgttctttgccgaatctgtctcttttccctgaacccctgcagctaatgctcctgggatatgctggcagagttactgctgttaccattctcatttctttaggctttaatcaagctctcctgtgaagtgctacatcaattcaattttgaatttcacatataaaataatgaaatgagagtgaagcgtgatagacataaaatgtttttttaaaatgaaaatgatatttttaatttaatcatataaaaatcatctggatccagtacatgtaagtggcagagagtttgctatattctcttaccaatggcctcagaaagcccacgatccacattggttggtgaatgatttccaatttctttaatattttcccttctctccattaagccctgaccctggcattctttaaaatcaacccaagaactcacctcctatgaaaatgtattcatgggaatacttatttatagaatatataaatattctatgttcatttatacatgatacttgaaaaacctggtgtgatggaaagaacatgagtccccatcagtctgcaggtctgagttctagttcccgggcctgcagacgggctgaactccttcagtctcaatttctatctgtaaaacataggcatggaactaagtgacactgcaaatctgtaaattgttaaggtgtttttcttcagttatttaatacttacctcttcctctgatccaactggattgtgaatcccccaagaacagggatcacattctcagcatcttctgcacgtctgtccctaccacaggccgtgtggcactgcgccatcccccagtggttgccttgttcatgctgcctgcccgcctggctgatagcacctgtggtagccaggaggtggcacttcggtattttatgcaatagaagaacagaccacagaatgaggaaatcactctgacttctgctttattgaccaaagtagaatatctagagatcaaaacagccagggtgtgcaattttttaaatttataggcaatgaatataatttacgtgcatgggtggtggtgtacaggtctcttgagtcttagtatgggcgtaaatttgtgtaaccactgccacagtcaggatacagagtagttccataccccaaaaactcccttgtatcggactcctcataaccccaaaccctggcagctactgatctgttgtccatccttatccttttatcttctagagaatatcatataaatggcgtcacacaggctgtaaccttttgagactggctgctttcattcaaccataatgcctgtgagatttatctatgttgttgcatgtcagtaatctgtatcattagtttgttcattgctgagtagcgttccattatttaaatgtaccacagtttgtttatccgtgcacatgctgctggatatttgggtcgtttccagcttttgtcaattattagtagagctgctgtaaacattcatgtataaattttcatgtgaagctaagtttttatttctctaggatatgtgcctaggagtgagattgctggctcatgtggtaattttccatttaattttttgagttaacaaccactgtttccacagtggctgtaacattttacattttgtattttcaccaatgatgcatgtgagtcccacttgttctgtgtcctcaccagcatttagtattatcactcttttgttgttgtaggctgttttgttattttagccattctgatgggtttgcagtggttcccattgcagttttagtttgcatttccctaatggctgctgatgttgagcaccctttcatgtgcttattcacccctatgccttctttggtgaagtgatttcaaatcttttatccatcatttttaattgagttgtttactatcaagttttaagagctctttatagattctaaatacaagtcctttatcagatacatttttgcaaatattttctaccagtctgtggctagtcttttcactctcccaccagtgtcttccttagagcaaaagttttaaatttgatcaagttcaatttatcaatttttttgctttatggattgtgcttttggtatcatttctaagaaatatttgccagcccaaggtcacaaagattttcttctatgttttctcctaaaagttttctagttttacattttgcatttcgatcttatagtgcactctgaattgtttacgagatgtgagatttaggtagacttttatttccgtttgcatgggggtgtccaaatgttccaagttatccagatgcccacattatcctttcttcattgagctgtctttgcaccctggtgaaaaaattattggccatattcacgtgagtctgtttctgatctatgttttttttttcctttctaaattattgtcttgattaacctagctttatactaagcattaaaatcagcctctatgagccctccaactttattcttcatttacaaaactgttatggctattctagttcttttgcttttccatacatatttcagaatctgcttgttgatacctacaaaaaatcttgctgggattttggttgggatttcattaaatctatagattaatatgggaaaaattggtatcttaagaatttgggttttctagtccatgaggatattattttccttcatttatttaggttttcttttattcctttcatcagccttttaatttaacttgttcaacattttgtagttttcaacatgtaggtcctacagatagatgttttgttagatttatatctaagtatttttgtttttggagttgttatagatggttttgtttttcaatttttgtttcaaatttttcattgctaatatagaaatatttttgtatgtcagccttgtatcctttgaccttactagatgcgcttattagttctgggagctattttgtggatccttggcattttctatgtaggcaatcatgtaatctgaaaacagagacatgtgtttcttccttttcaatctgtatgctttttaattttttttttctttgagatggagtctcgctctgttgcccaggctgaagtgcagtgacgcgatctcaactcactgcaacctccgcctcccgggttcacacgattctcctgcctcagcctcctgagtagctgggattacaggcgcctgccaccacacctggctaatttttgtatttttagtagatacagggtttcaccatattggtcaggctggtctcgaacccctgacctcaagtgatccacccacctcagcctcccaaagtgctgggattacaggcgtgagccaccacacccagccgctttttaatttatttaacctgccttactgcactggctagggcttccagtataatgttgcatagctgcagtgacagtggaaatccttgcattgctcccgatcttaagggaaaacattcagtccttcttcaccaagtatgatgttagctgtggcatgttgtatatgtcattttatcaggttaagttcccttataatcctggtttgctgagaaatttttatcatggatagatgttgaattttgtcaagtactttttctgtgtcacttgatacaatctgtggattttctttgttatcctgtcattttattctgtcattaccttgattaatttttgaatacctaactagccttgcatttcttagataaactccacttggtcatgttgtattatcatttttatgtattgttggatttaatttgctaatattttcttgacatccatttttacatccgtgttgatgaaggatatcagtttgtagttttcttgtactgttgtgtttatttttgatatcagaataatgccagcttcaaagtgagttaggaagtgttcccttctctcctattttctagaagaaatatggtgaattggtgttatttcttctttaaatgtttggtggaattcactattgaaatcatctgggactagaattttctttttcaaaatgtttttaaatataaatctaatttcttcaacagatacagaattattcaagttatttcttcttggagagttttagtattttgtgactcttaaataattatttgttgttgttgttgagatggagtctcactctgtcaccaggctggagtggagtacagtggcatgatctcagctcacggcaacctctgcctcctgggttcaaacagttctcctgcctcagccccccaagtagctgggactacaggcgcacgcctccatgcccggctaatgtttttttgtgtgtttttttttttgtatttcagtagagatggggtttcaccatgttgccaaggctggtctcgaactcctgagctcaggcaatccgcccgccttggcctcccaaagtgctaggattacaggtgtgagccactgcaccctgccagaattatttggttttaactaagttgttgaataagtttttgtatagaattggtccaaatattttaatattatccttttaatgtctgtgtggtctatagagatggcccctcttccattcctgatattggcaataagttcttccttctttttttgttttgggctagaggtttatcaattttattgatcttctgaaagaaccatccctgtttcattaatttttctgtattgtttttctatttcaaattttgttcatttctgctctttattatttccttccatctgcttgttccgtgaaactgatagaagattaaagtcagggggtcactgagcaaaacccttagaaaatgtatgacgtgttttgttgtttttagggatggtgtctcgttatgttgtccaggctggattcaaactccagggctcaaatgatcatcctgtatcagcctcccaagtagctgggactacaggcacatgccaccatgcccagctccaaaatgtattttttaattcattcttttgagaatgatccaaatagttttccatgcattttctctttgcagttgactggtctgagtgtctccaatggaaaggaccaacttgtagtgttccatacgaaagacaacaaagacctcattgtctgcctcttcagcaaacagccaacccatgagagtcgaattggagaacttgttggagtgctggtgaatcatttcaagaggtaaagtttgatttttgtaactaagacacgttttaaatctatgaaatctttaatcgtaattatcactgagcttgttttgtgccaattttaatgtattgagctatttttctccataaggacaacttaaatcatctgtttcgcagaaggtaaaattagcatcccagcttactttcaaggttaggaatgatcctctacttttccagcctccagctgaaccaacaatgagagatttccctaaatggtgatttttattccactgtcgatccaaatgcaattaaatccaaaagatagacaaattactttatattcttctcgtcatagcttctcatttaccccaagtataatcagtttgtgtgtccactatgaccataagcaaattagaaggcagatttgggatggtttgcaagtccatgaagactacaagaattcctgagagaggcagtgaccactgcagaaacatggagtcatgatggaacatggcataatctgagaacttcatagtaagccctgatgatacctggggcaggggggtgaacaatgatataataaatataaacagagagcaggtcctgagagtgatggggaccagtgaatggataattttaagcaggggagtgattttgtctggttatttattggagttgtttcagagattggatttctcttcccataaggggtcatggagtatttgggtgggtgtatctctccaaagtcaagtgctctctttgtggcatgctgccttcacctccccaaccccacctgatgctgggagaagaccactcatcaaaatcagtgactaagaaatgatacaagtgtagttactttttcttcctaaaagacatttcctgagttcctaaaattaatcaagtattccttattagtatgtttttttttttcagtttagacgtggcttctctttctctcaacaaacacatatttggaatcagatgtccacatatctaattctattgtattcattttggctgataaatgtatagagcataattttagaggtgggctgcacagaccatttattttatgttattacaccttacattctagatcaaagtagatctttaaatattttctatcattaaatgcttttacatgctgtaagtaaaataatacttaatggtcatttgtggggaaaaaataagaaagtaattaccaaaaataataataaatgcatagacttttgaaaattcctttccatctgccaaataaatgtaaagctaagaaaaattttaaaaagtttagaatgtggccaggcgcagtggctcacgcctgtaatcccagcactttgggaggctgaggcgggcggatcacgaggtcagcagatcgagaccatcctgggtaacacagtgaaaccccgtctctactaaaaatacaaaaaattagctgggcttggtggcgggcacctgtagtcccagctactcaggaggctgaggcaggagaatggcgtgaacctgggaggcggagcttgctgtgagccaagatcccgccacttcactccaacctgggcaacagaaggagactctgtctcaaaaaaaaaaaaaaaaaaaaaagtttagaatgtaaggaaaagacataaagaaggcatctctgcaataaatgtctataactcaaataagcaagcttattttcctgctaatatttatagcaaagtatagaaaattaaaggaattttaatttgttactcttaatttggataccagtactaatgaatgcaagagtttttgcctgggagattgaagtattttatctctatctgggtgcttatttagcaaattctgatctattaagtgccttctacaagtgacagaaatacgtgaacctggatgtagatttcatcagttgctttcttttcctagctagcatatgcatgctgaggtacatttctaggcgtatgtcctctatctttaatgtatgtaaggatttttaatttctttaaaatttataaatgtgaagagaagactatcaagatgctaggaattttttggtggattttttttttttaattcttggtgtttctatcttatgaattaagagtgaagtggaaatgagagataaaatctttcctcccagaccccagaaaagtcaggcttgaaattttgacttagagttttagtcatcaacttactatttactttttgggaaaaggttaatttgattttttctagctattttcctttattgtcaactatcgtatcattgccatgacattgaaattcacattgtattttataagcatgatgttgtggcacataatcttatttgtccctgagttaattatggaaatccaaaggttcgggagggaattaacttcagaccaattctttatcttccagataatttccctaaagtacattctgagatgtgttcttgtcagcagttgggaggaaagggctcaaaacttcccaaggctgaggcaagaaccagctaagaggaccagagggaacagtgcccagcctcacaaagagccaggagtagtttctgatctaacaaggcagactaaagaacttcgtcattcacagggtaattgggtacagtattcagaagggttttgcctcagtaggggggaataattggccctagaataaatgctgctctggtaccacctaataaatcttaaaagcaagacccaaaaggatcaaactgcttccaagtaacttagctatgtcctgaaacaaagctcatgtatatttctaaaaacacaaaaatatccatacccaacaggtaaaattcacaatgtctgacatccagtcaaagattacgggcatgcaaataggaaaatacagtccattatgagggggagaatcatccctttgaaaccaacccagaacagacaaagatactagaattagcagatacagacattgtaagtcattataactagatttcagatgtttataagttaactagagataaggaagatgtaagaaaaagacccaaatcgaacttctagatgaaaaatacactgatgtttgagatattccatgatttaaaaagaaaacaaaacaagacaaagcatgtcctcgaataaatttttcctcatcaccatgagttgaagccagaactttcctggcatttcctttcacatgaatcttgaaacaaaaaccaactaagtataaattagtctctctttcacctcctgcagtctttattcaatccagacccattatttctgcctctccaagtacacacccacatattttatgtttgctaaaacatttgaagacaatctttaataaagtacaggtatacctcgtcttactgttcttgacattattacacttcacagatattgtggtttttataaattgaaggtttatggcaaccctgcattgatcaagtctattagcaccatttttcctacagcatatgctcactttatgtctctggacactggaagaagatgccatctagaactttcatagctagagaggagaaggtcaatgcctagcttcaaaggacaggctgactcttttgttaggagctaacaaattgccacagcaattttgataattctcataatatttcaaaactttatattgttattaactgctatggtgggctttgatcagtgatctttgttattactgtaatcatttcagggcaccacaaactgtacccatgtaggacaacagacttaactgatcaatgtcgtgtgcgttctgactgctccactgaccatctattccctcatctctcttcctctcctcaggctcccctattccctgagatacaacaagattgaaattaggtcagttaataaccctacagtggcttttaaatgttcaagtgaatgggagagttacacatctctcagtttattttaaaaactagaaatgagccaggtatcatggctcattcctgcgaccccagcactttgggaagttaaagcgggaggattgcttgaggccaggagttccagaccaaggtctgcgcaacatagtgagactccatctctacaaaaaaatttaaaagttagtcaagcatggtggtgcacacctgtagtctgtagtcccagctacttaagaggctgaattcaaggctgcagtgagcgatgatcgtgccactgcacttcaacctgggtgacagaacaagaccttgtctcaaaaaaaaaaaaaaaagggaaaagaaaaagctagaaatgattaagcttagtgaggaacgcaggttgaaagctgagataggccaaaagctgggcctcttaaattaaacagcccagttgtgaatgcaaaggaaaagttcttgaaggaaattaaaagtgctactgcagtgaatacatgaataataagaaagtgaaacagtcttattgctgatacggagaaagtttgagtggtctggataaaagatcaaaccagccacaacattcccttaaaccaaagcctaatgcagagcaaggccctaaactctcttaaattctttgaaggctgagagaggtgaggaagctgcagacgaaaagtggaagctaacagaggttggttcatgagaattaagaaaagaagacatctccataacataaaagtgcaaggtgaagcagcaagtgatgatggagaagctgtggcaagttattcagaagatctagctaagataattgattaaggtggctacacgaaacaacagatttttcaatgcagacaaaatagccttacactggaagaagatgccatctaggacttccgtagctagagaggagaaggtcaatgcctagcttcagaggacaggctgactcttttgttaggagctaatgcagctagtgtctttaagttgaagccagtgctcactgactgttccaaaaatcccagggcccttaaaattacacaaaatctactctgcctgtgctctataaatgaaacacaaggcctggattacagcacatctgtttatagcatagtttgctgaatattttaagcccactgttgagacctgctgctcagaaaaaaaagattcctttcaaaacattactatgcattgacagtacatctagttatccaagagcactgacggaaatgtacaaggcttgattaatgttgttcccatgcctacaaacacagcatctattgtgcagcccgtggataaaggagtaatttcaactttcaagcctgattatttaagaaacacatttcatggccaggcacagtggctcacgcctataatcccaacacttttggaggccgaggtgggctgatcacctgaggtcaggagtttgagaccagcctggccaacatggtgaaaccctgtctctactaaaaatacaaaaattagccaggcgtggtggcacatacctgtaatcccagctacttgggatgctgagataggagaattgcttgaacctgggaggcggaggttgcagtgagccaagatcacaccactgcactccagcatgggcaacagagtgagactctgtctcaaaaaaaacaaaatgaaagaaaaacatttcataaggccacagctgccataaatagtgattcctctgatggatctgggcaaagtaaactgaaaaccttctgaaaaggattcaccattctagatgccactaagaacatttgtgattcatgggaggaggtcaaaatattaacactaacagaagtttggaaaacattgattccaactctcatggatggctttgaggggttcaggacttcattggaggaagttattgcagatgtggtagaaatagcaagagaacttgaattggaagtggagcctgaagatgtgactgaattgctgcaatctcatgataaaacttgaatagatgaggagtagcttcttatggaagagcagagaaagtggtttcttaagatggaatctacacctgatgaagatgctgttaacgttgttgaaatgatgacaaagcatctaaaatattatataaacttagttgataaagcagtgacagagtttgagaggattgactccaattttgaaagacatcctattatgggtaaaatgctctcaaacagcaccgcatgctatagagaaatctttcatgaaagcaagagtcaatgaatgtggcaaacttcatggttatcttatttaaagaaattgccacagccacccccgccatcagcaaccaccaccctgatcagtaagcagccgtcaacatcaagacaagaccctccaacagcaaaaagattacaactcactggagactcagatgatcattagtatttttagcattttttgttcttctttaatatccgcttaattaaaggagcactctcattggatttaactgaacattcaaccggcttctctgttatagtttgcttatgttctttttaaatcacactttccttattgtttttaattaaaatatgtacagtatttagacatgatgctattgtaaacttaatagactacagtataatgtaaacataacttttatatgcactggaaaaccaaaaaaaaattgtgtgacttgctttattgtgatattcactttattgcagtggtctgcacccaaacccaaaatatctccaggttatgcctgtatattccaaaagatgacattaagaatatataacaaccagtatggctcaagcacagaccagtcagaacagacaccatccagaaacacctgataccagcaagtccaggctgtattccacaaatcaaaaattccaccatggggtgggaaaacccaaagtcaaatacatttgggatatgctaatgaagtcaaacaggtttctttttttttcttttttgaaacagagtcttgctgtgtcacccaggctggagtgcagtggtgcaatcttggctcactgcaacctccgcttcatgtattcaagcaattctcgtgcctcaggctcctgagtagctggaattgcaggcgtgtgtcaccatgcccagctaatttttgtgtttttagtagagatgggatttggccatgttggccaggctggttttgaactcctggcctcaagcagtccacccgccctggccccgcaaagtgctgggattacaagcgtgagccactgtgcctggccctaacaggtttctttactgcagtacctctccgagtcattaatatgcttttgttcattgtaaatgctaccaatacaagaacaagagaattctatctatattgatataaaaccatttccaaataagaggaaaaaagggcaaggtacagaatggtgtgtgtaccgtaccaccatttgtgtaaagaagttgaaacgagatttcttttttttttttttttttttttttgagacagggttttgctctgtcacccaggctggagtgcagtggcacaatcttggctcactgcaacctccaccttcccaggttcaagcaattctcctgcctcagcctcccgagtagctgggattacaggcacctgccaacatggctaatttttatagttttagtagagatggggtttcaccattttggccaggctggtcttaaactcctgacctcaggtgatccacccgcctcagcctcccaaagtgctgggattacaagcacctggcaagaagttaaaccggaagatatccgtatctatcactggataactatattataggtagatatatctctatttatatagatagatatatagatatctcctatgacttttttttttacaaaaatggtgatatgctacacataccatctgtaccttgcctttttctcctactaaacaatgtatagatataggtacagatagatatgtatacacacatatgattatgtataatacaggctatatctgggaagatattcaggaaatagataacagtgtttgtctctagagagggaactgagacacctcagtacagggagaaagaggtagaagggagatttatttgtttttcatggttaaaccttctgcgaccaatatatgtgttactgatctaaaattttttcattttaataataagtggcagctagttttctctgaattcattattattttgctttcctgcttagaaaagtagaaaagaacagaagaactgtccaagtgaacaatctctcatagcatttcaatatattgaaacaatcccaaatatagcctcttggaatattatctttctgtatggtcttgttgtatatatcacattagcctaaggtgaggtttctttttctgtggttgtagtgccagtggtttacagaggttttgagtgtggctgacttttggtttgcgtttcattctcagcagcagctacctgctggtactgagcttttctgcccactactaaacagatggtctcacgttggctgccctaactatgaagtcaccagaaactctgcagtattaagctgtcaaaggacccatctgccctaagcagctgtccaggcatttgcctgtctggatgctggaaacctcagtataactccaattgcaggcattaaaatttcttatttttcctgttctctttctgtggatgcaagccagaaatcaatgccatctgcttcttgttcttctttaatatctccttaattaaaggagcactgttactggatttaactgaacattcgaccagcttctcagttgtagtttgtgtatgttctttataactcacacttagagccatggggagacccataccgataagcaggccagcagttgctggctgcacattgctgtcactgccgcggcagtacaggtgaggagccaggggaggtgaggcctcatgacaagaggtgaaggaggcagaggatggggccacctcccaaaggtcccagcgcctggccctccccgtccagcagagctgctgctcacgccttctgctgcacctgcagtgaggctcctctgccccaaacctgaatacccgtttccatggcctttgatctatgttcccagactgctctctttgaatgcctggccactcattttaatagtttatattccataagcaaaataaaggtatgccatgtcgattgccagctgtggaggactggttgattaaattttggtccatcaaatttagggtatttgagctatttaaaataattattgaaggcacctgacttatgggggacagaaaagtgagtggccacaattcactttcctctgccttccaatagagatacacgtgaaaacacaggaagcaaggacacctttctgtagtgctggaaactagaaatgtgattcaatcctggacctgccaagaggggcatccttcacccctgctcatgtatcgtctcaccaggtcttccctgactgtcctctggagaatagcaattcaccctgtcccaccacaccctgtccccaaacccccctaatctttccccatggctgtcaactccacctgacatgctgtatctttacttgtgtattgtatatattccaactggaatacaagctttatgtaagcagagactttatttatattgttccctgcagtttccctagtgcccaaaacagtgctggcacacagaaggttccctgtaaataactgttgaatactcattgttaaacagagaattgctgactgataggccccactcgcggtagggtgcttctagcccttcctactgataggtgcaccttgcccaccagaagatggtaactcaatccttctcctgtatgaaagaaaggaaaaattcttctgatagtttccttccctttatgaatacctcttttcctttttttaagttatttttctgacacaatgattatacatatttatgggatacagtgatattttgatacctgtatacaaggtataatgatcaaatcaaggtaattagcatatctatcacctcagacatttatcatttcttttcattaggaatattgaaaatcctctcttctagctatttgaaaatatgcaataaattgttaattgtgaccgattacagataagattacagaatagggttctatattcaccctgcagtgctagagaatgctagaactcattcctcctctctagctgtaattttatatccgttaaccaacttctggctatccctgccacttgccagccttcataccaccatatgaatgtctctttccttgattgattccaggattacagggctaagcaatgtaatatgtgtgggacagaaggcaggaggcatttcaagatattaaatcagcaactaaaagggctgtgggctggaagagccatgagtatgttgaatgctgggggctgcagctttccattcacttttctttaacaactacagaactagaaataatttcagactctccttgtcagtgagctgacaaggaagcaggatgtaggaattcctactcagatcagcagtttcataataagtagaagactttgcaaccacaactagagtctgtgcacacaagccagctctccagcttaaaaactgataaatgattttggctacaaacaggtgggctgtaagaaggagccccaaaaaatccatatgccctttatgtaagaacatcagaactgaatagatgtctccttagttgggaggcctataaaggaagatattaacagtaagagagatatagatattataagacctaaaagaaaaagcctatttctgaaaaggccaataatataaaatttatgttacagaaaccatctgcttatactctgaataaaattcaagaaagcatagattctacataaacaggcccaagattacatggcaaactgagatgaagaggatgctggctgagaaacaaacaaaagtgttcaattatttgaatgaagtaaggaaagatattttaaaatgtaaatcaacattaaaatctgaaaatggcacagttgatattgcagaaaatagaattgatgtgaaaggaaagtttgaagtctctcagtgtgcagaatttactgttataatgggcaacatgttaactttcttagcaatatacaaaataagggtacatcttacagagaaggcatcttatattcaataaaatatggtaatttaaaacatacaaaaagaaaatatgtctgtactgaatgcactttttctgaagttccagagagcctactttgttatcatgatgaccttttttaatttcaagggttaactaaatatatgtaattctccagcttaaaagctgagaaatgattttggctacaaagaagtgggctataagaaggagccccgaagagtccatatgcccctttatgtaagaacaccaggactgaatagatgtctgcttttaatatatataactggttttgttttgtttttttgagatggagtctcgcactgtcacccgggctagagtgcaatggcaccatctcggctcactgcaacctctgcctgccaggttcatgcaattttcctgcctcagcctcccaggtagctgggattacaggcatgctccaccacgcccggctaattttttgtgcttttagtagagatggggtttcactatgttggccagactggtctcgaactcctgacctcatgatcctcccgcctcaacttcccaaagtgctgggattacaggcatgagccccaacgcccagccaatatatataacttttctttatatataactatgtttatagttaatccttgaaattataaagtatgtattaaacacacagacctgggagtggaatgagattctcttacaaaggaacaaaaattaggattccctccgtcttctgtactgcagcagtaaatgccagaatcctgtggagcaacatctttagtcttctaaggagaaaagcttagagagcaacaattgtatgcccaaccaagttgtcatttgtgtttagcagacaaacgagcctcagaaagcatgctactggggctctctggaggaggaacagctgtgatccaggagtcaaatgctgtcacaatctccatctctcatcttcacatctcttgtcttgccaggttcactctcctgtagtggtggcttccacatggctggaaatgtctccaaataactctatatctccttttccagccttgccaccagggggaaattaagagaatgttctctgggctattgtcctaaaaccccagggaaatgttcccactgactcaataactggccagagtaatggttgtcatggcatgggtaagacacctaccccagtgacagtcactttggccagagaagtggtgtcttccaagaacatggaagtctccagtaaaacctgaggaagagcatgttttggaagagagtgaagcagagtggggtgggagtgactggggacgaagtgtacggggccagcatttcccgaaagaagcggaagtgatacggtactgggcaagaaaaacaaatggtttcacattgttttgttttgttggggtttttttcagtgctatatacagtatatacagttttatttgtttttagttttatggttccagtcatttccagagttattacttaggtcagtaagtctttttccttgcccctacattgttgtactttacataagttatatcgaacatttgtaacagctagattgttttctcacagttccatcttattctggcatcccctcccctcctggttggtatttttaaggtgctatatggattttgacaaatgcagtgtcatgtatccaccactgtagtaccatataaaataattttatttatattttttgcttgttaaaattattgttggtgtaaataccaaattgactaaagagttaattgtaaaaactgaaatcatagaagaattaggtaaaataaaggataaatccaaaagaacaattaataactctacacaacaacattgatgcatccatcttaagtgcatgttgctaagtgaaagaagacagtccgagaggcctacatactgtattattccacttatgtgacattctggaaaaggtaaaactatagagatggcaaagcctgtggttaccaggggtttggagatgagggagggttaaaaaggtgaagcactggggatttttgatggctataaaattattccatgtacattcctggggaacctggtgctaaaccattcttggacaacctgcttctgggtcagggttttgtacatagcagagtggctctcttgctgtgattattgagtcagcccttgacataagggtgtgcaagatataataaagagaaaacacattgtttttaattgcgaaaacttagaaaccatataaaagttcatcaaaacaaacatgattaaatacttgatggtatttccatacaattaagcagcatgcagccatgaaaaagactatgacagtctttctttatcaggggtccttaaagtgtgggctccatcggcattagaataacctgaaggtgttttttcaaaaggcagctccccgggcccatcccaggccctctaaatcagaccctccaggaacctacatgcttagtgagctacccaggtgatccctatgctcaagcttgatggccactggtttcatgaactgacatagaaaatgaccagaaggagcacatcatgttttcatatggccaatttgctgatgccattgcgatgaaagtaggtttgtttttttttttgatgaaatcaccaaagatttgtgtttttgaaattgctgacaagtgcaaaagaaacatcccctactgccccagtgaagaaaggcgggatggaaagagggctgaggctcagagaaaaggggtaaagaaggaatggagagtagaattgagtggaggattacagagaaatcacacagaaccaggatcctgtttaccacatccacttgtcctagaaagagccgcctgtcattctaagcaatggtttttaattaccctaagaagttcgcagtgagggcccacctgcccacttccagataggaaactccacctgcaaagagcaggcttccacataatgaacttaacctatttacatgcactcagtcccacctgctatacacaaaagagtacagagagaaatcttaaaaggttttcagtgtgactaagctggggcaaaaatcaaacaatgttaaagtgtaacagctgttgtgtactgtgagcaatccactgactttccatctctccctgtgcacggtgcccatctgcactgagaagcggctgcccttgggcagagctcaccaagaggttgtgcaggggcacagtcatcctcagctttacctgccttgatgacgggagattttctggggatttttgtgcaaatcaaagattcttatttgctttgtgacgtgttcatcattgtcttttatgttgaaagagtgaatccaaaaatactggaaaactgatcttttcatcatttccgcaggtagctattgtacctttagagtaatcatattactttttaaaggccgtagctctaaaccttacaatatatgttaaaacagagatcttcctgtgaggtattcatgaattcaccaaatgattagtgaataataccatgctatctgttggaatttttttctaaattgaatgtcagatataactctttaacttaatgcaatttttaaaaagctctcttaatgtgtttatttcaggtcttagcagctatattggaatcaggagtttatataagcataatatactcagtgaagtgttttatctgccacaaacactgttctatttttataccatcattcagcatgcattcactaagcacccatcacaggtcaggctgcgggtggtaggagggataccaagaagaaccctgtggtcctttccagtcctttcccttcaaacagctcttaatcccatgaaaagacagcatgtacattatactgcctggtatgtactgtaataaaaccatggacaaaggccatggaaacacaggggataaaccagccctctttgcctaccagagtcaggagatccctggcagagcaaatgatcacccagttgggtcttcaagtctagttggaggttatgagctgggggatgaggtgagatgctccccatagaagggaggagaatatgcaaaaacttggtggagctggtacatttggagagttgagtgattgcaggggaccaaaggggctgtagcaagaaatgagactggaaaaataagtagaagcttataaaagcccatgccaatgaatttgaactttatcatataagtaatggggagaagtaagtataaaaatataaaactgcccaacaagacaaagcctgaagacacagatgtcacctagcctatacatgctcaagaatgcaaaataatttttcacttaagggaagtgggaacttgaggaacactagttgatatgtaatacatctgtgggccccacatgccaaaaagagttaattgaacagagaaagaactagcaagatagaagttacaaaggcaggtgttaaacctcagtaataaaaccagaaatcaaaaatcctcatggagtaaaaactataacaaaattctttagcttttgtagcttccctgaaattgttattttgccacccctttagtaattagcaataaaaatccctagaatgagaaggacctagatttttaccttcagggtcagcaaggaagcacgaagttaaagaagcttcctcctgttctacagctgttcgtagggagagaagattctcaagggacagtgtgaatgacggaaatgttaaattgaggaggaggcggagcttgggtgtggaggcatttattgtttggtctgtccagtaatcccttcttctgggaccttcctctcccctgtcacacttctgcatggtccgacgagaggcaccacatccttacattgccctactccctggaaagagctgagtacagggcacaggtagtatctgacccaacccggaccactttccccatccctcaagatttttgggctttggatcagagaagacttataattcattgcctcttctatgcatgaaggcaaaacatttgggagctgtggctcaacacgttcccaaaggtgagaagttgggttcagtaagagagaacagcgtagagcatagggaacccacggggagcagcaggactcaaggtgaagcaggacctgaaacatccaagccccaggtctgcctccccacgaggccggccaccttgtggccatcagactgtatgccgtttgttgattttgtgtgacctaaagcaggccaatttgtcaaaaaccagttcacaaatatgcagttcacaaatatgacactgttgtactgtacacttggaaattgttgggagggtgaattttattctcttgcaggggcagtggggtgccacaagttttgtttttgttttttgtgggttttttttttgttttatttgtttgtttgtttgttttttgaggcaaaattttgctctgtcacccagactggagtgcagtggtgggatctcagctcactgcaccctccacctcctgagttcaagtgattctcctgcctcagcctcccaagtagctgggactgcaggtgtccaccaccatgcccaggctaatttttagtagagatggggtttcaccatgttggccaggctggtcttaaactcctggcctcaagagatccacctgtgtcggcctcccaaagttcggagattacaggctgagccaccatgcccagcctttgccacagttttttaaatggattttaaaaattagttcaccagaagtcagtttgcccaataccagttcatggaagttataaaaatttgtgaagttaccaaaaactagtcttgaaaaaactccttgaatatgtcccttctaacagctttttaatacatgttcaggatgaaaaaaactaaggctcttgggttggtttagtctttttattaagtggagcagaaaaaaatggacttcactcaaatgtacaggtatgctgtttggagtttattttgaacgatcagagaaggacatccctctttcagatgcttccaaagaactagcaagcacgtgtgtcttttatcaggcatcgtgcccttaaagggattcctcccagatagcagtgccagatactagggcttgactgtcagaaacaagcaacctacatttcaggtcatgcagatccacatttttcctagaaggtagctctacacactgtccaaccaggaactgtcaaaatccacagattttagcatttcctatggggactttagcttatcctaaattctgaaatcttctttgttattttccatttgatatttagctttcttctatcaaatttgccagatgactaattcatctaatttaccaaatttatagatttaccaaaaatgtgtttcttttgactctttatataaagtatataattcagctaggtgagatggcaattaatagcctttgaggatttctacaaagttctaattgattgattttcattttgttttcataacaacagtttaaggaatggtccgtttgtttctggccctgctgctgcagctggaagtagctggaacagaggagagaagggaagaaaggagagtctgtgcccagtgcatctgggccgccaatcccacagggaagggaggctgaagagcagagggaggggaagactaggggaccaagaaggggtaggctgaagggtgggagagaggctgaaggcccaagaaccccaggtattcacagcctccattgaccctgctagttcgtccaacaaaaattggataaacaaaactcagccttgttaaatatgcaaatttggtaaatttggcaaactagtcattcagcagatgacttttggtgaattcaccatttggcaagtgacttttttttttttttttttgaaacggagtttcactcttgtcacccaggctggagtgcagtggcacgatcttggctcactgcaacccccacctcctgggttcaagcaattcttctgcctcagcctcccgagtagctgggattacaggtgcccaccaccacgcctggctaatttttgtatttttagtagaaacggggtttcaccatgttggccaagctggtctcaaacccctgacctcaagtgttccgctcacctcagcttcccaaagtgctggaattacaggcgtgagccacagcccctggcctggcgagttactttttactcagtgaattgtcctagttcttaacaacttttcctttttgcttaagtcactatgaattgagtttatgtaacttgcatccaacagagtcctaacctaatgagtcttggaaaaactagtaacaaaaatgagagaggagcactgcttgttgttacaagggtaggaaagacatcaccgtttagagaaaatggtatcatgttaaagaaacttgttttcatcatacccatcaagaaataagtttttgaaacgaagaacaagcatcaagagggaatttaaagcccagctaggaaaagaggactgctggatgctttattaattcacactccaggccagatgactcacatcctgagacactggaaagcatcttcatatgaacccccattcactctcagacatctttgagcagtcatggagagtggaaaagggccaagagactgaaggcaggtaaaggttttccttgtgcaaatgtgaacacagatgcaaaaattatatgtaattattgttgaacctgacataaattttcagcaaaattctaaaattgtcatagtttatacgtacttagaagggaaaaagcaaccaaagaaagcataagttcagtgagaagaaattgggtaaaactaacacaatttttcttaaacaatgacttgaatgaagacatacttacaaatttgcaaataagaaaaacccaggaaggataacttatattttgatgacaagttaggattcaaagtatcttgacaaaccagaataatgagaagaaaccacacaactatataaatgtaaaattctgctttgggttcaaaatgtcatttgcacacatagggaataggaaagcctctgggcccattctgtccccaagatgctagaatctgtgatactttcagttataggcaacactagagtggagatgagaaacttaccaccagagaagagaggaagagatcattctatcagattaatttttccccctgaattttaagaggatgagggacatagtattttctagagcttagaacatggacaaaggctcagaaaacgaattcttatggtttgctcaggtgtttctccatggcatgcattccttaccagaccctctgcaaatcccagacttctctgttcaatggggaaaggtttgttctattgaattcaaagaccgtcctctaacctgtcttaaaaaggtaatagcaattgcttcctttagcttctccttgacacgtagagaaattattccaagcctccttttcttcaatatttgaaaccaaaagaagtagccgacatgatatttatggtcaaaaaaaaagttttttgcacttaatattttttatttttggtctttagctgtctcaaaaaaatatggaatgttgaatttcctataattgttatgtattaattgtataaccagaaaaaattatttaaacattaatacgagactattttattttagactgcccttcctttttttttttttttttattttgagacggattcttgctctgttgcccagactggagtgctggagtgcagtggcgcgatctcagctcactgcaacctccgcctcccacgttcaaaagattcccttgcctcagcctcctgagtagctgggattacaggcgcccgctaccacacctggctaatttttgtatttttaggagagacaaggtttcaccatgttggccagactggtctcgaactcctgacctcaggtgatcctcccacctcggcctgtcaaagtgctcggattacaggcatgagccactgtgcctggccagactgccctttctcacagaaacaaagcaactagtagccagtaaattcacataaaattttcatagtggaaaaaatccccatgcaacaatcgctggtaagacagaatcattactaaatgaagcaaagagttatatctggtcttaggaagaaagataccaggcctagaatgtcatttacaaaatgaaaagaatctgagggtataagaagaaaagaaatttagatataaaatagaaaaggaaagcgaccttacagaaccagatgattcagagaactctttgtcagaaaaaagaaaaaaaaatgagagaacaatttgttaaagaatattatatttcttgctaaccaagacaaatgaaaacaacccaagcgcagcctagctaaattatgccatcagaattagtaactttccacatctgaggcttctttgatgcatggaaattcttggccttctgtgcttgtcatatgctttgaattaacagacctattaggaatgagtatttgacaggaaacagacaatgtggcttccagtcctaactctgccaccagctagctataggcctttgagcaaatcaatgtttttttgtcccatagtttatcaaaagacagctccaaatttgttcattcctttaaaatatgtatttctttttgcaagatgaaaaagttctgggccaggtgctatggctcatgcctgtaattccagcactttggtaggctgaggcaggaggatcaggagtttgagaccaggctgagcaacatggcaagactcttgtctcttcaaaaaaatttaaaaattagcagggtgtggtggcatgcacctgtagtaccagctactccaactccaaaggctgaggcaggcaggaggatcacttgaggccaggaggtcaaggctgcagtgagctattccagcctggatgacagtgtgagaccctggctcgaaaaaaaaaaaaaagttctgaagatctatttcacaacagtggcagtggaaatattactactgaactgtatacttgaaaatagttaagatggtaaaagaataatgtaaaagtcagtgttggttggccagcatcatagaaaccagaaaaatctatttcttgaggttcagtcacatatcagacattttagacacaaggatgcaaagaccaacctcctgccattggttattgtcttatcaagggaaacaaatgtatcatgtataataagtttgtggaagtataaagaaagtggtttaaagcacagaggtaaaagtacatctctagatagaagcgagatttggggaaaatatcataaaaaataggtagtatttgttctggatacgagaatgaagatggtccccaaaaggtaggacacagctggacatggtggctcacccctgtaatcccagcactttgggaggctgaggctgggggatcacttgagcccaggagttcgagggcagcccagaactgccacagatgttagaaatcaccagtaacaacattaaaataattattacaactgtgttttaacaaaaattaaagatgtgcaagatatcaaaaaagacccaaataagcagggcacgtggcacatgcctgtaatccaaacactttgggaggttggggcgggcagatcacttgagcccaggaggttgaggctgcagtgagccctgattgtgccactgcactccagcctgggtgacagatcaagaccttgcctcaaaaaaaaaaacaaagaacaaacaaagaaaaagactcaaatcgaacttttagaaatgaaaactatgatgtctgatattaaactacagtggctgggagtaacagcacattagatattacagaactaaaaattggtgaatttaaagacatagcaatagaaactatccaaaatgaagcacaaagaaaagataaattttcaaaaaatgaataagtcatcagggaactgtgggacagtttcaagtggcctatatataaaggactagtaagcgaagtccccgaaggaaggaggaggacagaaaaaatacttgaagaaataatggctgaaatttttccaaatttgatgaaaactatataaacccttagatccaagaagttcaatgaaccctaggcacaaaaaaaatcatgaagaaaactacactaaggcatatcacattcaaattgctcaaagccagtgataaacattgctagaggagaaagacacattatatacagaggaataaggataagatgacagaggatttctcgttggaaacaatgcaagcaagagagcaatagagaaacatctttaaagtactgaaggaaaaccccctctacctacaatttcataccaagcaaaaatagctttccaaaacaaaggtgaattaaaagacttttcagacacaagaaagataaaacagtttattcccagaagactcacagtacaagagatgttaaagtccttcagaaagaataaaaatatactacatggaaatatagatctccaaaaataacagaagagcactagaaatattagctacacaagcaaatttttaagattttttccttgttgattaaatctttttaaaaaacaattatctgttttaaaaataatagtaaaagtaatgtgggtgaattcatgaaggaaacatagcaaacctaaatatatatggccctaaaagaatttcaaaatgtataaagcaaaaacgaacaagggaaaatggagaaatctacaattatatttggaaatttcaattcttctgtctccataattgatagaacaagtcaatagaaaatcagtaagcatatagaaaatgtgaacactatcaactgagttgaactgagttgaactagttaccatttataaaacattctgcccaacagcatcagaatacacattcttttcaagtgcatatttgccagaatagaccatattctgggtcatgtcacagttacagtaaatattatgtaaaagcattcaaaatctctgccataatgaaacataattagaaatcaacagcaaaaagatccctggaaaaattcctaaataattgggagccaaataacacactccaaagtaacttataggtcaaaggggaaattaagagacattagtattttgaacttcatgaatatgaaaacaataacatttcaaaattcatgtaatgctgctgaagcaatacttacatggaaatatacaggacaataaaatgcttttcttttaaaatgcgtagattttaaaagtctcaaatcaatgccctcagcttttatgtcaagaaactagaaaaagccaggcatgggtggctcatgcctgtaatcccagcaatctgggaggccgaggcaggtggattgcttgagtccaggagtttgagaccagcctgggcaacgtggtaaaaccctatctctactaaaaaattacaaaaaaatcagccagccatggtgcctcacgtctgtaatcccagcactttgggaggaggccaaggcaggtggatcacctgtccaagacaggtcaggagttcaagaccagcctggccaacatggtgaaaccccatctctactaaaaatacaaaaattagccaggtgtggtggtgcacacgtgtagtcccaactactcaggaggctgaggcaagagaattgcttgaacctcggagcagaggttgcggtgagccgagatcgctctactacactccagcctgggtgacagagcaagattccatctcaaaacacacacacatacacacacacacacacacacacacacaaattagccaggtatgatggtgtgcacctgtattctcagctagttaggaggctgaggtgggagaaacacctgagcccaggaagttgaggctgcagtgagccaagattgagccactgcactctagccagggtagccaaagtgaggccctgtcgggaaaaaaaaagagagcgagaggggcatggagagggaaagagagagagagagaggaaggaagagagagagaaaaggaaaaggaaaagggaagggagggagggaggaaggaaggaaggaactagaaaaataagagcaaattaaaccaaagaaagcagaagaaaggtcagaacagaaaccaatgaaatggaaatcagaaaaacaatagcaaacatcagtagtaccaaaataaaattgatacacatctagtaggactgatgaggaaaagcagaagacacaaattcccaatatcaacatgaaaaatgtgacatcaatacaaattctatcaatattaactgcgtaacaaaagaatgtgatacaactttatgccagtaaatttgacagcttagattaaatagactccttgaaagacacaaactaccaaaactcacacaagaagaaatagataacctgaatagctctatgtatattaaagaaatttaattcatagttaaaacctttccacaagggaaactccagatctagatgcctttactggggagttctactatagatttaagaaatatcaccagttctacacaaactcttcgagaaaattgaaaaggagataatgctttccagctcattctgaggccagccttcgcctcataccaaaccagacaaagataatacaggaaaagaaaactacagaccaatgtccattaagagcatagatttaggaattataagcaatatttagtgcatccaatttagcattttataaaataactaatcaaatccaacaatatataaaaaggataatacattgtgaccaagtgggatttatcccaggcatgcaaggttggtttaacatccaataatcaatatatgaaattcaccagatagtccgggagcagtggctcacacctgtaatcccagcactttgggagcccaaggcaggcagatcacgaggtcaggagttcgagaccagcctggccaatatggtgaaatcccgtctctactaaaaatacaaaaaattagctgggcctggtggcgggcgcctgtagtcccagctactcaggaggctgaggcaggagaatcgcttgaacctgggaggcagaggttgcagtgagctgagatggcaccactgcactccagcctgggtgacagagtgagactctgactcaaaaaaaaaaaaaaaaaaattcaccagataaacaaactgaaaaaaaaaaacaatctcagtggttgcagaaaaagcatttaaaatccggcatccatttctggtaaaaaaaaaaaaaaaaaaaaaaaaaaaaaaaaaaaatcctcttagcagactaacaatagaagtggacttctacaacctggtaaagtacatctgtgaaaaaatctaaagcaaatatcatatttaatggtgaaagactgaatgttttccccttaagataggatttaactctattgcataatttttggataactggtttgtccattttggataattgtattaattgaataatttgtattgtcattttatattatcatggtgggaacagtttggcagtgttttaagctaaacatatccctgccacatattccagccactccactcctagatatttatctaggggaaataaacacatttatccatataaagacatacacaaatgttcatatcaaattatttgtaatagccaaaaaccgggaataacccaaatgtccattagcattggaagatggataagcaaactgttatatccatacagtgaactactactcggtaataaaaagaatgagctattgatactacaacatggatgaatttcaaaataattttgcctggtgaaagaagccaacctgaaaagtttatccatttatatacaactctagaaaatacaaaccataggagcaggaagtaggtcagtcattgttgggatggagagtggatagggaggggaaggaagtaggaattacaaagcagcacaagaaacctttggggagtaatggatagtttgagtgcagtgatggtttcacaggtataatatatatttcaaaacctgtcaaattgtataccttaaatatgtggagtttattgtatgtcagtgatgccttaataaagcatgccttaataaaagtgactagaatctggagtatagggagggatgttcaggtgagacagggccatgaattgtgtatagaagaaaacagcacgaacaaatacataaaggaactatttgaaaatacattgggctggacgtggttgcccatgcctgtagtcccagcactttgggagaccaaggcaggaggatcacttgagtccagcagtttgagatcagcctgagcaacatggtgagaccctgtctctacaaaaaaatttaaaaattacctgggtatagtggcacacacctgtagtcccagctactcaggctgaggcagggaaggattgcttcagcccaggaggctgaggctgtagtgagctgtgaccattccaccgcactctcgcctgggtgacagagcaagaccctatctcaaaaaaagaaaaagggaaaagaaaataaaaaataaaaaacattgccactgttctgaaaacagtgagtagtccagagtggcaagatcagagattgtgttgagaggagtggcaagaactaccagaaaggtatgtagatatgaccagattgtcaaggaacttgaagggaatgtaaatgagtctgaagttacgccaaagcaggaggaagtcatcaaggaaacatgtagagtgaaaaggggccaggatggacccctaggcaattcctacatgtaataaatgggaggtcaaaaggcaggaggagacttaggggaagtactctcccagaaagaagacaacaaggtcaaatgcctccgcattaaaggagacctagccctagagcagtccctttgatttggtgacctttgaaagcaccttttgtaaaagcattgagggtaaaagccaaattgcatgctaaaattaataaaaagattaaatggaagtatagtctgatctttagagtattatctctttctattacaaattctgttatttcaaactcaaaagctaatttttcatactgcacaagttcaggaaacccagttccgaggatctgttctgtaggtgagaacctgaaaatctaactgtgggtatgtcctaaactcggccagctagtgctgattcccagatgagcagggttctgaagttattattctatcaggtgaaagtagtaaccttgtaaatgtgggtgtttgatcctgagaagatggggtatagtttcctaaccttatacacatagggaatctgatatgccatgccccttggggcccattacctatgtgaccctctatgatttgatggcaatttattggacctctggtgggttgaataaaagaacttaggaccattaacaaagggaaatatttttaccacataacttattttatgtatatgaggtttcaaagctgtattctgctattctcttatatgcagtttgtgccagccatctcttatgttttataaacctgggcattctaatagctacctctaaggtctctttgaaatatgtttctgaggctgggcgcggtggctcacgcctgtaatcccagcgctttgggaggccgagatgggcggatcacgaggtcaggagatcgagaccatcctggctaacacagtgaaatcctgtctctactaaaaatacaaaaaaattagccaggcgtggtggcgggtgcctgtagtcccagctactcaggaggctgaggcaggagaatggcataaacccaggaggcagagcttgcagtgagccgagatcgtgccactgcactccagcctgggtgacagagcaagactccgtctcaaaagaaaaaaaaaaaaaagaaatatgtatctgaatcttgaaagttctgtctgttggattcttatttatgctctattttcaactcttactagtgaaagctaaatcacattcttttttttttgtgactagactatgagtccttggtaaaaaaagctcagtattgctgttagttaaatgatagccatctgttcagaagagcagaactcaaacctaaaagcatcctttctgcaaaaggaaaggtataaaaataaacatctcagcacctgacaaatgttgattaatcattagacattatatattatctctgttctaaatcacttatcctggcagggtgtggtggctcacacctatagtcccagcactttgggaggctgaggtgggaggatcacttgagcccaggagttcacgaccagccctggcaatgtagcaagacccagtctctacaaaaaacacaaaataaaaaattaggccgggtacggtacctcatgcttttttttttttttcctgagactgagtcccactctgtcgcccaggctggagtgcaatggtgcgatgtcggctcactgcaagctccgcctcccgggttcaagtgattctcctgtctcaccctcctgagtagctggcattacaggcacccactgccacaccaggctaatttttttgtattgtaatagagacagggtttcatcctgttgcccaggctggtcgcaaactcctgagctcaggcaatccacctgcctcgccctcccaaagtgctaggattacaggcgtgagccaccatgcccagcctacctcacacttttaatcctagcactttgggaggccaaagcaggaagatcttttgagcccagaagttcaagagcagcctgggcaacaaagcgagacctcatctctatttgaaaaaaagataaataaaaatttaaaaataaaaaattagctgggcatggtggcatgtgcctgtagtcctagctacttgagagcctgaggcgagaggatcacttaagcctgggaaggtcaaggctgccgggagctatgatcatgccactgcacttcagcctgggtgacagagcaagaccttgtctcattcattcattcactcattcataaataaatgaccctttttaaaaagaggcagtagtaaatcaaagctgatattagattaacaaaatatgaatgttaccacagaaacacatttcttaggcacatggactaccatcatatgatttagtccaattaaggttattttgatatcctgaatagtatgtgatacattattgatatgtatcacagaattctctttagagttttgtactgctttaaaaaccttgtcaccgtccttttataagagattacagttagatagtcacaattgtcctcagaaattgtccttggtagttgattctaatgcagattcctaaatatgctgtcctttgttgcttcttagatagagaaataaggtcaggagacccaggttcctttaaatataaaaccttgtagtttacaaacttgccatcagtcatagtgcttagaacctaaatagcaagtggggcagagtagcaagctggcaagttctccaaagttctttgggatagtagatattttgacatgcttcctctttcttctcctgactcacccctgatctacctaagagtgaactaattttactctgattttgttcttgaagtctactaatggattccctttaataggtaaaaaggagtcaaatatacagcttttagtggttttgaggttcctgtggttttgcatcttcactgttgtcacatctcttagatgagggcattgattgacacacaccaaaacaaaaagattctccctcaacaacaagcatactaggaacctaccttttaaaagcccatgttttcttttctgttgccatggaatgctatccccggcaggttgattgccactacaggtagttgagcaaagaatcatcttggtaattctggagtctgtatgatggatgtatttctgacccatcaatctagcagtcatctctctgatgggcaggatccaggcaaactccaaagagaagaagcaggagccattgaaacataatggagtgaaaacaaagttaggagaaacacaccccagagggaatggggggtgaagtccatgggattcgctgcataaagtggaaaaaggagcagatagagaactcactatgcatctgataggactaagataataaggtgggtatccataagtcaccccagaaaatctctttccttgtactatataatcacaccacatggaaaattttatttaaccaagcaaaatttattgtggatgtaatgaactttcaataaagcctcactaatttcaattttactctttcaaaattttcatcagtaaattaaaggatgcaaaagaaatcaaatgtaaggctttgtagcctgaggctgctgcctaatgattttttaatggattgagctatatacagacaaggtaaatcaaaggtcctcggattggagctacagaaagtaggaagaacgtttggctgggccaaaagtagctttatttaaatacctgctaataatttgagttttactctagaatgttttttatcatgcttagtattatgtgaaacagtacataaatttgggattctttcatcaaaattagtgctttaggtttgatttctgtatatcaacatttcattgcttttattaataacaataatacttccgatacttcccatcagctcccacgattatgtcagtaactttacataaactgtcttatttatccttcaaagtcactgtattacaaggtagacatatttatcctcattttacatatgaagaacccagagttcagagcatataaatgacttgtccagggtcatacagctagcaagtggcgagcacagacagattcaaacccagtttttctgacttcaaagctcatgatccctgcaaaccactgttttagatgttaggactagggagcctacacagctcaccagggatatgcttcttgactttgagagggcttcagctgcacctcgtgtacctttacttttgttttctcaatctgtatagtgagcccacactcagaagtgccaggctctctttctacataagttaggtgccaaagatacagcaataagcaagatactatttcttaccacactgaattttcaaatgaataattgaaagcaagtacaatggtgatgagcagcatgaaggagaattaaatgctgtgaataagaagtttactaagaaaatgattaggaaaagaagacttgcagaaagacaattagcctgatttggagaagaatttgtggagacgctatttacatttgaaagaaagaaaacagaatttctttactcaacatactataattcagactaacccacttaatttaaattagctagctttacaaaatttcatcttgggtgcatcaatctggatagtctttgctagtagtgatacaactgtgcacatgtatgtgaattctcttcacttatactagatgctaaaagacaagcttctgtaaagtacggagagataagtattgtccacctataattctattcccagccaaagtatcagtcaggtataaagttaaaaataaacaagggggccgggcgcagtggctcacacctgtaatcccagcactttgggaggctgaggcggacggatcacgaggtcaggagatcgagaccatcctggctaacacggtgaaaccctgtctctagtaaaaatacaaaaaattagccgggcgaggtggcgggcgcctgtagtcccagctacgcaggaggctgaggcaggagaatggcgtgaaccctggggggcggagcctgcagtgagtcgagattgcgccactgcactccagcctgggtgaaagagcgagactccgtctcaaaaaataataataaaaaataaacaagggataaaatatggtcagagaccgggcacagtggctcacacttgtaatcccagcactttaggagactgaggtggaaggatggcttgaggccaggagttcaagaccagcctggggaatataagaaggccctgtctctaaaaaataaaaaataaataaattagccgaaagtggtggcacatgcctgtcatcccatctactcaggaggctgaggtgggaggattgcttgagcccaggagttcgaggctgcagtgtgcggtgatcacaccactgcactccagcctcggtaacagaccaaaaccttccctcaaaaaaaaaaaagaagaaaaacagcacagtcagagcctttcacacacaccctttcctgtgaagtttcctgaggatatattccagcaaagtaaggtaataaaacaggaaagaagaagacatgagagtcaaaggtagcagatccaaatcaagagagaaatagagtggcagctgtggtacagactgacagagcaagaagacacggggctctgatgattggtacctgtgaaatgcggggattcaagggattttattcaattctagaccatggaagagaaaaaacaattgtaagttccaagcaagaaaatagaacatatttggggacattatttaaatagtgaataataattataggtttgcagaaataaaacattctttgatttccaacttttagaattaatcttaaccaaagtatagaagccttaattaaggctacagaacaccgagttgataatagtcagtattttttcaatgccttgtatgtgccacgcatagaaggtgattgggatacaggcagtgaacaaaacagttcttaaagggctcttattctagaaaggggtatgaacgctaagaaagtacaaacaagataatgtctggagtgctgtgaagacgctgaaatagggtaacatgaaagagcatagctagggagaagaggttgcttttgctaacatggaaagcctgtcagagagtgacccttcagttaggatttgaatgacgagaagaaggagaagatctgagatgtcaccaagcagaaaagtaaaggccctaaaatggaaattagcctgtgacagtggaacgataagtgcctgtgttgctggagcagagtgaatgaagggaagagtataggagatggaagttagagatcacccaggccagatcattgaaggcctcgtggataatgataaggggattttaataagaggtttttttagcaaagggggtgatgtggtctgacttatatttctgaaaaatcactctggccattttgtggagggtggattatagcaagacaagagggtggctggtcctaaaattagaagacagtggcttgtactaacattttagccatggagatggtgaaatatatttggaggtagaaatgacaggacttatgtgggcgaaagggaaagagaggatttgtttgtggctggagcatctgggtagatggagtagcactggctgagagtggggtacttgggaaaagagcatctttgggaggtaaaatccagagatcagtgttggagatgtcacaaaggaagcagcctcagcctctggtgtagaagtatagctggtgggaggtgggcgagggggagtaaaagtgctggaaggaaggtggagatactggcatcagcaccttagaaaatgggaaatacagagagagtttcttgttgatggaacaaaaataaaggatacatatattatttaatgtggtcaagaagtaatacaactattgatgaaattacagatgaggaggagagcaggggttattagtgatatgaacctaggtctgttgtaaaaggaagtcagtggatatatatcaagttgataatttcagataaattgaagttgataaattcagaaaggtaatatcagcctgttatttagtgtttggagttcaccataaaaagagctaaaagtagaagcaatttaaagcaagcacaaaagaaccagcagtgggttaagggactgttgcttttcattttcttcagtcctctgcatgggttactttgctagagtaaaatggtaatattcttaattgcctcgacaaaatcagattttctggatgtgaaaaggaagtgatttttgatttcccaaaattaattgaacaggggagagagagtttgaaagtcttatttcttcaatataccaccaagaagttttcattttaaaatatgctagaaagtggcagtggatatgctaccaagtgtccaaagaaatggctacttcctttcttgacttatagaagtttccacccttttaatttaaacccaattctcggtcctctgctaccttctggagaacaaggaattatcaacgcgaccccaccagaatttacagtttttctaggccatatggcaaatttagtggaattgcaagttccaggaaaggaggaaaggcttgatacagggaacagcccaggggagcagaagaaaggcagcagcaggaacagatgcttggaaacttccagtggagggagggccagaggcggggttgccagggttaaaaaccagaagagtgtggtcagtttttgaccatttaccaaccaatgaggttttctttacccgttcgtttgcctgcttccacgccccactcccccacatctcctcttccctcctggctaccctgcatcctcttagcccagcaagccccacagatacttcccactgattcacctactctagcaccagtggtagaaacaccctttaaggtctctcttccaagggcccttctgtgcatttgtatttacttttccctccacccacccatcttgtgacttctgagtccccttttgcccagcactccccctccagcacttttcctcatgggagccagccctttccatagcctcaagtggaactaatctgtcacttctttctcttaccttctattcccgacaacagacatgtgtgcttggtgacttagattcatatctatagtattaatagacacctttaggatatgcatgttagaaacatgaatgttgtgttaagtttcctgtcttagaacccagaacttggcattgtagaatccatctgtgcagatcaatcatatcaaactgggatgtcactgagtttttagaggtttgtgaactttacaagagtcgctttgaaaggagctttgaaagcatgaagaatgtttgttagaagagccttaaaaaatgtaataaccggccaggcgcagtggctcacgcctgtaatcccagcactttgggaggcccaggcaggcagatcacaaggtcaggagatcgagaccatcctggctaacacagtgaaaccccgtctctactaaaaatacaaaaaaatgtggcgggtgcctgtagtcccagctacttggaggctgaggcaggagaatggcatgaacctggaaggcggagcttgcagtgagccaagatcatgccactgcactccagcctgggcgacacagcgagactctgtctcaaaaaaaaaaattttttttaatgtggtaaccttggcttaccatgcatgagggttgataggaggaaactatcctgtacccattctacaaccaaggaagtttgattaaatgtaaggacaaatttttgactgtcagagactgattacatgataactccttgagggccctctggttctgggttccactgtctcttacaggcaattggtgagggtgaggcatcgtgagactctgaggctggaaggaacttagagattccagccaattcagcacagtggtcagacttaaacagaactcatccctaattgctcagttactgctctgtttgtaaagaccagcagaggaatatattccacagttcccttggtgatttatttaatgatcttaaacatcctgctcaggaaacttggtcctatttctaaccaaaactgcatctgctgtggtttcttctagttctcagagactgtgggaagcagctgtccccatctagtgactcgccctgtgataccttcacacactcatcctctgaccttttatctctcctttattcccggatcttattttctggctctttaatatattcaagttatacgtgctaaagatcagcaacagttcaaaagctctcggagcaggatgactactgtgttgcatttactttctcagtctgtaaagcaactggaaattcagatttaactagagaggagagttaccaatcattgctcatctctccaagactaatgctttgggagagaaaaggcattatggaggcagggaattcatactcctgggcgtctcccattgctcatccagtgggaggtgacggttcccagtctcagtctggggcacttcctttcacttcccctgggtgttcaccattgtgaggaacaggttagatggggaagagctgcacaagaatttcacacagtgtcttttctgtggcagatactattgcagaattggtcatgcaggtctgagaacaccacatgtaagttaaagtacaagaggcctgtgtgtccttgggcccagtgcacctgcaaacacttcctcgattagtcagcgcttagctgacttagtgtcttggcctagagcaatactatccccaattaacaatggaagtgaaatatgcccattgctgtcttcacccagagaaaatagattgctcatatattacttcttccatacactcacatggaaatcagctgaagtttctatgacaccaggacagtcagcagctctgccataaaacattttagtcataaacatctatttataacacagacctcaatgtatttatttaaaaggcaccagattatctagtcgtgggatttatttattatcaactgacagtttctgaacacgaaggatgtacaaaacactcctctacatattgggggtggccacaaggatgacttaaaccccccaacctcaaggagttcccagtctagagagggcaatacacataaaaacaaatgatgactgtgtccagtcaagatgcataggagcatagaggctggacctgtaattccagcgagtaggtgcaactgcacttcgagctgctctggaggtgtgtgcactcactcttccagaagagaagctggaagggctgaggtctgggacagaaagcacggaaagggcagatccctctcagaggctgatctgggtggggaagagtcagaaaatgtgggttcagttcagattgccaaggaccttctattccatgtgaggtgaccacagatcccagtttcccaaggtttatgtctgttgctccaacataatcatcaatagagctgcgtcctttaactctcaagagtgtcccagatagatgataagtcccacaaacacctgacttatacagctgtgcaaagggggttgataggttatataaagcaaatgaatgaatcagatatgtgtcctggaaagataactccagcagccatgagaaaaacagtttgcaaagggatgagactagagacggaatctctccatacagacagaagtagaatgaaacatacttgccttgaaaactaaccatattctaaacacggacttgcctaaatgttggttataagattgtctctgtttccaatgacaattttttgaactgtgtcaagttgcatagatgttctgaatgtcttttaagttctcagtaattttcagaaataatgctagctgcctgacaccagccttttttttttttttttttttgtaataacgcagaaagataaagaggattctgataaatacctgggggaaaaaatctcaagactcttttgggaaaaaggacttaatgttgcagaggagctctgatcacccaggtttggtgcagaagtttgcgtgacctttttctaggaagctgctgctcaccattattgcagcataccttttgcattgttttgctagtcttgcaaataggtttcaccaagccacccacacttcccagccatctttcctgaaactactgaatgcacctctgagatggattggggtgtagtctccaaggcacaaagctgagttaattggacgcggagactgaacctgtagcagtggcctcgttagcaccactgaactacccggacacagcctcaatgatgcaaggcacttttggtaagatgcttcctgtaggtgtccttctgtgcacatatgctcccttcttccagggctacttggacttgatgactaagaatgatgaaagaatgagaccctacagtggccaagtcatcctgaagggactggccatgactgaagcccaagttcttagcatgttcatgcttgagaagcaacacagcacagggcagagaaagagtacaaggtttggagtgagattggtctgtgtttaagtccatccctgctacttactagacaagagacatcagacgttacttaacctttgtgtaccttatttccttcccaggattgtgacgacaacacctgctgtacctggtggttgggtttgtgttaacctagccaaacccccagcacaggtgtggcacatgtaggtgcttagttgacggtggctgattttattaactgttgtcatcgtgattattacagaataggttctgtttaaatacattcattcgctgagtcagcatctatttcttgagcacatgtcacttgctgagtagtgttctctgccctagggatatagccatgaacaggataaacaaggttcctgtcctcaggatgcttagacaaatgctctaattcagctcttcttttttcatttcctgctcaatttattgacttctgccaccccttcatttgttgccctttcccagcatcctctaccttcagccagaaacccctgttttctcagtagctttgtcctgttaatatcccagaagcctacagccgcatcatctgctcctttttgatttcctccattctgtgaacatggatggagcacgggctgccctcagtcccagctctgccgctccccaccttggatgcagaggctcccattcctctgttggaaagatcacacagatgtgtctcagaggcttggtacacagtgcctgcctgatttggttaaaaagaagcttaaggccgggcgcggtggctcacgcctgtaatcccagcactttgggaggccgagacgggcggatcacgaggtcaggagatcgagaccatcctggctgacacggtgaaaccccgtctctactaaaaatacaaaaattagccggacatggtggcgcgcgcctgtagtcccagctacttgggaggctgaggcaggagaatggcgtgaacccgggaggcggagcttgcagtgagtcgagatcgcgccactgcgctccagcctgggcgacagagcgaaactccgtctcaaaaaaaaaaaaaaaaaaaaaaagaagcttaaaagagaaagaccaaagagggaagcttttacaagttgctttttaaagctttggaagtttgtgtttgaggcttcaaacagataactaattaagttttagcactccctgtgattcggacaacaaccgtaactactgtcatgttactactattaattgattctatttggttccaatgacacgagtcaaaaaatgttttcccaactgtggttggactcagttgactttccaatcatatcactcccctccttcagtggctactcaagatcaggtctgaggtcactcccacagcctacacgatgtggccccacctcctcactctgcattttcctgcacttacctgcaggctcacctgcaggccacaccagctttccttggcttcctcaaggaaagcccctcactgcctacctcagagacagctccggtgccgtgccctgtgccaggaatgctgttcctaacctcttccccaagcccccgtgcatcttccaggtttcagcttaaatgctactttcccaaggaagccttttcctgaccctctcctcaaacaagtctaagtcctcatgttagtgtcgtcttctagcactctggttttctccttcataacaccacagttgtacttcgtttttgtatacttttttttttatttaacatctgtcactttcagggggttataaggagcacatgaggggaggactgtgtctacctccccgtctagaagctcaggaactatgtgttgaatgaatatataggaagctgtagatggatttcttatcactgcatatattcaatcttagctagaaacacactctgaaggccgggcgtggtggctcacatctgtaatcccagcactttgggaggctgaggtgggtggatcgcctgaggtcaggagttcaagaccagccttgccaacatggcgaaaccctgtttctatgaaaaatacaaaaaaaaattagccacacctggtggcacgcacctgtagtcccagctacttgggaggctgaggcaggagaatcacttgaacctgggaggggttgcagtgaggcaagatctcgccactgcactccagcctgagccacagatggagactctgtctcaaaaaaaacacacacacacactctgaaacaggtgtgtggaattgaccttcagatctggacttcctgttcagatgccagtggtaacaaagtcattacttgataatgtttactgatggccatgacctagctcagttcagtcctgagtagatgggcattcacagcagcctacttagcaattatgtcatcggccatatgaagactggccactcctgagagcagaggtgacaaagcagatgatcgagggctaagggctgaatagattccagaatctgagcagccactttcaccaggtcatatctccagggtccagaggtgaggttttagggggatggaggtgggagctgcatcataaaagtgagcagtgccagggtgcctttcgttgctacaaggaagaaccctatcttaaagaagcagtttttgcacatgaaggtattttcttcaggctgggtgtggtggctcacgcctataatcccagcactttgggaggccgaggcaggaggatcacctgaggtcagaagttggaggccagtctggccaacatggtgaaaccctgtctgtactaaaaatacaaaaattagctgggtgtggtggtgaacacctgtagtcccagctactccagaagctgaggcaagagaatcgcttgaacctgggaggcagaggttgcagtgagctgagattgcgccactacactccagcctgggtgacagagcaagaaagacatctccaaaaagaaaaaaagtattttctttttctttataatgaaatgatgtctagttatatgcattatgaagcaggaagagttatcatcaagggtgatggactgttttacgtaattgtgagatggggggtatgctgtttctagaattaacacagattgacctttgtaacagtgaccacaaaatgcagacaggcctgatggggatttgttcctatactcttccctgtaaacgccacatggcttggagcctcagttgatgccttagagtcagggttaaaggtgcagctatgtggaagggcttccagctctttgttatgtcttgtgctcactgctgctttgccacttactttgtagtcgtctgtctacttagtccatctcccccattaaaccacaagttcattgagaacagggaccatgtcataaatatatttgactcatccctagcacctagcacaggaaacactaaataaataccgaaagagggaaggaaggaaagcaggtaggtcagtaggctctggttaagggaagggatggtgtggggttcaccctgggctgtacactatgctccagcactgactgtaaagccacttcataattgctaagtagagggtgtcggcttagaaaggaaagggaccacatgctgaccaagatttccccaggtgacactgtgaaggaagctgatgtcagcttcacatccagacttgtgtgagtaattagaaacttcagagggagggtaaagaaaatctgcctactagttgacagcccccttctcagcccatatggaccaactcatgaaggggaagaagcagagggcatgaggatccattcccaggttagcctgggctctgcttactgcccccaggcagggctccagcacctgcaggccagggactccacaagggtctttggaagccactattgcaaagcagaaatacttctgtacattatctgctaattgtccatgggcaggctggaggcagcaaagtggcttctggacccctacagataaatttcagcaaagagattttaatcaattgatggatcgatctcactgtctcctgctacttgcatattcccttgcagcctttagcccagcaagaattgtagtaaaccaagatcagcatcatactgaatcaaaaggggtttaagaaactaaatacgctaagtcaaatgttttaatagcttatcttaaaccaatatgtagcagtttgaggtgtgattgaatgccacgtgtgcagcaaagggacagggtgaggaatgaggaagccacgcgactgttcagctccttctcatgaagtagaactcagtgtactgttgatggctccatttgaaatgaagttgaacttctgtttttccaaatgtttgttaactatttgtatgtctttttattgtccgttttcattgcaattatagttctcccactgacgttaagatgcaggtgctgaagcacacacagatcaatctcatcctccatcaatgcatttatatatttagaaatcaccgtaattgcaggctgggtgcggtggcacacgcctgtaatcccagcacttttggaggctgaggtgggtgaatcacttgagatcaggagttcgagactagcctggccaacatggtttgaaaccccatctctactaaaaatgaaaaaaaaaaattagctgggcacagtggtgcgtgtctgtaatcccagctactcaggaggctgaggcaaaagaatcgctggaacccgggagacggaggttgctgtgagccaggattgtgccactacgctccagcctgggcaacagagcaagactctgtctcaaaaaaaaaaaaaaaaaaaaaaagagaagaaaaaaagagctgtaattgcaaagaaaacggaaaataacaacatatataaatagttaacatttagaaaaacagaagctcaacttcattaataatcaaagatgtcttaacaaaacaatgagatacgatttttccttcaagtcagtataatttattttgataatagtctacattcacgagaatgcagtaaggttctgcattgatatattgctgctgagaggtaattgatataaatctagaaaaccatttgaaagtatgaactgtctttcaaatgcccctccctttaaaaagacaaaggaaataccataaaatgttaatcataattatttctagggttatgttgtacatttagaattaaagggaaaaaataacattactaatattttaatgctcacatcattttccctaacaatctccttttaagaaatatcctgtccgggcatggtggcgcacgcctataatcccagcactttgggaggtgaggcaggaggatcacttgaggccagcctgggcaacatagcagaacctcgtctctacaaaaagtttcaaaattagctgggcctggtggcacgcacctgtagtcctagctactcatgaggctgaggtagaagaatcacttgagcccaggaggtcaaggctgcagtgagccttgatcacaccattgcattccagcctgggcaacagagcaagaccctatctcaaaaaaattaaaaatttaaaaggaaagaaatatcctaagaaaataatcagaaatatgggcacaattttatatgtaaagatccataaataagttatttataaatagtaaaaaactggaaacagtctaaatgattaaagaatgaaatgaaatattttgcagcttacctttacaaactttttgatgtcaaaggaaagtgcttatgataaaataagtttttttatgtgtgtaatattatattctgattgtggtcacaatttcaaaaaaaatgttcattgaaagaacgagcgtatcagcctgggcaacgtggcaatacccgtttctacaaaaaaatacaaaaacttacttagcccagcgtggtggcatgcacctgtagtcccagctcctcgggtggctgaggtgggagagtggcttaaacccaggaggccaagactgcagtgagctgtgattgtgccactgtactccagcctgggtgacacagcaagacccctgtctccaaaaaaaaaagagagagaagaaaatatgccaaaatggtttatgctgactgcttttgtttttactgctttgaacttttctgtgttttccagctttacttcaatgaggacatattgcttgataatcacagaaaatttttaactctttatagcaaaagttaattactaaaaggatacgtaaaatataatatttctatgttaatatgtcaaaatattaacagtggttctctctctagatgatgagatggtattatggataaaatttgatttctttatagctttttgtcactttccaagttttctttttttttttttttttttgagacagagcctccctctgtctccagactggagtgcagtggcgggatctcggctcactgcaacctcctcctcctgggttcaagcgattctcctgcctcagcctcccaagtagctgggactacaggcacgcaccaccacgcccagctaatttttttgtatttttagtagagacgaggtttcaccatgttggccaggatgttcttgatctcctgacctcatgatccgcctgccttggcctctcaaagtgctaggattacaggcatgagccaccacacccagccactttccaaattttctacaataaacatgtatgaattttagaattaaaaaaaaaggagagagttggaaaaaaattgaagcaaaaaaagaacttacaaatgtagaatttgtaatgggactgagtgatggatgttataagtgccggtttactcttacacattttcaaaaacatacctctctttgaaagattcaccagctagactgggctttgtggctcacacctgtaatgccagactttgggaggttgaggcgggtggatcacctgaggtcaggagttcgagactagcctggccaacatggtgaaaccctgtctctactaaaaatacaaaaattagccgggcgtggtggcaggtgcctgtaatcctagctactcaggaggttgaggcaggagaatcacttgaacccaggaggcagaggtagcagtgaatcgagatcacaccattgcactccagcctgggcagcaagagcaagactctcaaaaaaaaaaaaaaaagccacgcatagtggctcatgcctgtaatcctcgcactttgggaggccaaggcgggcagatcacgagatcgggaatttgaaaccagcctgaacaacacgatgaaaccccgtctctactaaaaatacaaaaattaactaggaatgacggcacacgcctgtaatcccagctactcagtaggctgaggcaggagaatcacttgaacccgagaggcggaggttgcagagagttgagattttgcaactgccctccaggctgggtgacagagcaagactccatctcaaaaaaaaaagattcaccggctaatcttgagtcagaatttttaactttaggtataaaagttatatatatatatatatatatatatatatatatatatatatatatatatgttgtctctgggtattactttttttttacttaaatatctccataacatacatttctttcttgcagtaacttttgtggactactactgtctcttttggcttcatctcagtattacttaaactccagaaactgtgtctctgataacctgccatagtcatatgaatcaattaccatatttatgcaaaaaagaagagactagcttattcttcagaatagtttagtattttaacatcaggcatatacagcttgtcacaaacactttttcctttttttttgagatggagtctcattctgtcgcccaggctgcagtgcagtggtgcaatctcggctcactgcaacctccgcctcccaggttcaagcagttctcctgcctcatcctcctgagtagctgggattacaggcacatgccaccacacctggctaattttgtatttttagtagagatgggggtttcaccatgttggtcaggctggtcttgaactcctgacctcgtgatctgcccgccttggcctcccaaagtgctgggattacaggcgtgagccaccacgcctggcacactttttatgcagttggatgagggtttctataggataactactgtgtcactgcattacaataccatagcattgacaaatacagacagtgacactgaagagtcaagaaatacttcatttaaaggtctgtggctgggaatggatataattgatttaaattacaaaaaattaatgatagatatcaataaaaagagaagttaaagatagtaaaacgtattaggatggaaatgatgaaatgtgataaaaagataatggtaacaaagtgccagaagtgttcaatttaggcaaattaaatttaacagagtttaattgagcaaagaatgattcacaaatcaggcagcctccggaaccagaatagattgagaacaactctggggctgccacatggtcagataatgtttatggacagaaaaagaaagtgagtatacaaaacagaagtaaactacagaagcagctggattggctacagctgagcatgtgccttatttgaccttggcttgaacagctgaacacctgtgattggctgaaactcagctgaaactcaagtgattgagtgagactcagctccgagtttcaagagtagattatggtctgctcacacatccagttaggttacaggtcattatgtgtggagaaacctttagtccaaacttaaaatatgtaaggaggcaacattaagctaaacttaatttaagaaaagtatatgagaaaaataaattgcgcttcagaaaacagttgagatccctattgtatatggattacaaacccttttttatacaagcttttctttaaagaacatgccccaacaagtaaagttcaggaaattcaagatccaattcagtaatttagaagcccttgaaagacaatttggttcatattgcacacacacaagcacacgttctgagatacttattaaacacatgcagataataaaaatagttaacatttgtctagtccttagtctgtgctaggctatattgaaagcaccatgcatatgttagctcatataagcctcacagtaactctagaaggtgggccctattattactgccatttatagctggagaaactgaggcatggaagggttcagtggctttctcaggaccacagctaattattatagtaatggaccagagctcagacagtctggctccagcatctactccccgcctcagtgtcttgtcccaagactatactccctgtcagatgtagggtactggtattattcaaagcagaggaagtaaaatatttaaaacggaagcacattttaaaatagaaaatgagaggggcagaagagacggagcgtgttaatgacctctatatcctctcatctccctgggaattcattctatagcaaaaccagggagaactgtggaggaagcctggttctcttgaaaagaaagaacatttctgggctcttattctcagcggttgtgttatctgacaatgcgcccttgcatggagagtggtttgtttgctgttttcaaaccacaggtgtgagcatgtgatgatagcagtgcattactgattttctgttcatcctgcagtgaaaaagcacaatgtaatgtgcttccataaggtgtgaagtaaaacacttttaatcaaacttcaaagaacactcttctcttctgagagcaaagccttgtttccttgctgctccatcttctgttcagtgttaactgtctgctgcccatctccagcctggctgtgctcagaaataaattgtttccattgggcctaggcactcaagggttggaacttactcttgagatcaaggagggccctgcctctcagagtgtttctttttatcatcccatggtttcccacacagacaaactgttttaaactagacctgaggttgacaaactttgatccacaatagaatctggcccacccccaagatgactttgcatttttatatgtttaaggggataaaaactcaagagaggtttaatattttgtaacacctgaaaattatgtaaaattcaaattgtgtctataaataacattttatgggaacacagccatgcccattcatttacgtccacagtttcaataaatgtggacatggctgtggagtgtggacataaatgaatgagcgtggctgtgttcccataaaatgttatttataaacacaatttgaattttatataattttcaggtgtcacaaaacattatataattatgtccaaattacatagttacagtgcagactgtatgacctgcaaagctgaaatatttaccatctttcctcttatagaaagactttgctgagcgaaaccccatctctgcaaaaaatacaaaatttaggcatggtggcgtgctcctgtagtcccagctactggatgggggtgagggtgggtaacgggaggatcgcttgaacctgtgaggttgagactgaagtgacccaagatcctgccactgcactctggcctgagtgacagagcaagaccttgtctcaaaaaaagaagaaaaagaaaaaaaaggaagtttgccgactcctgaactagagcaccagagcatctcaagccccacccagtttggccacctttactaaagatgaactaggccgggcacagtggctcacacctgtaatcccagcactttgggaggccaaggcaggtggatcacgaagtcaggagttcgaggccaacatggtgaaaccccatctctactaaaaataaaaaaaattagccgggcgtggtagcgggcatctgtaatcccagctactcaggaggctgaggcaggagaacagcttgaaaccggaaggcagaggttgcagtgagccgagatcacgccactgaactccagcctggacaacaagagtgaaacaccatctcaaaaaaaaaaaaaatggataaactaagcctgccgagtgaaaggcacacatcatttcactgaatgataactgcagggtgtcccacaagctgctggccattctctacattcatcatagtttaaactgccttaattggggtgatttccctgcatcatttgtctgtaaaatatgtgagatctcttcctagaggtctcaccaagccacattgtaaaggaaacaaacatcatcaagtttcaggttccacaaagagcctgtaaattccttaggttagggagtttagcacaaatcattttctcacagacccaaaacactataatattcctattttgtcttcatttaattcccatggtcttaatgttaaatgtgatgttcattttttaaatgtgaagctcaagaataagttgctaactaacttgttgctaaaatccagttttatatgtagttaaacattttggctgagtgcagtggctcatgcctacaatccagacactttgggaggctgaggtgggaggatctcttgagcccaggagttcaagaccagcctgagccacatagcaagatcccatcttaaaaaaaaaaaaaaaaaattgtggccataaaccctgtgtctgcacggtttacagtgggcttgtgtgagctgaagctggcctgtaggcagtgtttcatcatctgtgtgacctgtagcaactgttcaattctagaatggcttcctccacccacttcgagccctcaggagccccactcacccattcattcagagcacccacttgttgaccacctgcagtgggccaggccttggctgctctatccagtctgtgtcagagcacctacagtccatggcaggcaacagctgtaaagaaagaactgcattaagttagaaaaatataggtaagagaagattggtagagatgagtctcccccattgggagtcccatggcagcacatagaaaggctttacaaagcagttggtcttcccactgtttgcccattccgtaaataactacgtgcacctgccatgtgcaaggccctgggttagacacatcacactccctgttctcaaccttacattccagtggggcaaacacacaaaacccaagtaaacaaatgagtaaaaataattcgatatgataagtgctaaggaggaataagcagggctctgaggcagaaaacgaggtgccctcttttcatagagtggtgggagaaggccaaatgaagaggtgacacttcagctcaggctcggaagatgaacaggaactgtgaagaccaacccagtcaggaagaatagttggtgcaaaggccctgaggcagaaaagaacttagtatgcttgaggaattgaaagctggccaggagttggaggaacagaccattagccacggctttgcacgtggtgtgaggaggggtgtggctattgtgggcaagggtctggaatggcatgggtgttggtggatgtgccacggatacaggattctagccgggacgagcgggaaaagcaggctggaaagccaaggaggaggcagattgcgacaagcctaggataccaggtcaagagattttggttttatgcaacagacaacaggcagccagaacagaggaggattttgtgtttccacttaaaaatattttttctgacaacaaagtaactctatttgtagaaattttagaaaatatacacaagtacattaaaaaaaactggaagcacacattcaaaccattgttcacatttttatatcttctttgcatatagatctgtgtatagttttacaaatatgagattcttctgtacattctatcttataattgtgatttcacttaacaatatagagcaaacattctgaaaatgttttcctgtgtcactgttcttttccagcacagcttgtaatatctgtgtggtatttcatgctaaccacacaggtgttaaaggctgtgctggaaaggaacagtgacacaggaaatttgtgctaaattcgtacatttattcgacaagccctgcgattgagcacctagaatgtttctaattttcagccttacaaacagtgctgtgataattatccttaaaatgatgtatttattcatatccgtaattgtttccttaggaattcctagagacagagttgcggggtcaaaaagtgtatattttttaaggcttttcgtacatttttctagattagcttcctaaaagcttgtaccatgttatgctcctaccagccaagtgtgagcatacttcacttaccaagctactcactttgcactagatttaattggcccgtttgaaaaggaaaaaacttcgtatatccattgtttcagtctgcatttcttaaatgaaattgaacgttttctgccatgggtctacctgtgatttgtacgtgtttcatggattattcatatcctttgctgattttttttcttttggtgtgtttatgatttggttactaatttttaggagctttttatatattaagaccatttacactacttgcagatactttcccagtctgtctttctgcattcttttttcaacaaaagttttgcatttgtatgtggtcaattctgtcctttcctttagcctttacatgaatgcttttccccactgaaagatcaggtaaatattcacttatatatccttcccattcttcagtacttttacaaattttaataatttttatattataaatttcaataatttgtcatctttaatcagatttctgtatttcaaagataactgaagaagtgtggagaaggttccagaggggaaggaactggtatcagggagaccaattaactaggtgttgcagttgcccaagagggatctggccatggcagtgattccaaccctttcctgcccccacacagtctaattgtacagagtacacccatcaggagtagctctcactatgtgcagtgattctcaacctcaggtaggggcaggggcaggggcaggggcaggggcagggacagggactctcagctcagttgagaatcccagtggagttttaaaggaaagaacatattgaacagaggctcaggagggcaggcaactgaatggctgtaggtgatgagcagagtaactggtgactcaggtattttatttaggtgagttggtagatcacggttccattagcctagaccataacaactatgggaggcagaggcagagccctagaaaggaggggaagagcatggaagatgacacagacatgttagaacttacttattttaaaaggatatagttcagttcaggtggaaatatctaagcagtgagaactgggagcctggaccccaggagtctgtactggggagtgtggattgggaagccagcttaaaggaagttgaagtggtgggagtgaatgaaacaagccatgtgtggagaagaagaagaaaaacatggccaataaggaactctcaggaacataacattccaaaggtgggaaaggggtgttgaggaggagaaataagtaaacaggactaagaagaacttgtcaaagaagtaggagaagcagaatgacagcagtgccgagagaaaaagagtttcaaggagagggaatggtcttcagctttggaactttctagcaagatacctaggcccttcattgtgccatcaaaacccacgtcctttttcagctgctagaagaggagctgattctttctgctagactctttcctattctatgtcaggtccattcgcagccctggtaattgcacacactgcttcctccacccacaatactctcccctgctcttcctggtgagccactcctctttcaggaaccacttcaaatatcgcctcctctgtaaaggcagtcctattcagccttctgcaaaattcactcaacactgttgtgaatttctcagaggtcccttggcactatagttcatctctctagctagcatgccaccttgtgtagtagttttctacttctcagtgcttttcaggctcctctaaggagttcccccagcaacagggaagagttaactcaacattcaccagggacatatcccaacacagcctatgacatgctgctggtttttttgttttttttttttgttttgttttttgtttttttttttttgtcttagagaatggcatctcactatattgcccatactggccctgaactcctggactcaagcagtcctcctgcctcagcctcccagagtgctgggattatgggcgtgagtcactgtgcccagcctggcatgcttctttaaaggcctgtgttttggtaatggttgatgctgtttttcatgctgtcattctaaatgttggttttaatttacttgggtgtcaggtgtttccagttacttacatggagtaaagcttagtctccagcaagtttctccatcttcgttctgtggtttcgcttactatagcaccctgatgcacatccaagggaaataatcgtgtcccggtttaagaagcttcagtttccacatctgtatcttccattggagcaagagcatttccactgcagtgactgttcttaaacatcctctctctagtacccagcacagtacctaggacatagtaagcattggtgtatacatttacagaagcaaaggacagaaggaggaaggtgggagatgaaagagtggatggatggataaaaggaaggagggcaaaaaaggggaggtgaacagatgaacagatggttgggagggagacaaggaggggagggatggatgaatggatggatggatggatggatggatggatggatggatggatgggtggatggatggatggattacaaaggttaaagagtgagcaatgcaggccaggctgtggctcatgcctgtaataccagcactgtgggaggcccaggtgggccaattatttgaacccaggagttcaagaccagcctgggcaatatagtaagacccccatctctacaaaaaatacaaaaattagccaggtgtggtagtgtgtgcctctagtcccagctactcaggaggctgaggtgggaggattgcttgagtccaggaggctgaggctgcagtgagccatgattacgccaatgcccctctgcctaggcaacaaagcaagaccctgtccaaacgaaacaaaacaaaaaacagtgcataagtaaagcttgactgcaaagtacgatgagggagaagacattagctatggatagtttattttaacttcaaggcatttggtagcagtggagggatagggaagaacaggtggactttttggtcttttgtttactggaggagatttgaacatgcttctaggctaaggacaaagcagatagccactggaggagagactgaaaatatttattcaatcaagaaatatttattgagtaccaacaatgtgccaggctctgtacaggaagtgagcaagatatagacggtgttcctgtgccatggaactttcattccagcagaaaatagaaaggataatgggtcatgatccatgagaaaatggaaccgcgtgctgattggtgtgttctcgggaagagcaaaatgttttaatgttagtccaggtcaaacataattatgaaggtgagactcccgaagggaaaagccacatacattccaaagccacctggatgcgtgtgtgtgtgtgtgtgtgtgtgtgtgtggcagtgggatggtgggtggggggacatagagaaagagcaaaagtaaagctggacgtgtccaatgtatatttgccaaaaacatttttctctcctgtgattcagacaaggtggtgctttcaggatatacaagtgaaaccaaggcagaaaaagacatggccaagtcttgtctagccggttagcctaagcttttctggtcttttgtaagtgactcatttcccttttgtgtggttttcttaatatattctgcataaggctggctgttacatccaaacagaagcaaaatgtatgatctgagcatgcactgcctcttgatctaatccacttcttaattacatttatgttcattgtctttgagtcctatagtttgggacaattctacaggctccccacccctagaagtcatttattatcagctaccagccactcaatgtttagttatagtgaataaaatactttcagtgtcagaaactatagatctcatttctaactctagattaattctgtttcgctgataatattaagaaatggctgtaaattggatgaaaatattctaaaattatttcactattatcatttctttctttttttttgacactctgttgcctagggctggaaggcaatggtacaatcatagctccctgtaacctcaaccttccaggctcaagtgatcctcccacctcagccacccaagtagctgaaacctagctaatttttaaattttttgtaaagacagcatctcactacattacccaggctggtctccaactcctgggctcaagctgtcctccctcctcagcctccaaaagtgctgggatttcaggcctgagccacagtgcgtggcccacttttattactcctatttctattattataggctatccccaaatactttttagaagtaggcagagtatattcacaagtacctttttaattacctagaaaacaaatctacaaagaatgaagacatgggactcagtttgtgatttcctcatttttaatgtgtggtattatagaggccttactaatcctctgtgattagctgtggaaaattttgctttaatctttgcaacaggttagatcatgagacagcgaacagcaaaaaaaaattgcaactctgtagtattgaaaaaattttatatggcatatttcttgtaacaaagcatagctcaggctgggcgcagtaatcccggcactttgggaggccaaggcaggcagatcacctaagatcaggagttcgagaccagcctggccaacacagtgaaactccgtctctactaaaaatacaaaaattagccggccatggtggtgcacacctgtaatcccagctacttggaaggctgaggcacgagaatcacttgaaccagcaaggcaggggttgcagtgagctgagattacaccgctgccctccagcctgggcaacagagttagactccatctcaaaaaaaaaaaaaaaaattatagctcaaagcttgaaaatcattttgttttcatgggattcattgtaaaggagatttgacctaacatattattaatactgatcttttcattccgttaagtattcactatcatagaacactaaattaggcacattccatagaactttatagttttatgctttttgtgatggataatactgagtgtcaacttcattggattgaaagatgcaaagtattgatcctgggtgtgtctgtgaggatacaaaaggctttcacactgcattttactcctatttcgcaatacttccataagatagttaatgcaattaacgtgtccttcatgtgacagatgaggaaaatgaggctctgggatcgaagagacttgacaaaagtcattcaggtcattggtatttgcatagaccacacaccttgccaccaagtagttcccagactgaagcagaggcaaatgaccatttatgagtgtaaccctcctagcatggcatccaactcatggcagaccctctccaaacgttagctatgtgcatttaaacttataattcccacaaacagaagtgacattaacactacggaaaacagagcttcgtaaattagaaagtcagtgctatgcccctcctatgacctcgctaacattttcagaaggtggcccagggattcctgctcactacttatctttaacatttatatttgtaacaaacgattaagagggagggtgcagtggctcacacctgtaatccagcactttgggagactgagctgggtggatcacttgagcccaggagtttaagacaagtctgggcaaaatagtgagaccttgtctctacaaaaataatgaacaaaattagctgggtgtggtgctgtgtgcctgtagtcctagctgctctggaggctgaggtgggaggctcacttgagcccaagagacagagattgcagtgaactgagatggcaccactgcactccagcctggacaacagaacaagaccctgtctcaaacaaacaaacaaaaaggattatgcattttgtgtaacatatattttttcagtgtaaatgtatgtgtatacagatatatataaaaataattaaaagtcggccaggcgcggtggctcacgcctgtaatcccaacactttggaggccgaggcaggtggatcatttgaggtcaggaattcaagacaagcttggccaacatggtgagaccccatctctactaaaaatacaaaaattagctaggcgcggtggtgcacacctgtaatcccagctacttgggaggctgaggcaggagtattgcttgaacccgggaggcagaggttgcagtgagccaagatcatgccactgtactccagcctgggcaacacagtgagactccatctcaaaaaaaaaaaaaaagaccaaaaaataatttaaaaagaatttaaagtggtactgaataagaagtcagatctcccctcattggtgtcccatgcaacacagtgacttcccactggcactggaaaacaggatttttccccacgttgccaaatgctcatagagccagtgacctgctgaggtcttcttgaggagctcagacagctcttaacctagctctaactccttcttattaggccccttctcattttccctcctctgccttctatacctagataatcctagaggacaaacttttttttttttttcttgagacaggtctcgctctgtcacccaggctggagtgcagcggcgcgatcttggctcattgcaacctccttctcctcggatcaagccattctcccacctcagcctcccagtagctgggactatatacgtgcaccaccatgcccagttaattttttgtattttttgtagagacaaaaaatataaaagaccagccttgttgcccaggctggtctccaactcctgggctcaagcaatctgcccacctcagccacccaaagtgctggaatgacaggcatgccaccatgccctgcctagaggacaaacttttggccagagccaaatttcttcagcaggtgacaaacccagaaagaaagggcttagggttctatagcaactgcaatgatgagtgctctctcgtcatgttaagaacaaactaaggaaattaagaactgggctgtccaaaatggaccactctccgtagtgaattttttttttttttaagacacggtcttgctccgtcacccaggctggagtgcagtgccacaatctcagctcactgcaacctctgcctcccaggttcaagtgattctcccacctcagcttcccatgtagctgagactacaggcatgcaccaccacgcccggctaatttttgtaggttttttagtagattcagggtttcgccatgttggccaggctggtctcgatctcctggcctcaagtgatcggcctgccttggcctcccaaagtgctaggattataggagtgacccactgcgctgagctactatagtgaattctctatcactggaaatactcaggctgagatcagacaatcacttgggatgctgcagaagcggttggttggttggacaagacaattatgaacaacctttcctaatctgagcttctgtgattctgcggcagcagaagtcacctttatgcctatggacacatgaagtgtgacatgttaatgactatgcatatggaaaagcgtggcatttatttaatttacctaacttagagcctcacattccttagctgtaaaactgggataaaaatacctgtcccatgggatttttatgcagattaatttaaatcatgaaacataatgtaaattgcctgccgctgtgtctggcaggtactcattaggtgctggttatctttgaatattcacaatataccatgtgctgtaacatatatgaaaaaagacttgattgctgctttgagttagatgagttctcgtgccggcacaatggcccacacctgtaatgccaacactttgggaggtagaggtgggaggatttgcttgaagccaggaatttgagactagcctgggaaacatagtaagatgctgtctttacaaaaaaaaaaaatgtttaattagctgggcacggtgatgtagttccagctactcagaaggctgaggaaggaggatcactggagctcaggaatttgaggctgtagtgggctgtgattgtgccactgtacactccagcctggtgacaaagcaagaccctgtctctaaaaaaaaaaaaaaaaaggttcttatttttgtgacttggccagccttcaataatggagctcagtgatagcctagataacccaaacaaaataaagcaaacatcactttgaggtgcacctctgaatttgcatctgggcattactgatttgcagtactacctttgcattttataggctgtaaactaattgaatttgagattcctttcttggagtctcaactaaaaggcaggagaactcatattttcatatttgggagcacaggggtttggggaaacagtaggttctttttaaatgaatatccttggcagccatgccccccacaaatcctttttctgcttctctaggaaaggtgctggaaagcagccagcacataggaattaaaaagacaaccggcacagaagagaaatgtgtgctaaaaatactaaaaccaacaaggattcatcatctgaaagcaaaataggttttctgtgtgcccctgcttctggacttgctcacagtcgtgatggctctgtgttatttgggggtgacagtaattatggagctggagtgctcctcgacaaagacagacagagctcctcgcagagggatggtttccatggcaatagcatcagcatctgaatgacttcctgtcacaacaagttggtgatttaatgagttcattactgaattccaaaggaaaaccagagagtggatgagctactgttcagccctcaaagtggctaagtccatagtgagggagccatttctaccgggtgcagcatcagaaccattaacagctcagggccgttacaaaggcagcctgggtgctccagggcgggtgtgtgaagggaaggcgacccagactgtgaatctgcagccacgtggtctggcaaggcctcagtggctgttattccaagagtgtgaaagaatcatatgagtctccactagaagctttccctggttcaaacccaataaaattcatatcacaggagtttagctcagggcttcagatgcatactcccaagtaccccaagtcctttagaaaagacaccgagaaaaagaaacagaccttaaattcttattgtgtacagaggaaagggagaaagcatttcatcctactttctgttcttcagtattgtagagattgacacttatgtggaaccccaaaaaaaaaaaaaatcacctggatacttcagaaattggagatgtcattcatgtggcgaattgcatataaaatttaagctgagaggttatgtatcacaataagaatgtataataattgacctttcatgctttactatcttcactaattaaagtctaccatatggctggtagaacaatgtagccttaggctgatcaattaactagggaccagttagggacagaagtaagacagcggtcatgattctctgtgagtgtcttcctaataagaggtggaatggtattccactcctctcacgttcctttccccattagttcaataaatatttgatccctcaaagggtttacgatctaataatggggactgactacattcagaaggaagcctaaaacaggagaataatatgccactgtttactgatgtttcctgggtgctgccactgagccacatgctttacatacgttttctcacttaccctgtataaccccatgagatgagcattgctcccattttttatatgaggaaactgagccctggagaggctgtgtaagccagaggtgcccacagctgggaagtgcagagttaggactccaactcgagtctgactccttggtttgtgtcttgcgcactctgcccaaagagagatgcagactcggggccacaggcattcagcgggagaggccagagaggggcaagatggaacaaagaccttgtaaggggaagagatgcctcctccccttgctcccctacactaagcagagactccatatcaatacgcaaggcaggtggacaaggtctgtgcccagatataggaaacagagaaaacttggagaaagagaagtcacagagaactaaaaatatgcattttatcaaatattttaccagatcaactaataaaatggggaatttgactaatttggccatatatatattatgcttagaaaagcatacatagtaaaggttgtgagtatgagtgtgtgtgtatatgtgtatgcatgaacaagtgttgatcattttctcttttaataaaaataaggaaagcaactgcctgactgatgtgatacttgcaaagaacacatagttgcctcttatttttctatatgcaagtatacctactttccaaaacatctagcatattttcccaggatccctgagaggtgttgttctatccttgtctttctaacaatggggaagagagaagattgctagtattctctaagagtaccttcataagacgtggtcagcaacagaacttttaccaccccaatcctactcatttttggagattcctttaaaatataccactatttcattaatcatgtgtacaatttggacagtagaatttttaaaagaaaagctagtgtcatataaaacttagcaagctttaggctgggcacagtggctcatgcctgtaatctcagcactttgggaggccaagacaggaagatcgcttgaacctaggagttcaagaccagcctgggcaacatagtgagacagtgtctctacaaattttttttttttttaattagctgggtatggtagtgcacacctgtagtctcagctacttgggaggctgaggcgggaggatcacctgagtgcgggaggtcaaggctgcagtgagcagtggtcatgccactgcactccagtgtgggcaacagagtgagaccctgtctcaaaaaaaaaaaagcaagatttggccaggcgcggtggctcacacctgtagtcccagcactttgggaggccaaggcgggtggatcacttgaggtcaggaggtcaagaccagcctggccaacatagtgaaaccccgtctctactaaaaatacaaaaattagccaggtgtggtggcacacgcctatagtcccagctactagggaggctgaggcaggagaattgcttgagcctgggaggcggaggttgcagtgagcagagactatgccattgcaatccagcctgggtgacagagcgagactccatctcaaaaaaaaaagcaagatttaagtattgctttaatatgcatgggattatctagtcaggacttagcatgccacctcttagggctacaagatctgtgctaggcacactccacaggtgccactcgcctagactttgacatgaagggcaccctggagtagtacagcatggcagccctcacattttatttatttatttatttttatttttattttttatttatttatttatttgtttgtttttgagacagagtcttgatgttgcgcaggctggagtgcagtggcatgatctcggctcactgcaagctccgcctcctgggttcacaccattctcctgcctcagcctcccgagaagctgggactacaggggcccgccaccacgcccgactaattttttgtatttttagtagagacagggtttcaccgtgttagccaggatggtctcgatctcctaacctcgtgatctgcccgccacggcctcccatagtgctgggattacaggtgtgagccaccacacccagccggccctcacattttaaatgactcaccaaataatcagatatgtaatttgtttatttattcatttttttttgagacagagtctcgctctgtcgcccaggctggagtgcagtggcatgatcttggctcactgcaagctccgcctcccaggttcatgccattctcctgcctcagcctcccgagtagctgggactacaggcgcccgccaccacgcctggctaattttttgtgtttttagtagagacggggtttcaccgtgttagccaggatggtctcgatctcctgacctcgtgatccacctgcctcggccttccaaagtgccgggattacaggtgtgagccaccgtgcccggcccagatacgtaatttataatcattgaatcccagggtcggagtggagctaatgatcatgaaatccagcttcctctgtaggctatgctccccaaagtgtcccacccttgcttggatacctctggggttagggaactcactacttctaagggttggagggcagcttcccacaggcctcactggactgtgcttatacaggaaatatttagaaactagtcattcatatattgatcaggaaatatttagatattcctgaaataccattgatacgggaaatatttagcaactagtcattccttcttgtcccctaactgttggcttttttttttttttttagcgttacctcctacagggtttgcaaatgcagttttcacatgctgccgggtgtgaacagcatactgcttttgctctttggacgtcccttctcattaatacacatgtttggacatgaggatcaataaagtgttaataaactgacaaaaccacagctgaaataggacttcaccagtgtcacaagacagccagtgggccacccctccctgtcgcaccacggaggcagaagcagggcaggtctgcacacatatgcatttaagataaggcacaatagcagtgtgccaggctcctcagccccagaaaacagagaggttcttcagtctggatagagaagtggaaaatgctttcttttctttttttgttataactgctggtgccatgataatcctctgtcggcccggtggttatttggcacttcgatttcttactctttttcactgtgcaagtcactgaatgtaaaaggtgaataagacatgaggcacacagacaaatacctctgagaagggtaagtgctgtcatagatgtgtgttctgggagccaggggttcctagaaggagctgcaaacctggtggagagggaaggacagtctcagagcccttgggggagcttcctggaaagagctacagctgaggaaacacggaggaggaagaagagaggaattagccgggtgaagttaggggaggaaaagagagtattacagtaaaagcaggatgtgctgaagctgtttcagggaaggcaaagagttaagtatacctgcctaagggggtggggcggggaagcaccctggaggagagttacagggatgaaaaggaggttagagataggcaggggcctagtcctaggaagcttcaaatgccaggtgaataataagaatgcacacatcgagtacctactgcgtgccaggtcctgtgcaaaagttttacatgaatttttgctttaatccacctgcacattctcttggagctgggactggaccactctctgattctagatactttctagctaactatctaaagagctttattgtgatataaattcacataccatacaattcactcacttgaagtatgcaattcaaaggtttctagtatattcagagttgtgcaactatgaccataatcaatttagaaataattatcataaatgaaaaccctttggcagtcacccccattctctgaaagtccccacccaactctaggcaatcactaatctactttctgcccctgtagctttgcctacactggacatttcatatcaacaggattatataatatgtggtcctttgtgaccagcttcttcctcttggcgtaacattttcaaggttcatccatgttgtagcatgtatcaggacttcattcccttttattgccaaataatattccactgtatagatagaccacattgtattcacctgtttgtcagtggataaacatttcagttgtttccactttttggctattatgaataatgctgctttgaacttgtggatataagtttttgtatggacatgatttcatttttcttgagttaaatatttgagtcatatagtaaaccatatctttaactttttgaggaactgccaaaccatttcccaaagcaggtgaccactgtatttctaccagcagcgtatgaagcttctaatttctccattccttgccaacacttactgtcttttttttttttttttttttgagacgaagtcactctgtcacccaggctggagtgcagtggcacaatctcggctcactacaacctctgccttacaggttcaagcaattctcctgcctcagcctcctgagtagctgggattacaggcccacaccaccatgcctagttaatttttgtatttttagtagagacggggtttcaccatgttgtccaggctggtctcgaactcctgacctcaagtgatccgcccacctcagcctcccaaagtgctgggattacaggagtgagccaccatgcatggccattatctgtctttttgattatagtcatcctaatcgatatgaaaaggtatctcagtgtagttttgatttgcatttccctgataactaaaggtgtaaagtatgttttcatgtgcttattggctatttgtatatcttcttttaaaaatatctatttagatcctttgtctacttttcaactgggctgtctttttattattgagttctaagagttctttatgtagtctagatacaagttccttatcagatatatgatttgcaaagtttttttctattctgtgggttttcttttcactttacttttttttttttttttttttgagatagagtctctctctgtcacctagactagagtacagtgacgcgatctcagctcgctgcaacctctccctcctgagttcaagcaattctcctgcctcagcctcccgagtagttgggattactacacttggctaatttgtacttttagtggagacggggtttcatcatgttggcagattggttttgaactactgacctcagatgatccgcctgcctcagactcccaaagtgctgggattacaggcatgagccactgtgtccggcctcttttcttttttttggcagtatcctttgaagcacaaaagtttttgatcttgatgaaattcagtttatctatattttcttttgttgcttgtgcttttggtttagagaccgtatttttaaccaatacattatttgaacttgattctgtgagttatggaaagtgactgaaggacttaaagttgtagaatgacctaaaacttctcatttttaaaaatcaaactaatgcttatacatgtgtggcaggctaatgatgattcccaaagagatgttcatgttctaatccctagaacctgtgaatattatcttatttggaaaaaggctctttgcagatttaattaagaatctcgaaattagattatcctggattattcaggtgagccctacgtggcactaataaatccttataaaagaaaggtagagggagatttaacactcacagagaaggcagtgggaagacagaggcagagactacaatgatgaagccacaagtcaaggagtgctggcagccacccgaagctggaagagacagagaaccctagaggctctggagggaacatggccctgctcacactttgatttcagacttttggactccagaactgtaaaaaagtaatttcctgttgttttaagccgctaagtttatggtaattttttacagcagccataagaaactaatacagtatggtttttaaaaaaatcaaagtgaaagggttttaaatgaaaagataacatgctgctctgtgtgtgtgtgtgtgtgtgtgtgtgtgtgtgtgtgtgtgtgtagagacagggtcttcctacgtcacctcggctggtcttgaacacctgggctcaaacgatcctcctgcctcggcctcccaaagtgctggcattacaggcatgagccacagagccaggcctttaaaaaaagtcatatttgaacatcatctattttatttatttatttattttaagttccaggatacatgtgcaggatgtgcaggtttgttacgtaggtaaacatgtgccatggtggtttgctgcaccagtcaacctatcacctaggtattaagcccagcatgcattagctatttatcctgactctctctctctcccccaacccccacccacaaccggcctcttgtgtgtgatgttcccctccctgtgtccatgtgttctcattgttcagcagctctcacttatgagcaagaacatgcggtgtttggttttctgttcctgtgttagtttgctgaggattatggcttccagctccacccatgttcctgcaaaggacatgatctcattcgtttttacggctgcatagtattccatggtgtatatatatcacattttctttatccggtctatcattgatggtcatttgggttgattccatgtctttgctattgtgaatagtactgcagtgaacatacatgtggacatcatctattgacctttgactataaaagatggtagtttagggcaggcatggtggctcatgcctataatcccaatgcttttggacaccaagcctcaaggatcacttgagtccaggagttcaagaccagcctggacaacacagcaagaccccatctctacaaaaaaaaaaaaaataataataataataattatccaggtgcagtgttgcatacctgtagtcccagctactcaggaagctaaggcaggaggatcacttgagcccaggagctcaaggttacagtgagctatgatcatgcacgccactgcactccagcctgagcaacagagctagaccctgtctctaaaaaaaaaaaaaagatgatttattttacttagatgcctttgactactccctcccaatttttactcgtttttccattatctttagcttactgtcagttactattgcaactcaaaatactgtaatcatcaaatctaagatgccatctactataagatgcaccattattttctattccactaaggaaaaacagcactgccaattatacttctacagtatcatgaagagtaaggagcttcccagttcaaagacattacaggttgaaaaaaatggggccttagaaacagtgaaatacaaaaatatacaagaaatttttttcatgctccatcaacttcagacccccttgactcaccatgtcaaatgaagatataagtggcccagattttctccttactgctccatgtccctctctgaacttttgacaactatagctttacttttacattgttaatattaatatttatattgttttccactttggtgattgattctaaagccaaaacccaataactgacatttatattactatgattttgtaagcattgtttccttcagagccaggtagcgtactaggatgacatttccttcttatggattcatttctctctctatggaccgctatgctaatggacaaccctcagttcaaactggtcatttcataattggagtatttaaatgttgtttgtcaagtcttaggctaattataaaaagcaattagaccctaaaaactaaacatttatgatactggcatgtgtagcccctgctctttgacatcactctatctgtagaccttctcttcaattccttatcatctaaacctggagtcagcaaacttttttctgtaaagagccagataataaatatcttaggctttgcagaccatatggtccctgtaacaagtactcggctcttccattgtgtcacaaaagcagccacggacaatatggaaatgaatggacatggctgtgttccagtaaaactttatttacaaaaacaggcaaccagatttggccctgggtcttagtttcccagcccctgatatagaagaataaatcgtggccctcatatcttgggacactatgaatatttcaatttggaaggttttgaatactctaaattgaaatgactgtaacatgggccacacgggactgaaaaaacacttgaaaatctaaaattctttagatgtcattaatataggtcatcttccggccctaggaggaaacaagtctgctgaagttgcactcttagatgtttctccattccttgggcaaatcaagtaagacagaacagagaaacgtctttcatccaaccacacattttctgggtcaaaggtggcctttcaactccaaaaatagaactcttcccaacctccacttcctgctgacaagaagtgtgaactcttggatttctaactgtgaaaggatgcaattcatggaacttttttcctaaccaccaaaatgaaatcctgggtaataaagcttaaaaggaatcagtaacaatttttggaatgttgccaatgtttaaggatatcgaatggaaaattctacagccgtgacccagatccgattctaagaaataatttcaaactttaaaatgaaaaatataatgcataatattttcttattcatactatcattaatttcccagcttaaatctaattctgggaaactaattaattggcgttgtctttagaattatccacttgaaaacttaggaatttaagccagcacataagatctataactcatataagccaaacagccatatttatgattcgttttaatatctaaaccagtaagaacccactaattcggccatgataataaaagttagtttcgggtttaaaatgacctgatacaatagaatcttcttttagttttccctcttcaagatatgacttgtgatttaatataggtttccttttttagacctagaaaataatagaattagagtctgtatcctggggccaggcacagtggctcatgcctgcaatcccagcactttgggaggccgaggtggatggatcacttgaggtcaggagttcgagaccagcctggccaacatggtgaaaccctgtctctactaaaaatacaaagattagccaggtgtgatggcttgcacctgtaaatcccagctactccgggaggctgaggcaggagaatctcttgaacccaggaggcggaggttgcagtgagccaagatcatatcactgcactccagcctgggcaacagagcaagactccatctcaaaaagaaaaacaaaaaacaaaaaaaagagtctgtatcctgggagacccataactcttgtctgtctgcactcttccagtctgcagctatgcgctgcctctcatggctttgagtacaaacactctctgcaggaatagagttaagcttaaaaaagaaatttgcccttctccctcaagttactacagtcttatttctgcaggtaaaacaccctgagatcctcaaagatattatctaaacgctattgagttttgtataaatattctataagtacgatttttgttttgttttgttttgttttgttgagatggagtcttgctctgtcccccagactggagtgcagtggcacaatcttggctcactgcaagctccgcttcctgggttcaagcgattctcctgcctcagcctcctgagtagctgggattacaggtgcccaccaccacacccagctaattttttgtgtgtgtttttagtagagatggggtttcaccatgttggccaggctggtcttgaactcctgaccttgtgatccgtccaccttggcctcccaaagtgctgggattataggcgtgagccaccgcgcccggccacaagtacaatgtattgtttctctcttcaaatgtattgaatctctcttcaaagagattgaagcctatgtttcaaaaagtgtgtttttaattattattacatggtttacgttgcaagtgctatgtactaggtcataaagtgaaaatttaatctgcaattatacttaagtgagcaaaagatgttgcattttcagttttatgctttaaaatattttcacataagctaaaagtttggcctcattttcccaaagtatgccattcacttctaacggtttacagattaaacttttaatttaattaagactgaaaaagaacctctaatagaaataacatacatgcttgatttggtggaaaactgtccttaaatttaatattctcaggtccacaccaaatgtcttgtattactttgcaaggattgacttctcacaactggccactagatatatctgtatggacttagccgaatgattttcatttttctaaagaacaaaacgtttgtgtgttaactttccattctctatacgtagttgggcacacagattgactaaaatggcacctcttgttccctgttgactgaagcacagcagctgggggtttttaagatttatttaactgtactttgctcactcaattccattccttcttgtggccctccagctggtctcatatctacggggtgtaaagagaaaaagggggggatttcttcagtaatggaagcacacatcccaaaaacaaggaattaatattagccccagcatttgtcagagaaacatcagcagaagcttccgccgcactcttcagctgttttttgtacttcgccctttgcaacagattattataggactcactgataagcctctagatctcatacccattaaggatttaaactttccaaataaaacattcctccttgagaaatagaatctttgctgtgtgtctatatgtgccctcattaccttgcttaggggtgttcttcttttaaaatatatttttccagctgggcgcagtggctcatacctgtaaacccaacactttatgaagctgagatgggagaatcacttgaggccaggacttcaagaccagcctgggcaacatagcaagaccttatctctataaaaataaaaaattaaaaaattaggtgggtatggtggcacatgcctgtagttccagatactcaggaggatgaggcaggagaatcacttgagcccagaaattcaatgctgcagtgagctatgatcacaccacggcactccagccttggtgacagagagagaccccatctctaaattaattaattaattttaaaaatgtaataaaagtaattattgcatatggatggggaaatgttggaaaactttaaaaaattactttataaagaaaaaatttaagtcagctataattttgccgtgcagaaattactattactatcctatttaagtagctatgaagtcatgatagaaagcaggtttcacaagttgattttctcatttaatatactacaagtaatttcctattaacagaaaactttatgcagtcatttaaaaatttttgtttattgggcattttgataatttcccatttttaattttaatttatgctatgatgagcatctttataataaatatttgtaacacttcatatttttttagggtaacttcaaatagggtacgggcaaagaagaaagtgtgtgttatccaatggaagagcaagtatgaaagccaggagggagcagagagctcagcacatggtggaactgaaaacagtggagtagggctggagcctggagagctgggaaggagcaggaggcctgggagctggagaggtcagcggatcacagagacacccagaggagcttggtctttttcgtgagagaattgaggagctaaaagagagtttcaagcaggaaatcagatttatggcttagagacgtgtgctttagtaagatcattctggttgcagcttgaagagtgggtggcaggcagcagctgttaaaatgcttcaggtgagatctgatgagtctgagtagtgaagtgtagtaagggaggaaagaagagaaggtgggtttgaaacaggttttggaggtaaaatcttcaggatttggtgatggattgctgtggagtgggaaggaggtgacatcatggagggccctcaggcttctggcttgggtgatgggtggccatgaacccagctgtctcttatccaagggcaaatatctaagaggcagctgaatataaggtttggaattaaaatgggctagaggtatagatttgggagttatcagcatatggaattacctgagtatcaatttacaaaataaagtttcattttgccatagatctaaaaaatatatagagaagtcctgcgaatggaagaagagggtagaggagacaaaaggaatggtaaaagagtaggaagaccagaacacgctgtgccttgaaagccatgtgagagagtgtcataaagccatcatgatcttattcaatagttggcagaaaaccaactattgacagaattcaatgatttgaaaaacccagggaagtaagatgggatgatcaagtctgacttcttgaagaggacctgctgtcattcattttgtaaccaccaaacaaaataaccttagtgtagataaagccaaatagagttgttttgcaccaaacaatgggagtggagggcctcagccctgctgtggtaaaatgagcatatcagcctcgtgcactcgtttggtttttttttttttttttttgagacggagtctcactctgtcgcccaggctggagtgcagtggcaatctcggcttactccaagctccacctcccaggttcacgccattctcctgcctcagcctcccgagtagctgggactacaggcgccgccaccacgcccggctaattttttgtatttttagtagagacggggtttcaccttgttagccaggatggtctcgatctcctgacctcatgatccacccacctcagcctcccaaagtgctgggattacaggcatgagccactgtgtccggccccttcttctacttttaatattcgcccgactaagggcacctcttttaaggccgtgggtcaccatgagacgttgacactacactgtttattctgctacaaagaatattttaatttctgaattggtgtcattgagtaagcctgcttgaggcggcagatataaacttgtgtagaagttcaaaagaaagcagatcatttctggttgaaaggtaaaagaaaggtgcaaatcagaaaataattcacagagggggctgtttttatccttccttggtctgatacttgttttaaagaactgacttctcaccgcttaaattggaaattgtcagctgaattctcagcagccacattggagccagggatggcacagtgcaggaccttgagaatgtccttatcctgtagcacaaaggattagctgccacttcccaacagattggctacttggtcatggtggtttgcagccagatgatgatgtagccattaagagtgagtgccattgtatgattcctgatactagtgttgagacatgaaattttcctgctctgtaagcaaacaatattgaacataaaaagtgacacataatactctagaagcttaaatgttgtcccaatcacttttctctacatttcagcatgattgcctgtatatattttgaatgcacttccccatgctgatcatgctttcaggtgttagaataatctagccaagccttcactgaatgcttctccgctatccatcattatgcatgcacatggccatttttgtttgatgcacacaaaaggttaatgccttgagccaggtttagaaaattggggattaatgtctgaatgcagagctgatgccattttttcaggaaaagcaatggcctttatagaatctttttccaacaacattcttatttgccttccatcaagttttatttggtattgcagagtaagcttactatataaatcagaactctttctgatgaagtgaccaatttaatcccaaaattgaatgtcctagaaggaactcagagagttgcaggaccctggggactttaagcactagaaccaaggacgtgatcaccatcaagatccttttcttctcctcccaacccagctctctttctccactcctctcagtctctgtgtgctggcctcattttttccgacagtaggcttctacacaggggaaaccttggtcacaggcagctccagacttccattatgtcagcttagcatcctgaaagaaagagaaagcctatctgacttcaaaatatatgaatcccaacggaagtctctgattggcccaatttggttctcatgccctgtacccaggccaaggcatggaggagagggagcaggtcctgggattggtagatcacatgcccatcctcaaggctggggagtgtcggcctatgctgggcagcaccaccctgggttgcagtgagggaggatcagttctccaaagggagtgaggacagagaactaaaagaagggagcagacagaaaccaatgtcaattatactcaatggtgagttgcagtgagggaggatcagttctccaaagggagtgaggacagagaactaaaagaagggagcagacagaaaccaatgtcaattatactcaatggtgagatactcttttattaaaaaaaaaaaattatttttagcaacagggtctcactctgttgcccaggctggggtgcagtggcatcatcatagctcactacaacctcaaactcctaggctcaaaagatcctcccgcctcagcctcccaagtagctgggactacaggcatgcaccaccacacctggctgatttttgcatttcatatagtgatggggtttcaccatgtagcccaggctgatctcaaactcctggactcaagtgatcctcccacctcggcctcccaaagtgcagggattacaggcgtgagctactgcactaagcctttcttttgtcttgaatgatgtctttcattcttgtcccagagtgtcctgatgcaccacaatgaaattattatattcttggaattagactagcacttagtctgtaattttttctcttctcatcatgtaattttaaaatatttccctatgttctacattacagcatttgttgagatgcaattattatagttttaaagggctttcacgtacattatctcatttaattctcaaaatcttctaagccatttttaaatgtattaagcctattttatagatggacaaaaaggcttagagaggttctgtgattttcccaagaccacagacagagtgtaatggagcggctcgatgaacacagatcgggctccttgcctgtccttggtgtcacatgccttagataactgtcacctatgttttttaatttatatttgtctcattgtccctggagaactgagactctgccatctacttttaccacagagctccacgaaacctcctctagtgctgtataccttgtgaatgctgaataggtgatgcagactggtaatgaaccaaggagtttaaaacgctattgttcaagtggagatacagctgggagcctttgaggttgtggagcccaggtacagtgggaagactgcctggctccccgtgtttgtttacgcgttgggagtcagcacggggcctcccccacggtgaggagcgctgtccctggagagcctcttggaaggcagccatgatcgtggagaggagtgttcatgtctcatccgggaaatctctcaccgcctgtgccccttccctgtcttctctcagacagcccatagaaacacattagcatcctgggcctgatgccattccttaagcaaaaggcacctgcccacccacatatgtccatgtgagtctcacccacctgaaagcagcaccccctgagcccatcctggccacatccacaaagcacacccagcagctcattgcccctgcattagagacacacacacacacgattatagagtttacccctgtggaaagtgttttcagatgaaacagaaaagggtctagcatcccttactctgtattcttcttaagggagaaacttacaactgcaaaacaggtcctgccctccccacccgccccttttctggtgggtttcttccctcctctctgtccaggcagctcacgtctctggagggacacctcacctgcttcctgctatagcctctgctatgttctgtgatgccttctgagaccctgccagactacctggggcagcttgtctcatgatcctcctgctcaattcacagctccctgttcaagtacaagctagttaacaacagacacagattcagatccaagtgaggggtgggttgggctgtgtgtgtgtgtgcacgcgcacatgcagaattttgatactgctcctgcacattgcatgtaatgatgtgcaacacttgttcttctcacttaggagtcccaccatctaatgcctacaggaagtaaaccagaagtctcatccgaggacaccatctaccgatctatgtcagtttcctattgccgctgtaacaaattaccacagatttggtggctttaaaccacagacatgtttttttctcacagttattaaggccagcagtccacattcatttcactgggccagaacgagggcgttgggcagggcctgttccctctggaggctctcagggagaatccactcctccacccctccggcctctgggagctgccggcactccttggtttgtgactgcttcaccctgatctgtgcctccaggatcacactgcctcctcctcctcctcctgtctgtgtcagatctccctctgcctctcttttaaaagaatacttgtgattgtatctagggtccacctggataatccaggataatctccccatctcagcagccttacataatcccatctgcaggcctttttgccacgtacggtaacattcacaggttccagggattaggatgtggatatttgggggtgggagggcatattcagcatcacacactacccttcccagtaattcccccgacacacatacacacacacacacatacgcacacacacatatacacacccctaagttctactcaagagctggctctgcttctttcaacttcccagttctgaggagccagcttcccagctctgccatgcacttcctacccatctcaccctctcccacctgcaaagcagtaattcctcagtgccttgctaccagctctccaaagggcagaggaggctagacatcgcctctgatcaaggtactggataccttcttccccaaaaccactggcccagtggggcagaagagggcaagccttaagtggggtagaacccaaatgggccaattttaccaccataagaatcaagtcagccgggcgcagtggctcacgcctgtaatcccagcactttgggaggctgaggtatgtggatcacaaggtcaggagttcgagaccagcctggccaacatggtgaaaccctgtctgtaagaaaaatacaaaaattagccaggcctggtggcgggcgcctgtaattccagctactcaggaggctgaggcaggagaattgcttgaacccgagaggcagagattgcaatgagccaagatcgtgccactgcagtctagcctgggcgacagagcaagactctgcctcaaaaaaaaaaaaaaaagttgttttgcttttatgtagcttttattgttttgttttatttttatagagtctctctttgttgcccaggctggaatgcagtagcacagtcacagctcactacagacttgatctcctgggcttaagcagtcctcccacctcagcctcctgagtagctgggactacaggcacataccaccatacccagctatttttttttatcttatttttagtatagacggggtctcactatgttgcccaggccggtctgaaactcctgggctcaagcgatcctcccatctcagccttccaaagtgctaggattataggtgtgagccaccaaacctggctacttttatgtagctttgacaagcgcaggaaatgtcttgcttctgcccctctgtcaggatatctctagaatttaaagttagtgagaacagaaagcacatccttggcttacagtccacagggcctggcagtgcctcaacaggctggacactccttggacagccacatggactcctccttactgtggttagctgccatcaaccagtcctctcgccagcatgcagggtgggtttggcagcgccaggcacagcttcacatgccttccttgttcttctgaagtcccctctctggatggtgaccttgttcatgtggccatttttaaagcagaaagttggatcccaggccaaatcctgccttgcagttccgagaggcatgtgctgtcccccttcactggtgatggcgggccggggaaagaccccactgtggtcttacgaaaagtgtttgtagagaaaccaagcagcactgtatgggatggctgataattgctgctcttggtgttagttcctatctgcttaggcagaaggttgggactggggaggaggaatgttagtggagattttatgtaactgtaaacttcctctctactgtaagaaggattctcttgaaagaaaatgaaaaacagttccagatggtccatggaagatgtttcatggttggaaacctattctacctccttgtcaagaataactatgccttggctgggcacggtagctcacgcctctagtcccagcactttgggaagctgaagcgggagaactgctggagctcaggaggtcggggctgcagtgagccatgattgtgcacctgcaccccagcctgggcaacacagcaagattctgtctcaaaaaataataactataccttgaaaataggggtccatacttaccagcccacaaaaaaaaaaaaaagaaggctttatgaagaggaagtaccaagatctagataaagagtctctagctcctttcagttatccgggtaagatgttcactttgtatttaggtattaatcttaggcacagacaccatctaggagtctgtagtgccacattttcatacatatatgcacacttgaagattttttcaaactcataactgacaaaggactttatttgaatagatatttgatacgttaaaatagaagacttagaggctattgaagggcaaataatttgatgtaatctaagaaatatattggagggaaaggaagagagggagttcttgttgagttcggaacaatatagagctgatatttacagaggagctattatgtgctgagccagaagtggggataaaacagtgaacagaacccagaccctgcccagggtttacaatctggtgggggaaccagatgagtagacgggattacaatgcaatgtgttaagtacattaataggggatatacgtcaaaggggcagttaaacctttcttggaagatcggaaaggctcctaaaagtgatgccaatattgaggaaaaaatgacaaatagaagttgatctggaaaagagaccaagagtcttccaggtggggaatagcgtgtgcaaaagcctaaaggcaaaaccatcgtggcaaacaggtgtatgagggtgaactaggagacaaatagctgaatgacctagcgagaagggcaggtaggtggggagttgggaggtccagtttctcctcgggctgagtgaccctgcctctcctccatgttagctattgtcactgaaggtagcgccagggagcccagcaagctgcccagttctctctactttcttctgtggcatctgagactccaggatgggctccaattagaaactgcagggagggccgctgcagtgtctctcggccccagaactgatatttctggggcagagagagttgggtcctgaaagttgaaataaatgttcctttctagcagggttctgatcgcttctcggccttttggctaagatcaagtctagcagggttctggaactgtccccagcgaggagcaggttatcagatgcacaactctgatgtcacaccttattatatcccaagaaaaaaaaaagttcttggttattacctgaaaaaaaaaaaacccaaggaattttagaaatcacttgataagaaatgtcaagacatactgactagaaatcaaaccacagcagctgcttcccacagctgcatgccatgtggcgacctcatttgaacagttagtgaggcttaaaatagccaggaatgtaaaactcttcaggatcaggtctctcagtgagatagccacagaaatccacgtggggaaggagagaggggaggtttgtcttgaaaccgttggagcagtggtcagaggactatcaactgacagccaaataaatcctaccaggagcctgtagttccccactcctatgaatgattgaagctaatggtgcccatttgacagatggtaagaaaagtatgttggcccctgaatgcttgcagattgagaattcctaattcagctataatccaaatacagttgacttcctaaggaaaacaaaagtaacgagatgtaggctaggtgtggtggctcatgcctataatcctagcactttgggaggccagtgcaggaggactgcttgagcccaggagtttaagaccaacctgggcaacatagcgagaccttatctctactaaaaattaaaagaattagtcaaggccaggcgcagtggctcacgattgtaatcccagcactttgggaggccaaggtgggtgaatcacaaggtcaggagttcaagaccagcctaaccaacatggtgaaaccccatctctactaaaaatacaaaaatcagccaggcatggtggtgggcacctgtaatcccagctactcaggaggctgaggcaggagaatcgcttgaacccagaggcggaggttgcagtgagccgagatcatgccactgcactccagcctgagcaaaagagcgagactgtctcaaaaaaaaaaaaaaaaaaagaattaatcaggcatgatggcacccacctgtgtggtcccagctactctggaggctgacacaggaggattgcttgaacccagaagtttgaggctgcagtgagctatgatggtgccaccgcactccagcctgggtgacagagcgtgaccctgtccaaagaaaaaaaaagaaaaagtaatgaaatgtaagttcattttttccatcctacgcctgagcttgttagcgcagagagtgttttagttgtgaaactaagactgagactgagactttctcaccaatagagggaagagtgagttgacgtcggaaggaagcatgctccaccaaagacaaaagcaaaatgatgctttttttactgtgggaaattcaaaacgatgcatatattcattcagccccagagaaaacagatatgctttcccaaacatagaaaagcaccaacaacttttttattccatttttcttgtaagaaaactagtttaccctggttgtagcagctctgtggcaatcataatagcagcagcacatgctgattacgcacggcactgtgctccaggcactgtgctgagagaactctttgccatggatcattatcttttgatcttcacaaagtctgtatgaaaataatactatcgtcatccccatttcatggctgaggaaactgaggcttggagaggttaagaagtttgccccacggcttactggttgttgggagaagatgggatttgccccgaccactctcactccagggttggcactcttttttttttttttttttttttgagacagggtctttttctgttgcccaggctggagtgcagtggtacaatcaccgttcactgcagcctcaacttcccaggctcagggactcagcctcctaagtagctgggactataagtgcacaccaccatgcctgggtaatcttttgtagagatagggtttctccatgttgcccaggctaggactggcactcgattgtaaagctcctcgggcactgttttgtcatgagactgaatggaatgatttttgtagtcttctaagtctcctgtggagagcttttctgtttctcatttgcatcatgctctttcgctattcgtgacatttcgcacttctgccctttccttttctctcatggactcgatgaatgaacactgaatcggaaatgtgaagcccaaggtgagagtttcacttccacccctaagtgctcttgacaattcataacctctttgggcctggtttcttgtctgtaaaaggaagttgggtcagagccaaagcccacccctgtgctaaatacctttcttctctttcccctcccccacctgccttcccatctcttttcccttccttctcttgctgtccactggcaagccctgagtcctacctgatcctctttcctcccatgtggtaggcaggcaaaggcagtggcgttagttgcactgctgtctaagaggcatggggggccaggcgtggttgctcacgcctgtaatcccagcactttgggaggccaaggtgggcagatcacaaggtcaggagatcgagaccatcctggctaacatggtgaaaccccgtctctactaaaatacaaaaaactagccgggcatggtggcaggcacctgtagtcccagctactcgggaggctgaggcaggagaatggcgtgaacccaggaggcggagcttgcagtgagccgagatcgcaccactgcactccagcctgggcgacagagcgagactccatctcaaaaaaaaaaaaaaagacatgggggacactaagactgaggagcctgacagccacatgatgctcctaatggagtccacaggcagcactggccctcctcagtgggtaatgagcaaaagctggctgtgtgactcctctaccccactcgtttttccgtgttcttcatgtcattagggtcctcatactgccccttagctcaccctcctgctttgtgccaggccatcctagcctcctccagtccctccccaccttagcatcacctctcagtgctctgtgcctcatcccctgggaactctgctgtctatttaggaaacagtgcatcatgtcttcctaatatgttcactatgcatcccttccagccactataatgctttaactcattgtaagtcagcagctagaacttaaggccttcaagaaactagagtagtttgggacaaaattctttcattctgaccaccaatgggggacccatttttggtgaaaaggctttcattataaccctgaactctgtggtttcaactcagcattaggccacagcatcaggcctttagtggtgagatggaagcagggatagcaaattatgtcataatccatgaagagaatttatttcatacctctatcatttttagttaatgttttgcttgattaattttaattatttgctcctagaggatatgtaaattttattcgacctgaatatttggaatatttcagagaaactgagttttgcttttttttttttttttttttttttgagacagagtctcactctgtcgcccaggctggagtgcaatggcatgatctcagcccactgcaacttctgcccgctgggttcaagcaattctcctgcctcagcctcctgagtagctgggattacaggcgcctgccactgcacctggctaatttttgtatttttggtagagacagggtttcaccatcttggccaggctggtcttgaacttctgacttcatgattcccccacctcggcctcccaaagtgcggggattacaggcgtgagccaccgcgcctggcctaatttttttatttttagtagagaagagttttcaccatgttagtcaggctggtcttgaactcctgacttcatgatctgcctgccttggcctcccaaagtgctgagattatgggcgtgcgccaccgcacctggccctgagatttatttatttaatccaggttggctggctagggttctatggaccaagaagtactcaccacccacatctcagcaaattaatgttttcccgaaacattttaaattattgatcatgaatttcactagcatctatatttaaatattccttgacgctatggctactaaacacaggagcaatttgtatgaggaactgaaaattcctccttaacctcctcactgttcttttcagtttgttcctgattatgcgggaatttacaggccttcatcacatgaagtctgcctctacagaaagactgctttactcttcactatcatagcactcatgagtgctatgagagacaatatgcgttttttgagccttctcttccctattttaggtgtgtttctaaggagtaggttggttgtcatggttcaggatggaagaatactggagtaggcagcggagggaggcaggccatctggccctgagggaggggtctttaggaaatcagtagacagcctgctggccagaagattttagatgtgttcttgcttaaagctgaactcaaggtcggatcttttctcaaggcccagttctagacttctaaccttccaaactgaggtctgatcttttgggtaagccaatggaaacattgtgtgttatctctagattttgctgaacaaaggggcgcgattccccgccctatgttctcagcagctgagtcctaccattccctgattgatttccaccccctgccattcccaataccgcctgcaaagaagatgaactttgtcagtcacctttgaatatggtgcagtttgaattctggaatgcaggaataacagcagttcacgcgtattatttttattcatcatttttctgtcagtggctgtgtcaaggccctgggataccacagtggcttctaggataaccaaagaacacatatgactcttaggatggacgtagcatcatgtctagatgaacagaagagtggttaggaaatggcactccagtcagacccatgacctgtatcgggggagccccacagcagcgcgagcagggcagtcgggaggcagctccctgccagcccacaccaacctgtcacacgcctattattcatcgacatgcctctctattataatctcacaaagcatggtgctccagacccaggacagatatgtcataaaggtgggactttgcctgatggataaaaagacctatgttcctgcccccgttttgctattcgctgagttttcaaaacctccccagccacaccccttggctctttgtgtgacttcatagcaaggcattcgtgctaacaggatgtttctgggcccagtcgctattgctttccggaggctgacctcgggaagtcctctgtgtggactttgtgcacagcggcagggtccatcaccctcagctagtgtgcggcaggtcccggggctcagcagttacagggatggttcagaccggtttccaccctcacagagtacagtctcatgagcctttccctgttcgtgctgaaatacagtttaagagatgataccatgagtttgggctttgaataagaaaaagaaaaaggtgcacagattgattttctttttctggagcaggaatctgagcaggaaaagtgtcacgtaaagcaaactgctgcagtatggctcctgtgggcctgagtcttcagggtttccactaatcctatttcacatggctgcgggggtagccctttctcctcccttcttaactatttctggctaagacatcgccctggtttttttttaaaaaaaaaaaaaagcctgctgtttacccacatctccattgttcaatgtttttgtcttatattcttaatgtttttgtcttatattgatcctgtacccttagctgacccaagtccccatccccttccttttcagcaacgcagtgagctcatcaatatgccagcagatgatctaagccccaaatcatcaccttctcgggaaagacagacaaacaaaaacagccggaaggagggcgggcaggcgggctgggaggggctgtcggcggcgaggcggagaagcgcggccggccggggctgcggggggctgcaaggagggcgtgtgcgctggcgctcgggctcgggcagcggcttcgtttcagccgcgggcgctggggccggcgttgccttggcgaccgcgtcgcgctcgaagccgcagcctccgcccccgccgccgccgccagagcccacccggcgggtgcagattccctttgtctcctccgcctcccctcctccctgcttccctgcgtcctccccctcccgcctttcctttgtcgccccggattccccggcagccgcccttcctgcgctccgctcccgctgcaggtgcccggggccgcgaggacaggcctcgccgccacccccacccggcctgcccagtgcctggcatgaaaccagtgtttccaaaagcggtgccgggctgaagcgccgcacaggaacttgcttccctcacctgggcggcctcgctggcctctagccggcctgtaccgcgcatagcagagctaggagacatgacagccgccccctttaaggacccaagagattccccacggacctcttccccttccttccgtttgagagggagcggtgtcacttggtgagagggaggagacgggaggaaaaggaggtgagactcgacgtccagtgccctcttggcctggcttgctcggccttccctgcagcgaggcggggcgcacatcccctacccgggccgcagagaacctgtcggccgccgagttctgcagctcgatggcattgcgaggccgaaagcagaatttccaggacctctgagagttgaagtcgttattcggggggaggggattctgtgagcaaaatgtgctgctgttagcattcacggtcacctggtgatgaagagtgctggggatttggccacagtaatggccctaacccagaaccctctttgtcctggagcaacatagcagctctagtggcagtggcgtcaaacatcagattggctcatattctagccgataccctcttagtgtgtgccagtcttagtgttgactgatacaccctaagtgggactgtggttgctcatgaggagggaaaccgaggccaggtgataggggtggaaggaaacacgctttccctctaaatgctttgggacctgtgaatatcataccatgtgcatttcttattcactctttaaaatcaaatgtttttaatatcacttcttcaagaaagtgttcactgactcccccgagagtaaataagatagattaggtttcccgtcacgattccattgcagtctgtacttttaccgcgagagctcttcgcagaattatgaataaacagtaatgagtgtgcaactcatgtttacaagagtcttccacaccaggctctgagctccatgagggcaggagcaagacctggcttatgcatcactgttccacaagggctgacacacaggctttagccaatgtttgttgacgaaagaaatgagaaggggacaagaaagagggtgatggcggagtggtggaccaggtgctgtccagagggtgatgacagagtggcaggccaggtgctgtccagagggtgatggcagagtggcaggccaggtgctgtccagagggtgatggcagagtggcgggccaggtgctgtccagagggtgatggcagagtggcgggccaggtgctgtccagagggtgatggcagagtggcgggccaggtgctgtccagagggagagccggggtggcaggaggggtgcccatctccacatcctcctctgagctctgtgacccttgggggctcagccgctccttcacaggcacttctagaatgttgttccaaatcattcttgtaattcttctttctagtatatgtttaaaaattgtcataataaaaagtgtgataaatcaattaaattgtatgtaaggggaatcctatcatgtgctaggccagttcccaggcagctaattggagcatttatctgaagcaaagcggggccagctcttcttccggtcgttcccagggagggtgatgcttaaacggtttaaagcggtggtgcacaggaaaatcacccagggagctttaacaacgcgacattcaggggtccacaggcagaccaattgaagcagagtctctggggttggagcctgaccactgctagggccagtatttttcataagcttaacgtgcaatcaaggttgagaatctttgctctatgggctcccagagacagacaagaggaagtggggacacactcaccaaacccaaagattccatttcagctgtaaagctgacactgatacacttgaggctagacaaagaggctgtttgcttcagcccacttcagattgtttcagtactgctcatatgacttctctttgccttaaaatgcctccggatcccatcctgtgacagtcatttaaaacaaatgtgtaactgcctaatcagggcacaaaccatttttcagatttgcctgggcagcagtgacctaaatattacccagggtgtctgacttccagctccagaggaagaatgtatttggtttgattgttttcatgccaataaagttgggccagtaattcaaggtccccattgggatagctgaatccttcgatgctataaattagttctttagaaagcagtggtgtcgtttttattgaattgttcaccttccaatggaatcactatgcacccacgctaatttgttgtgccattgttaatggatataagataaaaggagcaggaactggagaggatggtggaagtggcccagcccatttacaccagccaggtatgtggagtaaatcttgggaaaatgtgtctatttaatccacttacaagccaaatggtgtagcaagtagcagcagatccattctgctctctctctcccaggtaacaatgcaggcagtaaataaggcctgtattagaagccactaaagctgtaaacacacacagcagggaaatttgcctaaactgcccactgaggtatcagatgcaattggccttctattggaagtgtgtctgcgctcaagggcaagccaaatttggcaagaagccatgtggagacacttcacatttaaatcttctacgagactgggggcagggagacaaaggttcctctggggctctcaaatccaattggtgattccagagaaaatggggactcttcatggcaggcaggaaaaggggaaatgtggcctgagagaacccacactttcccagccagcaagctccagcctggatcaaaacaacccatttctgggaacttaaaataaaaaataagagagcagtcaaatgaacttgagacccccacagggcctttcatgtgtctaccagcagcagcatggtgagtggtttctgtgatgtgggattccagggcaagaggcactggaccatggccactggttcatctctcattataggccagaaatagatgccccatcccaggaaaagggaaataaggctgcatggaatgtttcatctgttggaatattgttctgctctgcctgacaagattactgagttctcagttctgtagcaatggcattgagtaagagtctgaaaattgatgcattatgtactcgcttaaaatagcaaatgcagaatagaaaaagcaaagctgctaggaagtgtgcagaacatattgatagaaaggcctgctttgcctctgtcattaccagcatgaaagtgtgtatcggagcagggggtagactttccatcagaagcatctgagcagtggaggctcttttaccgcaatgagacaagggtacatttttttagctgacataagtgagtgtaaatctttctgttctcaaacaggtggtagaaagtgggcaatttgtttcttttcatctccgtgttctgggcttggtttatgagatagctgcctctgttttaacttctttgaattcccctcagaacaaaaatcccccaccacctgctacttaatcaaatattcttcactgtggattatagttgcctggatgggagcaaggttcagtgacagtgtgatggaaaatatccaaaaagaactatgtcgtcagccccaagaagaaagcattatcctttgtccttaaaaatgggatttaaggctgggcacagtggctcacacctgtaataccaacactttgggaggctgaggcaagaggattgcttgagcctaggagtttaagacaagcctgggcaacaaagcgagaccctgtctctacaaaaaatcaaaaaattagccgggcatggaggcacatacttgtggtcccagctatataggaggctaaggcaggaagatgacttcaccaggaggtgaagactgcagtaggccatggctgggggactgggcgagactctatgtcaaagaaaagacaggaggagggaatttaaaaatactgaataacaagttaaaaagtccttctggaatcgacaagcctttttgccctggaaggtggcatagttgcttcttaggggaatatccgtggtcagggacagaggccttgagaggctgggcaaaggtcctttcagccctggtttcattcgtctaaccagcattccactctaacagcctcctccattcaagcgcttactccattaacaaacattaatggggcacttactcgatgccaggcatggcactagccactgtgcatatattttctcctttaactctctagaaaaaagaacattatccctgttcattatcccagttaaggaaactgagtttaaaaggattaagtaactgcccagagccagacagctagatttgaaccctaaactattgattccaaaccttgtattcttcccactatgcctccattgtctcctcttttgattaagcaacattcctagaaatacagggaacctggaaggcccctgtccgcatctctttcctgctgctgctgccagctggaatgtctgactcccggatgtgttataactaaacttctaaaagaacgatcagtatctgagaaaaatcccttttttcaagctcagcaagcaatgtgatgtactaacagcccctcatcgtgattcaaactaactataatttacccattgttgttggacattgactagtttccaaatttttataggtcaccacgattttggagagtgtgacctgctatttgcaaagcaaggattagactttccctcctttcccctttataatttgcactattgcttctaagaatagtgttttttaaagtttggacattttcagataaagattgctggaaataatagtgtgaaaaatattttttaaataaaagactaacattgaataaaaagatagaaatcttgggcatccgcggtggcttacacctgtaatcccagcacttcgggaagccagtgtggaaggatggcttgagcccaggagttcaagaccagccagggcaacataggaaaaccctgtctctacgattttttttttttttttttttttttttttttgagacaaagtcttgctctgtcgcccaggctggagtgcagtggcacaatctcagctgactacaatctctacctgtggatttaagcagctccctgcctcagcctcccgagtaactaggattacaggcacatgccactatgcctggccaatttttgtatttttagtagagacggagtttcactatcttggccaggctggtcttgaactcctgacctcatgatctacccgcctcaacctcccaaagtgctgggattacagacatgagccaccatgcccggccaaaaaaatttttttaattagcatggtggtgtatgcctgtagtcccagaaggctgcagtgagccatgctcacaccctatactccagcctgggcaacagagcaagatcctgtctacaaaaaaaaaaaaaagaaagaaagaaatcttaaggcgtttggggtgggtgagaatgacagccaggttgctgagacacagctgtgcgggcaggcttaccatttcaactctaaattttcaaattctagactttatttgctgtcacttaatatagcacagcatcactgtaatattgtaagtgctgattttataatagaattttcttacaaaaataggttttgtgaaacaattttgatacatgataaactgttttgacatatgatctaccttgctggattacatctattcctttaagggagagagagcactgagccctgtgtactcctgggtctacatggtatatagtgaaaccctttgcatccttttccagaggaagtcaaactcaacactgtccaaaaaacaaactcattctctctttccacctccttctccatcacatgagctcaaaacctgaagacatggtagagtctccctcttatcacccacattcagccagtcgccacgttctcactcctaagcgtctctccagcgggaccccactcttgccctctcatgatcacagctctttctgccttgacttacagtttcctaattggtcatcctacctcaaaatgcccccatcagtcaacagtctatctgccatacctcctagtttatctctatcaatttcatgtattggctctttattaagcacctactgtataccacaccctcttttaggtacgggggatacagacaaggtcccccttcccatggagcttacctttgggcaggggatagaagctataggagacggacagttaaccaactaagtatcaaacaagtcaatttcagttagtggtaagcacactgaagaaaacaaagtattatctattttctgtcttcaagaatccttggctgggtgtggccaggcttcaaggtgcctgaaatgtagcccccactcatcttgaactcattgtcaagtcctcctcatcctccaaagggcagctcatcgccttcttgtctgtagggtcttggagaccactgtggctggagaagcccagttaggcttcagggagaaaggacaggtagagcttgagggacgttattaaaggaaggagagacactggctgagcaggtgagtcaccttcagccctggtacaccaggctgtctcccttggcaccctgttcagtggctctgtcttcatccctatctgtggggagtagcacgaggatgagaaatcctgacatgctgtggacccagtgctgagagcctagtttattccagtgatgcatgtgcatagcaaagccacgcaaagccaggacacagcctaagaggccacacccttgcagggagcaggcagaagtcctgggcacctccctccaccctgggcctgcttagtgccctctagaccttctgtgatgctgactctgttgcacctgatacagtagctcaggaagcctccttccccaggctctgagcttttttgagaactgaggcctttttattatttatcttgcatcccagaagatgcagatgtttcatgatggctcttttttttttttttatgagataagagtttcactcttgtcgcccaggctggaaggcagtggcgcgatctctgctcactgcaacctctgcctcctgggttcaagtgattcgcctgcctcagcctcccaagtagctgggattacaggcatgcaccaccacacctggctaattttgtatttttagtagagatggggtttcaccatgttggtccgtctggtctcgaacacctgacctcaggtgatccgcccacctcggcctcccaaagtgctgggattacagacatgagctgccacacccagccagctctctttttaatatatatgtccccagtgtgtttgtgtgtaggtgctaagtgctttcaatgttcgattctcaggtggcagggactgggatcctgttaactcctctatccagtgacccacagctacacacaaatataaatttaaatgcttcttgataatggtgagctgaataagcaaatatataatggcgttcccgacaaaccactaaaaatcgtctgttcagaggaaggtgtgggtgctggtgcatgttcagtccagtcttatttagcaccttcattaatgatgtgaatagaaaataaacattggtgttcacagatggtgctaactttggaaatgctgttaatagaagtgtcaagagaggagaacagaaatataagcaggaaatagcaaagatgtccaaaaaaaaaaaaaaagttcaatacagcaaaggcgaaaacctctttcaaacatgtaaaataaagccctacagacattagagcaagagcatcaagagatgagaagttcgcggggggagctggatatggttgctctggcctgtaatctcagcactttgggaggccaaaccagcctgggcaagaccaggctgggcaacctagtgagaccccatctctacaggaaatttaaaaaattagccaggcatggtagcacacacctgtagtcccagcatctcaggtggctgaaatggaaggattgcttgagctcgggcgtttgaggctgcagtgaactatgatcatgccacaacactccagcctgagcaacagagcagcaagaccctgtttccaaaaaaaaaaacagagtgagcgagagaagtttaaggagagtaggggaggtagaagaaggaagagacgtgaagagaaggggaggaaaggacagatgtcctctgattgatgtgggagggtctcaaggctccagagcccacttccctcttgagggtcagatgctggcccaggcgtcccactgaggtggccccagccctctgctcacaactgctgtctcatttgttttgtgatggggctttggtttggtttggtggtattctgtttctttttttttttttttcttccctcatacttgagggagctgtgggtatagttttgttctttaactctggttttgaaaggtttcattatgcctggcataaagtattaatttgggcattttggcagggtcagaggaatgcagcctttaaagagtacagattccaaatagacaaagcaaaatggagcttcctcaacacctccaagtctgatgttggtggaggggaagcaaaagagagaaccgacgcaggggtcgccaggcctctcccgggagccatcaggccacctccagtgcaccgagtccctgcctggcccaccttgccaggggaagcctgctgaggcacaaagcatacgaagcttttggttgacaaaaacggaaaccaggagtctccatggagtactcctcagggactgcagctggaaagtcaagacaaagatgtgtgctggagaatagtaaaaaatgcatacaaattctccaagcaccaggagagtgcctctttctttagcagcctggaatcatctatgcctggaaacatcaatgtcttctggccagacaaaggccaaggagtgaaaggcgctatgcccagcaagaaaaacttacaagtggtgaaagtgcctgtgcagggagggggtcaggggctgggtcagaatgtccaaacctcagcatcgttacaggaggttcaaagtgccttttcctctgactcagaagcacctggtattaaagaattccatgctgcagaggctatgctccacgcaagagctagaacagcattttagggtggaaactaaatggaatggaggcgcaaatgctgttgaggagacagttgccctgggccaggtcctagcctcaccttccagctgcaagaagttgcttgagctttctacgcttctgcaccctcatctataaagtgaacagaatgacagtgccccataatgacagctttgataaggattaaatgaaattaagtatgtaaaatgtttaatacagtgcctagtaaattcttaataaataaatggatgacagtgaatttcaaccttctcctcccaatctaagacccctttacaactccgcaggcatgctgctgaggagctccaggcccatatatttcactagaaatatctgcccacatactttgggaggccgaggcgggcagatcatgaggtcaggagatcgagaccatcctggccaacatggtgaaaccccgtctctactaaaaatacaaaaattagctgggtgtggtggcgcacgcctatagtcccagctactcaggaggctgaggcaggggaattgcctgaacctgggaggcggaggttgcagtgagccggaatcgatcgcaccactgcactccagcctggtgacagagcaagactctgtctcaaaaaaaaaaagaaagaaaaaaagaaatatctgcccacatttctgaagctattactgagaaatctgcatggagccagtgcagtgtctgctcgtctccattaaacctcaggacataaaaatggcaacatgtttatcgatacaattcccggagcttctctaaccttgcatatgtgcttccaaagcccatcagtccaaatgttttccatcctaccaaatgtttttatttcactgaaaacttcattagcagtggggaggcagcagctaatacagggatgtttgggtttacaaagcaaggtaatgactcactttgcaagagggttcttcagttcccaaaaggcaccccttgaacagtgagtgtccctagtgcctcttcatatgttttcatcacacttgacacataaacagccccttacacggagcaggataccaggccgggacatgtaccccacctgaccctttgtgttcaaccccagcccaccgatggctccgcctcacttgcctcacttcttaacaaccctgctgtgaagatgggtgaggccagcctcatgtctcccagttgaagacatgtcttgtgttgacattagccccagctgctttcttaatcatgtcattttataaaaattcattctttctatagacatttatggaactcctattttgtatcagacactgcacgaggagctgttgatagggacatgaaagtgctcagctcatcactctgctcagaagcacacagcaaacagggaccacggctaatgatgtgctttttaggggcaggatgcatagaggttaagacttggactatggcctggattgcctgggttcaaatcctgcctctactctatcacttcgggcaggcaggtccttaggctctttgggccttctcatttcctcttctgaaaaggaaattcacctcgtgctgtagtaagtccgtgaattgatatctgtaaggcacttagtaagcactgtatactgtttgactatttgtcttagtctgctcaggctgccataacaagataccatagactggccaggggaggtggctcacacctgtaatcctggtactttgggaggccaaggcaggtggaccactggaggtcatgagttcaagagcagcctggccaacataccaaaattccgtctctagtaaaaatacaaaaattagctgggcgtggtggtgtgcgcctgttaattccagctactcggcagtctgaggcaggagaattgcttgaaccagggaagcggaggttgcagtaagcagagatggcaccactgtactccagcctgggtgacagagcaagactctgtctcaaaaaaaaaagataccatagactgggtggcttgaacaacagaaatgtattttctcacagttctggagactagaagtcccagataaaagtccagcatggtgctgggtgcagtggctcacacctggaatcccagcactttgggaggccaaggcgggcagattatgaggtcaggagttcaagaccagcctggccaacatgatgacaccccgtctgtactaaaaatacaaaaattgcctgggcatggtggcacatgcctgtaatcccagctactcaggaggctgaggcaggagaatcacttgaacccaggaggcagaggatgcagtgagccaagatcgcgccattgccctctagcctgggcgacagagcgagactccgtctcaaaaaaaaaaaaaaaaaaaaaagtccagcatggttgggttctggtgagggctctcttcaagggttgcagactgccaccttctttctgagtcctcacgtggtggggagagagaaagcaagcaccctggtttctcttctttctgtcagatcaaggccctgctcctatgacctcatttaaccttaatgacctctgtaaagcccagatctcacaatactgtggtgttgaaggctaggtcttccatataaggaattggaggggacacaattcagtccatagtactattgttatattgttattttattctccttttatttgatttctaattttactgcactgtagacacagaagatggtttctatgtgatgctaattcacaggttgttattgaactttcttctgtggtctagtatgtgttctgtgtgtactttagaagaatgtgtgttctctaattgttgaatgtaatgaatacacacacatacacccaagttttttgtttttgggggagtttttttgagatagggtctcgctctgtcacccagattggagtgcagtggcacaatcacagctcactgcagcctcaacctcccaggctcaaacaatcttcccacctcagcctcccgagtagctggaactataggcgtctgccaccacacctggctagttttttttttattttttgtaaagacagggtctcattctgctacccaagtgggtcttgaacttctgggcccaagcagtccatatctgcctcagcctcccaaattgctgggattataggaatgagctaccacacccagcctatttttacttttactatgattgtggacttgttattttatctttgtaaatcatatgtatgagagcatcttcttggtaaactgttccttaataaataaacaaaacaattatctaatgaacttttttttaattttcctgagacagggtctcactctgttgcttggcctggagtgcaatggcacaatcatagcccattacagcctcaaactcctgggatcaagtgaccctcccacctcaccctcccaaagtgctgggattacaggcatgagccactgcacccggtctctaatgagctttttctccagcaatgcttttccccagctttcttttgattagtatttgatttatgtatcatattccctacctaaactgtcatcatgatttaaatggcatctgttacaagtagcatataactgcatttttaaattaaatctgagaaatcccttttagccagaggtttgcacatctaggtttactgtgctcatttatatatttaaatgtatttattccattattagtttgtgccttcttgttcccgtgtttcttctttgctacttttgttcccctttcctgccttctatctgatggatcagatttgttttataccctcccttctactgctctgagagttgtacatcacagtctactgtatctgtttcccattattataatttttttgcactgtgcttgcctgaagggagcctcaagttcatgagtctccctaccctcctcccaaatgagacatggacctttgaatgctttcctgggaccaccaccccacctttcatgctgctgttatccaggattttagttcaacagtgttttaaccccccaaatgagtcatttttattgtttcgtatagtgaatgtgtatttgggtttgcttatatggtgacctgtttatttgctcctcattgtacctcatgctctgctctttccttctagattcagtctctttcctaatgaggtgtctcgcagcaattctttacaagacagccaagataggccagctctcagagcacttgttgtctgaaaaagtcttgtcttatttaatttctttttcttagagatggggtctcattatgttacccacactggtctcaaacttctggcttaaagcggtcctcccaccttggcctcccaaagtgctaggattacaggcgtgagcgacctcgtccagcctgtctgagaaagcgtttgttttgcccttgctctcagatgacagtttggggatagaattctaggtggacggtttttttccttcagccctttgaagagtctgtattttcattatctccctgcattagatgttcttttgcaagtaacgtgtcttttctctctgggtattcttaaggttttctctttgcctttggtgagctgcagtggatttgcttttttcaagaggtcaagagaaaggaaagtgtgaggtttctgttttttactgacaatttgtttgttgatttgttttcccacccagaggttccttgccactttgccaggctggaaggcagacttcttctggtgtcctgttcacagacggggcagcctgcggaaggccctgccacatgcagggcctcggtcctcattcccttgcatgtggacccgggcgtgactcctgttcaggctggcacttcccagagctgagccccagcctgaccttcctcccatactgtcttcacaccccctcctttcttctgatacctggaggttttcctttctttcctgtcacctccacttggattttaaatcctctgtctgtggaattgtattcggcacaggaagatgcttgcaagggccaggctcatcagccctgtccctgctgctggaagcagcacagcagagcctcatgctcaggctgagatggagcagaggcctgcagacgagcacccagctcagctggggttggcgccgatggtggagggtcctcgaaagctctggggacgatggcagagctattggcaggggagccgcagggtcttttgagcccttaaaagatctctctgatgactgtgtggaggacatcacacagtctgcccctgtgctggggcagacccaaggcagagaagccagtccgggctatgacagtaaccaggaaggagagaaaagggtctgggctgaggcctcggcaggggacacagacaaaaagtgcaatcagtagaactcagagactgtcggcagtggagaaggagcgggagcggggctgcctgccagctctctggcctcagtgaccgtgcagacgacacctctcactgcataggcttgatgggaggagggaagcactttgagggagggggccaagaggatgatctcagcattggccatgtgaagactcagctgtctgcagagcattccggggatttgtctaggaagtggctgaaaagacatgcatggacctcatgctaagagaggggacacggactggatcattgtcattgaaaccacaggcatgagtgatgccactgtgaaataatgtataaaatgaaaggggccgaagatgaagcagtatttaaggagtgagaaagcaaagccaaaacagctcccgcaggagtcccacttattcttgcggtatcagtctgtgtgtcgcctcctctgggaagcccacccaccccagccacccagggtcagtgaccctcctccatgcagcaggtgcttcctacaaagcactagcatccacgagcttgggcccgggtcatcctcaccgcatttgtccttctctggacagtgccccttccaccctgggcgctccatgagtcactgcaaagagaacgtgggcagggaagggaagaatgggtgttggcagcatgaggagagtgccatgggggaggggcagcccaggctgggagggtggtggcagtcctgttggggacacaagcagggtgagtgtggatcacgcccccgggcctgggagccaggtcagttcagtgctgtggagaggcagacagcaggcttgggtgaggtctcagggcatgctggctgccgacaacacccagatatgacccagttggttcatgacaagagaaaggttttactttccaaatacaaatggttttgccccattcctcaccagctgcagacccagaaaggactcagtatgccaggaagcaccacgccaccactcctggacttggcctggttgctgaaatcatagcctcaccttataggtgactgtggtaaaagtgtccattcgaccctgacataaacagaagtggcatttcctaaagcaagattttgaaagagattccctgtgtggtttgacatcagcagggggatttacttcttgaaggaactgaaacacagagtaaacagctgcagtcatgagctcctgatgctccagtcagtagctgttgtcctcagtgtgagccagagagcatgcattatgtcctagtgacatccagatggaggacggcctgtctctgtgactctagagtttctcatgaagcacttaatgcatttactatcactttgaaaagcacctgtctctgcttggtgcaaggctgtgttcctcctaccacatcctgttaccaaacttgagagaacattgcattagcctcacaatattctcagacactccttgctgcacccagaaaaatgttctcaccaagtgactgcactgcaccccacttccactgcattttcccttgaagtgcatttgttagaacctggatcacccccactctcacagggaatgccattgagaggaaaagtgactcactgatttcttcaagtcctgcctggcttctgcaggggcagggcaggtcggcgaatgacagtctcctaatcccagctgagccagggctgcctgcaacctcccaggacccgctttcctggttggctttgacctaaaaccctgcactgcccagctgaccaggggcctggatgggaggggatgttttctgggctgattcaccttctggacaggagtggcctgtcccactttgtgcagggcctgcgaaggcacaggtagcacagggaacatgtttgttcattccatagatcaagtcttgcatttactcacgggtttctctaagagcagaagacaagagtctaaatgaaaaatgaaggaaagtaatttgataaaggccatttgcctgcaatgatggcttgaaacagatgaaacgagatgaaagtccccgaattccacagtttgctggccattaaatcctgtaacagaggatggggagggaaaaaaaatatccctccccaatgcagccagcctccctcggcagctgtcctttggcttggcgcaccctcagagggagacgccctgcctccatctgtacgatgtttccttttctttaaaaaataaggaaagaattctggctctagttggatttccagagtgtggcgaagttcaaacaagaaagaagtcactgaccccaagcgtctactccgtctcctgcccaggcctttctctgctctgtctccaggatcagcacaagaaatctcttattagtcttaaaattattttggctaaacttgagatgaggagagaaaacatggtttgaaggcaaattctaatttttcatttaggtcaatccacattttaaaaaaaaattattgtggtaaaatacacataacataaaacatattattagtcacatttagtacattcacaatgttacaagaccatcacctctacctagttccggaatattttcatcaccccaaaaggagaccctatgccctctaagcagtccctccacgcccccactccccgcagcccttggcagccactaactggtttctgcctccgtggctttgcctcttctggctatttcatataaatgtagttatacaatatgtagcctgttgtctgccacctttcacttagcatcatgtttcaaggttcaaggttcatcttgttgtaacatgtgctaatactttattcctttctgttgctcaataatatttcattgaatggatgtaccacattttgtttattcattcatccactgatgcacatttgggtttatgtaggaaaagtctctatcaaactgtttcctctgctctcacaccaccaccacagtcatcaacacagaagaagacttctgtgaccaaaggtatggaggttttcgccacacacctaccagtggtcaccagctgggtgtcctccgattcaattccgacatcatctacctggagatggtgtcagatcccacaggttgagggctcagaccagcccccacaccacccctagacaccagttgcaagtcagggtctctggaacttctgaccaaccagcttccagttggagttcccaggacctcctctttgggttcaattaatttgctcacagaactcagggaaacacttccttacatttaccaatttattaagaaggatattctaaaggatgcagataaacagcagataaagagacagacagggcaaggtgtggaagggtcccaagaagcagaggctcgtctgtcctcgcggactgggatgcctcccggtacgtgctggattcttctccgccttcccgtcagcctccatgtgtccagctctccagaagctccaaacccatccttcttgagttttttatggagactccattggctgtccatgattgaagcatggacaactgtgtcgaaatgagattggccaaaaagggactgatctaaacccaccaaggcctgtccattcagatctttcctggcctctctgtgcagcattccttcctccaaggtgttgggcaggaccccctcgggaatgagggtgttagggctcacaatcagattagagaactgacttgggcaggagaaagtcagcgagagagattttgtttcctgagggctgcttctgaggcttctgaggcctaaagcaccccaacgttataacaaaagactaacaatggttatgggagatacgagctaggaactgtggatgacacctcatcatatcatcatcatcatcaccatcatcacatcacaaggctgttgctacctttggtaaacagtgctgccatgaacattcatgtataagcttttgtctgttctcagttcttttgggtatatacccaggagtggaatcgctgggtgatatggcagttcaatgtttaactttctgaggagccgccaacctcaatccacattttctttttttttttttttgagatggagtctcactctgtcacccatgctggagtgcagtggcacgatcttgactcactacaagctccgcctcccaggttcacgccattctcctgcctcagcctcccgagtagctgggactacaggtgcccaccaccatgcccggctaatttttttgtgtatttctagtagagatggggtttcaccatgttggccaggatggtctcgatctcctgacctcatgatccacccacctcggcctcccaaagtgctgggattaccggcgtgagccactgcgcctggcccctcaatccacattttctgacttcgttatctgctgatggcagtgtgtagatggcgtcagctgggcagtgctcagccgaacttcagagcagaaggctggttcttcttgcccttgttgttcggtggtgagctcaacacacgtagtcactcaaccccctcttctgcccaaacgtcacagcagcaccacacaaacaggctgggagtcaggcaggccagggctgcccaggtctgtgccaaggaaaaaagtagtaacccaggcaactgtcacttaaggcggcaaaacagagtatctctctgctaaggagcagacctccttcccaggtctggttcacaggtatctggccactttgtgtttagaaggaacttcatggactgggtgagtctccatcccaggaggctcttgaccagttgtgcccattgtcttcctcattcatgaggctgcagtgagtgtgcgaagttgatgaagtgagcagatgaagttgtgttactgggagagagccatttacacagcagatggactgaggcctgcagccttacgcggccccagcacgtccagaacctgtggcccagccagtgttgcccatcagcacctgggagcatctcctgtgtgcagggcagcaccacgcatgcagctgtgtaagacgcctcccctccccgccaggaccttgcattctgaaagtggagaccagtacatgtggtgtgaatgctccattaaacttgtagggttgtttattttttatttttattttattttttatttttcaaagatggggtcttgctctgtcactcaggctggagtgtggtggctcagtctcggctcactgcagcctccgcctcccaggctccagcgattcttccacctcagtctcccaagtagctaggactacaggcccatgccaccacacccagctactttttaatttttttttttgtagagacagtaattcaccatgttgcccaggctggtcttgaacctctgagctcaagcaatctgccggcttccgcctcccaaagtgctgggattacaggtgtgagccaccatacttggctttttatttttatttgtttatttttttttatttttttatttttggagacagagtcttgccctgtcacccaggctggagtgcagtggcatgatcttggctcactgcaacctcagcctcccaggttcaagcgattctcctgcctcagcctcccgagtagctgggattacaggcatgcaccaccacacccagctaatttttgtatttttagtagagactgggtttcaccatgttggccaggatggtctcgatctcctgacctcatgatccacctgcctctgcctcccaaattgctgggattacaggcgtgagcaactgcacccggccgcctttttaattttatttttagagacagggtctcactatgttgcctaggctggtcttgaactgggctcaagtgatcctcccacctcagcctccagagtagctgggactacaggtgtgcaccaccatgcttgacacttgtaggatgttttttgttttattttgtttgagagggagtctcgctctgttgcccaggctggagtgcagcggcactgcaatctccaactctctggttcaagcaattctcctgcctcagcctcccgagtagctggaactacaggcacccaccaccacacccggctaattttcgtattttcaatagagacggggtttcactatgttggtcaggctggtctcaaactcctgacctcatgatctgcccgcctcagcctcccaaagtgcagggattataggtgtgagctacgcacccggcctgcttgtaggatttaaacacagaatcagaatccaagcccctccccacaggatgtaaaacatttaggaagagaatattcaaaacagaaacattcatatggttttgtgagctatgctaaaatgtgtaaagaacataatctgattcaataatatagctctcttgaaccatctcttttggaggttcttgacacttaactgagaaagcagtggaaattccttctgcgaagcgagaaattggcacatgttttacacacagtccttcacatctttcaaagtgcctcacgtgcatcactccttagaccgtaaattccacgagggcaggcggcttcccaggctctcaggaagaacccctgtctggctcccagctcgggtttcatgtttccagtgccgacacagtgcccggggtggagtcagtccttgtggagcacctggagggtagatggtttgatggttgtaaaagccagacagaggtttaagtgacttgaacaaggtcatgaagccaggaagcatggcaaggccaggacagaatccagactctcccacccgtaggcccggctcttgtattaagacctcaaagggatcaggagagatctcacgtgggcttagaaaacagtcctgggaggggcagtgtggggaccgccactaaataccaccttttctttcctgaagtgtcactgatttttgttcagttgggggatgttctggggaagtgggaattagatgtttgcctcagatcaatatccgtggtccaggagagggacaggtccccgagaggggacagagacaggccccgccaccctcagcactcaggcgagtctctgcactgcctcccatctcctgcggtgctggggctcctccgcccaaagagaagagctagcaggaacactgcctccgccaagccccaggggctgggccggtggtgtggaatgccggaaagccagaattgccaacgggaaggagaggaccaactggctgtcccgggacagtacccaccaccagggaggggactgagcagctgtggggctggcacagcagaagtaggacagggagagggaaaggggcccacagctagctcatccacatccacaacccagaaggatccagtgtccaacttctgccttccttcttgctattcaagaaccttcatttcagcagagtggtggcctcgggtggggaagaggggctggcccggcagtgggagcactgttgactcgtgcatgatcggcttggaccttccagagcgtggtctgctcttccctctgctggacactccctgaggaagggcctcccccaggcagcaagtactccacaggacctactgacagggacaacagagggcaggaggaaaaggtttcagcccagcccgtgtgggaagcagcaatctggagcagtggttcctgctgcattttttattctacaacaactccctgaggatgatatcctgggtgccgatttatttatttatttagagacaaggtctcactctgttgcccaggctggaatgcagtggcatcatcatagctcatcacagccttgaattcccgggctcaggcgatcctcctgcctcagcctcccagggaactaggattacaagcacaggccaccacaccaggctcattggtttgtttttttattttttgtagagaggagcgatgggctcctgggctataggctatgttgcccaggctggtcttgaactcctggcctcaattgatcctccctcctctgcctcccagagtattgggattacaagcatgagccactgcacccgtgccattttatagcagtcatttgctcctccccattttcccaccagcccgaaccccggcatcaaggctgtagagcatatcctggagatacacggagcccagaggaagcagggagggtggaggcaggggccaccctgctgagcgggagtcaggagagccctgcacggaggagcatgccccgattgtctgaacacgagagggtgagggtgaactaatggttcccattttctgtctcttaatttttttgagctgacgtggagcgtggcctgtttagagcccattccctcagactgagtcaccaggtgattctggaacccactgtgtacatgcagttccccagggaagggcgagggcagagtctggactccctgcacagggaagggcacaggccctccaggagggcgagcagggggaggccgctgccagggtcaggagggaggctcccagaggacaagagtccagtgagagggacccaacgccataccaggttgacagaggggaggcagggaggccaccccagctcagggaccagcctggtcctggaggcatctggtccagcacgagggctgcaggggccccacctggaccccgccgccaagggctgcacatgagccctgcagagcggccctggtgcccacaagagtagaagagggcctgagtcacggcctctgctgggctctgctatttttatgtccaagtctggttaaaaatagctgtctaagctcaggttttagctgcagctgacaagacattaagtattagatacgtaatgcccacaagtgacaaccggggtctcttcctgtgtccgtgagaaagcaggggggagacagccatgaggagagcccctgagcaccccgcacttacctctgaaactttggggcctgctgtggggcgcgcccaccaggtgtcctcagaaagcgtgtgctgggccaggtgctctagtgacacccattactctgggcacgctgaccccgtggagccaccgcacgtcggagccctttgagctgcctcggcgtctgagcagttgcgcctcccgggcaaccagtgcttagaaagtgcctcacgtgctcatggcctggtgaaggcgactccaggctgggcagaagctcagcgcatgctggccttggccctggcgttcccctggccgtgtggacacgacagcttggcgttcactgcccagcactaagagcagctccgtaagtccagcagagcgttcaaagcgggaccaacctgcccacgccccagacgccatcccgagagcagtgaaaaattcccagggctttcggcatacggagcagagccagccagtcctgactggaggctccgaggtcaggaggcttcctcctttctcctctcccctcccagctcagagctgacaaggcacaagctgaggtacagcgtgggattgtgctgcctgtgtgagcaaacattggggtgccagcctatcgcgacaagtgtctctgcttttaaaaccagcagcagcttcttagcatgttcagcgtcgtgtgaggagctggaggaagggctcgggctcgggctctgtccagcaggaagagcacagcttccgcctctgcacccgacctggagcccggccggacgcccggctgaagccgccttcatgtgctcccaggccagcggggcttcctgctgcacagggttccctgcagcccccggtggggcaccggctgcactgttctgcagcctccagggtggcaaccagccaagcggcccagctccagatgagagcagcctctcgcttggggaaacccaagtcaggcccacttccaccagccggggtgtgacaggcagggaccagccaggagcaggagacatctctctctctctctctcactggggcatgtggcacgggtctcccgcaggatggattagtgtcagagtcagaaccccagccctggtacaccgaaggacccaggggcttggtcctcagccccagccagagacctggtggcgtctgttcaaccacatggccctccactgtccagtcccatgcgctggcatgggagccaagggccctgccatggtgccgaggctgtggttggaggcccagctagtgccacactcgccttgcctcggcctctctggggcccttcaggcatcctcctggcacttgtggaggaagcaggctgcgccggagccaatggtggccgggagctgccgggcaggtgccctgttctcatgctgcctgctaactgcccgtctggtgtttttggttcctgcagtgagaagcgccaccttcaagtgaacgtcaccaacccagtacagtgcagcctgcacgggaagaagtgcaccgtctccgtggagacgcggctcaaccagccccagcccgacttcaccaagaatcgctcgggcttcatcctcagcgtgcccgggaactgacgccccgcggaggcctggcccggagcccggccacactccgagtcctgggtcccagtccagctgctgcctcccaacccatgcccgctagaaacctgctgcgagggcccctcccagaggagccccgcccctgtaagatttccttcctggttttctgcctttggtatcatcttcctctgtccttactgtccacggtccctgttcaataagccaaagaccctggtgccccgcccagacccctgggctgacgtccagaccaatctcaccccagaggcaactggatggtgcctttagttggtgcggatgccccgtggccaggtcaagtcagagcacctggacaggtgtcctccctgctgctgaccctgcagagggaaggggtggggatgcaggaccccactctgcgggagccccatagccacctctcttgcccaaggtgagccagccctggggacccagctcagggaggctctgctcagagttcggcggacccaccccaacccaactcccagccgccagccaaagccactgggtgagcagagtcacccacagggccagcccctcagccaggagccagtggcaggagcggaacagcccatccagcagagtgagtccatccttcccaggttctcccctgggagactccctttgccaccaaggcccccaccagggcctctgaccaccgctctggagaggacagtgtggcatgctccaaggatcatcttacttaactcgcagcctgtggctgtggtcctcttatagatactttcaccgtttgcagggttgctaatcagatacctgctgtcaccacacttgggtcaggaaccctaatgagaacggggagctgccagggtgagggcagccctcagggtcggccgctttccctctggaccacctcccgctgcgtttcctactcagagaaacagcaagggcggggtcaagacacgggatgacgggaagcaggaagcggggcagcagcacagcgtggggtcctggcactgcaggccaggccaggatgcccaccccgccctctacacggccccttggggcctgcgcccgtgaaactggtgccagggagcactgccagcttgccagtttctgcccagcaaaagcacgtatgcttcaggggccttctgagaccaccttccccactgagccccagctgctgagaaggccttgagggaagtagaggctgggagcaaatgccccatgcggtgagaggatgaggggagcctacgcctcaggcatgtggtgagaggatgagggggagggagccaacgcctcaggtggagtgggcagaggtgcaagagagggatgtactgaagcttcttcccgtcctgccacagacacttctcctgccttcccaccctgacccggcagaacccaccaagtgcctgtgtgcagcctcctgtgcctcacccagggcctgaccccagagtggtcccaacaacccggtctcatgcccactccccatccctgcttcccaaaaattgcactgtgtgcagtttgcaacaaagaatcccgctggcatcctgtccttgggaaccctttctcattctccaagcctggtcagctgcctgcacaggcagaggtgccctcagcccagattagcaacactcatagttttgccaattaccagtagacactagtggaaccatctaactggaacttcctctctccttccacttatttcctcaaacttgttgctttacactagacacatgcaaatgtatgttttaaacacaccaaaacagatcatgccaaatgagttgcctgtcaaaggctggagggcaggaggagggcctgggtttgggttctttcctcccagcctttggatggtgccttgggccccttagccccagcgccagggcctcccagctgaggccacaggacaagcacttttttatgatgtactaaaagccacagtatgtggcaactgcaaaaggatcaggaatttagggtatgatctcggtcacgtgtcccgggcgctgaggggaaaggaagcgggcatgattgtagacaatgagggggttctcttgatgtaatgaaatgcaattttatggtttggtgcaaaaactcctattttccagtaaattaactttatttctaaagcatattttgatttgccatcaagagcaataaagcattaaatcttatttttaaaggtgttctgcttatctgtcactgaaaacttggtgaaatttttgcttaaataaagtcaaccattatctgggaggatagaagggagaattaagcacaaatcatgtaaaatggaggatgatttgcctgaggcttttgaacaaaaagtgagcaagaagcaagctgtggaccggaggtgtgaggagggaaggaggccgtggggttgagtcccagcactttctcctgccatcttgaggcctgtgcgctggcagctggaagcacactgcttagtgccagggaatatgtttactgcaatagaagcacgtatgtagaaaggaaaggctcagagacctacagcagcagactggggacaggccaggccagcggagtgaaaggtgctgggaggaagtgtgggggcggcagggagagtgagaggaagcagcagctcctcctggggaagggagcaaggccctgagggagcaacagggcatggccagcacccaagggtcctgcagccagggtgcttccggtcactggtcattggcagaaaagaacacgcagcggtggcttctgtaactcagacgaaggcagttgctttgtggaaagcaagtggccttgatcacaaggctgacagctcccaagctacaacttgaggacaagaaagactttcctagtactcaggagcagcttcagaccgcagggtgcagggcctggggagggccacatccagcatccccataaccctcttcctgaggctgacgctggtggcacgtgcaggcctcaggctggcagtcaggacaggtacagatagagctggtaggaaccccacccttgccgcaattatgggctggagtggctgcttccctgggagccacagggctggatttctccctcctggaaacccgcatggagctaaacctgcagggttggcccatgtggacgccagcccacccctgctggcctgggagaccccgggggaagggagcacagagcagagccaagcccaagaatacgtgggagcagcagcttcagagtcacacctcgacacagggagtctagggtccagagcccctgcaggacccacccggccagacctcaccaggccatgcttgggcctgaccctccttggccggaggttccagtcacccagctctgccacgggagcctttgggaaacagctgccctcacctcggccgacgctaaaccaaagctgacttaacctgtgcttccttcttaatcaccttagtgtgttaagccctcgcccccaactctgtcctcccctccccaataacacaaatccaattatgttctgagtgcatgaatcatttagtaaagggggccccagcctgcccacaaaaagaggtctctgtaatggatggtcagtgcattttattgaatcagcacagtacaaaaataaataaaaataagggaaggggaattaaattacagccaaactgagcttcatgactttgtcagattataaaccacacatactcacaaacacactacacatacatacaaaatgagacaaatataaattaatattaacaatacccacagtttggtcaaagaatagctacagaagaaattgcactaaaaaaccaacatacatcacacgtgtgtaattagcagtttcaaatatacagctatgaataattctgagtgaaaaaaatggcacattttcttttcattgcaagtttaactgttggaacaaaactaagttctaataactgcatggaaagaatatatcaaccctccaggtttacaagaaaaagagaaaaaccaaatcctgaactattattcctgtggcttgttctgtgcatgggtgtaattttcacagccatctgttctaagattatttttcttaagacacaaaatgctcctggtttgcatgcacaatatcaccgtaaaagcaacaattaaagaataaaggtttttttgtaggtttttttttattgttgatctaaaagtagtcttcatagcagcatggcaaatgggttctttgcttgcacactcaagtatatcagttgttcctttacacaatactgatgaccagtgcaaggggagagaacacgacaggcttcacactgagggaactagagagttcttcccttagtccccaccacttccgaaatgtccacctcctccgaagaataaaaaaataaatacggagaaagagaaggaaacagacacgcaactggaatcctgtggatgcaacgtaactgcacagttcgcagccaggttccgccagctgagggtgatacacacatgcgccctcctcctgagacttggcactgaccctccctcttccatgccaccaggggcctcccacctctggtcgcacgcggcagcaggatctgaagacaggctgtgtggaaacccagcagagaggaggtgctgtgtgaagtctgtgccagcagccgcaggctccttccaccgctgcaccgattatctgacagtcccaggaacggctctgctgggcctcaggtgcagcaaggcagatgttctccggccgggcaggctctcttccccacctctgggaatgcctccagccaccaggttctgcctcaggactcttaaattgggacttcaatttcacagctttctttttgtgtaaatttcagtagtgcatgtgctgaaatcggtagccacctcgaacttaatcctatgtaaagtgaccctctgcctccccaccccaggtccccattccagcactccccagtggactgggcctggaagacagaatcctctgtagtgtcttcacattggtctttgttctccacagccgagtgatgggccatggaggaaggcttgctccctctcccaagtcccaagccaccaatgcgggagaattagaaagaaaatcaataaagtacacatttgtgtttttacagccagtagggtaaggtggaaaccaaaaccagcagctgcaaatgatcagttgtagaaatcagcaggcttccagagcaatcaggagtctcactccccgtcttgtaattgtctccaagatccggctgtctcactggtccttgctgggcaaggcttcctctttagaagaaactcaactgtttagaaacagctttaaattaacgggtgggggtggggtcaccacatcgccttccccccagctctgcaggacaaatgtcatgtgcaccagcaagaggccttagcccttaggtgggcaccggcttggtctcaaggtatggcatccctcaccttgcccagaaggcaggcgttgctaatgggcacctgcagctgtcctggcatttgccacagggtgactgcactacattattcaaaagaaaaactcacccaggaaagctgtccccagcttcaccccacctctttagctgggacccaaattgagagaaattaatgagtcaaaccagctcatcggccaataccaccaacgtggctgggagcagcagacaagggggtaggggggcgagttccatttctccactaaagaaaagcccttctccctaaaaaaagaaaacagcaaatcagggcggtgtgtggtcaaacgaccagacacaatctttccactagacccgctcagcttcgcctcgcctagattgaagatgtccccgggtggcggggatcttgcctcacgaccccactggcagctcagttagggtggctggctccaggagcctctgggagagtgaataactccacacaggagccagaaaagggcctccaaccagaaaccccaattcctccctgggccaggcagccagaggcccctctctagctccatacagggtgcagccggcagccttgcctaccctggacccagcaagggcacaggcggcaggggcaggtcagtcctttgagttccccaaagtgggaggtcagtggcctgggtggctctgaatacatcttctgggttttgcgcaaggctcgtgagttcaaaagtgcccagagttcttggcagggatgaaaaaaaccccagggagagactgtgggaaaggtgaggcccttggtggctttgctagacacatactgtacacaaaactgatttaataataaattcttaaaaatgcattgaatccttgagccatgacgcaggctacagtgctcaccgatccaggcctaggaggagccgcttcttgtcctcctggccgctctcgttcttcaggtcggagaagacctgtgtgaagtagtgtgggtcggcatttatctgcagcatctttgagctcatgaggttgatgacagagaggcaacggtcccaaaaggcctccttgcagctctccaccaggaagggcttgagcgggtaggagatctcgttgcccatgtaggagtaggagaggtacaggcatgtcagcaggacggcctggagctcgtgatccgagcccacctcggaggagataacatccctgcagagcatgtagaggaagaccacgttggccggcgtgatgaagccctggtcctgccagccctgcagaagcagcgagcggtccacgctgcgcagccagagcacggggtccgtgggggacaggtgcttcaggcggtagcaccggcggcagagaaactcacccaggcagcgaagcagctcactggtggacgcctggacgatgacccgtttgggcgtccctgcggaggtgacggcagggtgaggggctttcttgactgaggaggagcccccggtctgggaacccgagagctggctggccgggggtgcaggcggctgggccggtgggggctgggcgaatgtggacaggttggcgcacgacagcgacttcttcaggttctcattgttgaggtgcgtgatgttgttctggtagctgctgttgggctgcaccttcttggagttcttcttcttggccgacacggccacgattctcttccaaggcagcacggagatgatggagtggcgcttcaggttcttgtccttggcgttcttgctgttctgtacggccgtatagtggcccacggtggccgcgccatcctcaaacagcgtggccttccggtagctgggagacagggacagcaccgtgcccatggtgctgctgcgcgccgggcgggggctcgcgcccctgcgcgcccagcctgccggccggagggataaaaccgctcaccgagcctgcggcggccccggagaggaggcgggggcgctcccgggaagcgtgctgcccccttggatctgcctggaaaacaagatggttcttagcgccaggctgggctccgcgccgcgcccctgcgcccctgcgcccctccgccccgcgcctcggcgcaccccgccgccccagtcccgggccctacccgcgcccccgcgacgcagcctcgccgcctccactgcagcacccccgcccgccgccgccgctgcggtccccaggcgcagccgggaggggcccggtcgccgacggaggcggccgaggacccccgcctggacaccccgcacgggcgcgaccccggtctccgctccccagggccaaggacggccgcccagcgcaggcttacccggcaggcggcagctcctgcgctccgcgccctccgcaatgcgcgccgcggccccgccgccgcggtcccggcgctcggcggcgctcgggggcgctcggcggggatcggctgggctcgcgctcggcggcggcgacggcggcggcggcggcggcggcagctagggagcttctgtccaaggttctgcaggcaccgcagccccgccccccgctcggccgcccgcaccttcgccgccgccgccgcgctcccgctcccgctcccgcttccggcgcgcgcctcagcgccctccctcgcggggcgcgcgcgccgtccacgctccggcctggtctcgccggggagtcgcggccgttggtgtcctcagctcgagccgcgcacggtgcgggtaggacgcggcaacgagcgggaggcacctctacgcgccgggccccatctaggagccggactccgcggctgcggcgggacacgcggcgtcggcccgccccgcccctcggggccgcccctcccgcacagctcgccgcccgctccgcgccgccgcccaacagcagcccggccgccggagagtcctcggcgcccgcgcaacccaactctgccgacgcggggcgggcgccgagcagggcggagccgagggccgaccccgcccgcgtcccgcccagacacgtgctgcctttgttcccgccgcggcgcccgcagctgccggccgcgggggcactctcggccgagtccctgccctggcagcgcgcggcccgccctctctgaggctgccgccctggcctggtgaggagccctccgccgaggccagggtccggagctccctccttccacctgacatccccgtccctgtggaaagcagccagggagcgcggggaagaaggccctgggcggggagaggcgacgcctttactgaggcctcccgagtgccacgcgcacctcgagtggacagtccaatcggttctggccacccctccggggcctccgttccctcatcatgggtagatgaccgcggccgaagtgggcctcagagatccaagccagagaagcgtggcccgtagccaagcctgagcccgtcacaaatatgacctctaagttcccactcgccctcttatttgtcatattaaagctgaagcaactgcccctccggccagctttctgaccctcttaaacgttttcaattctaagtatgtataatttgagaacttgatgctagcgaaattgagtaaaattctgtttctgaaagctgttcctgtcagatgtgaatccagatccttcacaaaggctgttgttcatttactattttaccttgtttctggagatcgagtcaaaactgaccacaaacctgggaaacaggaaacttaagccctgtcttaatccagattatctctggacctagagatgagggagtggctctccagaggagaggatgccacccagttacctgaccactccagccgactaggctttcaccagccctgtcaactgtcctagggggaacagaaagggaatctggcatcattcaaaatggtgcaatcaaggcagaaagtgctgggttttgtttatgtgccactcagatttctgtcaataggaattccaggctttaggaaccttggggggcaaggcatacagtggaaaatgcattgctctgtacccagagggctactttgtccacagcctttcagaacatccacaacagctgttatgggaactcagaagaggaaggcaggcccccagctcagtgcgcccctccctgtgaatgttcctcagtgtacaagcctacctgctcttcaaatggagctgtcctcaaccctcctgcatgtaacagtaagaagccagaagaggccgacgcagtggctcatgcttgtaatcccagtattttgggaggccgaggcgggtggatcacctgaggtcaggagttcgagaccagcctagccaacatggtgaaaccccgtctctactaaaaatacaaaaaaaattagccaggcgtggtggcaggcacctgtaatctcagctactcaggaggctgaggcaggagaatcgcttgaacctgggagacagaggttgcagtgggccgagattgcaccattgcactccagcctgggcaacaagagcgaaactccatctcaaaaaaaaaaaaaaaaaaaaaaaaaaagccagaagaaacgatttgcttcgagaccctgaccaagtgtcccttttccttctcaaaggaaagccgaaccccagcctcttttcctcagcccttacttggagcctctagctcctgagttggctctgtgccccccttcagattctagtgttgagccaaggttaaatgttttccacttcccaaaatatgtccaaattttgaagcctataatccaccccggccaggcgtgatggccacactgtgtccagcagtttcagaggccaaggcgggcggatcacctgaggtcaggagtttgagaccagcctggccaacatggtgaaacccgtctctactaaaaaaattagctgggcgtggtggcgggtgcctataatcccagctactcgggaggctgaggcaggagaatagcttgaacccgggaggcagaggttgcagtgagctgagattgtgccactgcattccagcctgggtgacagagtgacacttcggctaaaaaaagaaaaatccaccccctagaaaaacctgggcccactctgttacctttaactctcaatctcaattctagctattccaattcacggggaggcggaccaagctcaccccactaccctgcttcccactctgcagcagcatgcctctgcatgggccttttcaagccaggccataccctgtgtcttctcacctttgtccagccagcctttccctagcaccttcaaacagagctctcggcagaacaccagcctcctcacacttgcccaaggcaaagtcacagttgcagcacagcaggaatgggatggcactggcagcccacttgctgctgcgactaagggaggggtctccaggagctcctatcacccaggccatgcctgttatgctggttttcagacaccacagagctcctcttttcattcaacccaccaccacctccccacccccagttcctatcactgctccaactggaagcaaggaagaaaggacagtcaactgccagaaatggcagaaccaaggacccagaaggcagacccagttgaatgaggcagagctgttttcttcctagctgccttcatcatagaactgcagggaagatttccaaatcccacccccatcaatcagcctacttagcctattgcctatctctagctgcctgaagggccagcctgcttgttagcttccctgctgggctgggctgcccgtggactgccggagagtccactcttcctgcatgccccacttcccatagcatcccgagggagggaggtcaaggcgggggccagctacagcttccaagaagggttccaaatagagcaggcctgagcccttactcctgaggaagtcggctttgttctttcagggatcacagagcagcatctagtggcccttctgagcagcacagattacataactagcacacagcaggggaccagagcctctgctcccaactccagtagagtctcattaacacacaagaaagtcctggcaccatgaaggctggagcccagaagggaggtgagggagccgggcccaggccagcccaccggccagctgaccttcccagctgtgcctggactcaggtcatgagaggcctgggagaggaggcagtgacacaactgctggtcctggaggtctagagctgcgctgtccagatagaagccacataggtaactttatattttctagcagccacattacacaagtaaaagggaaacaggtgaattttaataatatattttatttaacccaatacccaaaatatttcaacacatatataaaaaagttattgacatattttacactccttttcttttgttatcatactaagccttcgaagtctggtttgtgtttacacttgcagtgtatcacagctcgaaccagccacgttgcaagggcctgacagctgcacatggctagcggctacatattggacagcacgggtctagagggcatcatctgaccaagacccgcaaagggaactgagaaaagggctactgcctgagcatctcaggactgccctaagtttgagaaaacatctcccctctactccaaaactagatctctttggagtactttttaaagtcctttatagaagcaaagctctttctgcaagtgaaatacagagacacaatactaaaactgacaatggctgaactgctcagactgaagaggatttagcaggtcccccagtggtcccagagccccccgcccccgccagggtgtgaggcaatatgaaaatcgctgcctttgaagattccaaaaggaaacgaaaccacaactgcatgtcaggactctccagacacctgcacgtctatgacttactaagcttcacatcacaatcacctgccaaggaagcagcatcctcactgagtagaagagaaagtaggctcagaggatctactgcccaaacttacatgtgctcactggaccatgctgccctggaagaagacacctgaactcatttccaacctcagaactcacacaccaactttcttgcccccaaagccctccaagtttggaccccaaatttaccttaaggactcccattacacaaatgagataacagctttggccagatgagagctagactagtgtggggccacacagagctgtctggacttgcttggaagccctccagcactcaagaaaaagacaccttttgaaaaaaaaaaaaattatttttattggaactcatctgaacatcagatatacctggtgttggttagcaagaaccgtttgtacatttgatactgatggtgccaaaaccaaaacagtgactagacatgatggggaaagatgttgagaacaaaaacctgattttggagaggaaaataaaagccagtcagattcagtgaggatgcaaaacctggtacaacaaaatccttttacaaaatataaatttattatgaaaacctggaaggataatccaaggaaggtaaagaaagagaaaaggaggccagcagaagaaggcaggaaggagaggaaaagagaaaaagacaaagaggagatgagagaagaaaatacagttcagcacaacagaagtgcagaagctcacctacccaaatggcattaaagcctcgctgtgtaatcgtgtcagaaaacaaagcatactgacacatagtgctctacttcccatccacttgagttctaagaggtaaattaaaaagctccctgggaaggggacatgaggttgctcaaaaacccaacaaagaaaattaaaaaaaaaagagagagagaaaccacaccccacagtctcatttccgatgttcattgtttaaaaaaggaataaatccatctgaaagtaggagaggaggagtgggagagggagagaagctcatggctttcacagacagcctgactcccctggaggggagaggaggaaggcagagagacatgatggtctcctggttgagaggggaaagagaagggacagagaggaaagaagagaggagaggaatgcaggagaggagaagaggggcaattaaaacactgacgactaatctagtttactgtgtttaaaaaaaaaaaaaaagccacatgcatagcaggccccttgggggctaagggcccacactgctccctgtgtggccgtggtagacactagctcctggcctcatccccat

SEQ ID NO: 2851 - DNA, 3343 bp, Homo sapiens
taccttattccagagcttttattccacaaatgaggacactgatatcgagacaggtggatctcctccttctgaaggacagctgctaacggtagtcagatgcaacccagctctgctggtgccagggattggggtggttttctgatggcagaggcagtccctcaggaggtgacaaagctcctttcctttctcttagcaagtgtgggtggctggcagctgaagcaggccttgggcaaggtccttcagtctggtttactcatctcaaactcagccagagttgaagcccagccaggtccttggaggcctctagatttcctcgtagattttgtaatagaagatttacaactcacttcattccactgaaccagtatggatttcatatttatatatgcaaagtagtacaatagttatttggtggatgcaaaaagaatggtcccatgctcaagacatccgcaataatcctggacccccgcgctggcgccatggcggagcaggagagcctggaattcggcaaggcagacttcgtgctgatggacaccgtctccatgcccgagttcatggccaacctcaggctcagatttgaaaaagggcgcatctatacgttcattggagaagtcgtcgtttctgtgaacccttacaagttgttgaacatctatggaagagacacaattgagcagtataaaggccgtgagctgtatgagagaccgcctcacctttttgctattgcggatgctgcttacaaggctatgaagaggcgatcaaaagacacttgtattgtgatatcaggggaaagtggagctggtaaaacggaagccagtaagtacattatgcagtatattgcggccatcaccaaccccagtcagagagcagaggttgaaagagtgaagaatatgttgcttaagtccaactgtgttttggaagcttttggaaatgccaaaaccaaccgtaatgacaactcaagcaggtttggaaaatacatggatatcaactttgacttcaagggtgaccctattggtgggcatatcaataactacttactagaaaagtctcgagtgattgtgcaacagccaggagaaagaagctttcattctttctatcagctactccaaggaggttcagaacaaatgctacgctctctacatctccagaaatccctttcatcctacaactatattcatgtgggagctcaattaaagtcttctatcaatgatgctgccgaattcagagttgttgctgatgccatgaaagtcattggcttcaaacctgaggagatccaaacagtgtataagattttggctgctattctgcacttgggaaatttaaaatttgtagtagatggtgacacgcctcttattgagaatggcaaagtagtatctatcatagcagaattgctctctactaagacagatatggttgagaaagcccttctttaccggactgtggccacaggccgtgacatcattgacaagcagcacacagaacaagaggccagctacggcagagacgcctttgccaaggcaatatatgagcgccttttttgttggatcgttactcgcatcaatgatattattgaggtcaagaactatgacaccacaatccatgggaaaaacactgttattggtgtcttggatatctatggctttgaaatctttgacaacaacagttttgaacaattctgtatcaattactgcaatgagaaactgcagcagctatttattcagctggttctgaagcaagaacaagaggaataccagcgggaagggatcccctggaaacatattgactacttcaacaatcagatcattgttgacctcgtggagcaacagcacaaagggatcattgcaatccttgatgatgcttgcatgaatgtcggcaaagtcaccgatgaaatgtttcttgaagcacttaacagtaaattgggcaaacacgcccatttttccagccgaaagctctgtgcctcagacaaaattctggagtttgatcgagattttcgaattcgacattatgcaggcgatgtagtctattctgtcattggttttattgacaaaaataaagatactttatttcaagatttcaagcgccttatgtataacagttcaaatcctgtgctcaagaatatgtggcctgaaggcaaactgagcattacagaggtgaccaagcgacctctgactgctgctaccttgtttaagaattctatgattgctctagtagacaaccttgcatcaaaggaaccatattacgttcgttgcatcaaacccaatgacaagaaatctccacagatatttgatgatgaacgctgccggcaccaagtagaatatcttggactactggaaaatgtgagagtgcgtcgggcaggatttgccttccgccagacatacgagaagtttcttcacaggtataagatgatctctgaattcacctggcccaaccatgaccttccttcagacaaagaggctgtcaagaaactaattgaacggtgtggttttcaggatgatgtagcttatgggaagaccaaaattttcattcgaacaccccgaacattgtttaccttggaagaactccgtgcccagatgctcataaggattgtcctctttctacaaaaggtgtggcggggcaccctggcccgcatgcggtacaaaagaaccaaggcagctctgacaataatcaggtactaccggcgctacaaagtgaagtcgtacatccacgaggtggccagacgcttccatggcgtcaagaccatgcgagactacgggaagcacgtgaagtggccaagccctcctaaagttcttcgccgttttgaggaggccctgcagacgattttcaatagatggagagcatcccagctcatcaagagcattccggcctcagacctgccccaggtcagggcaaaggttgcagccgtggaaatgttgaagggtcaaagggctgacctcgggctccagagggcctgggagggcaactatcttgcttcaaagccagatacacctcagacctcaggcacttttgtccctgttgctaatgaattgaaacggaaggacaaatacatgaatgtcctcttttcctgtcacgtccgtaaggtaaatcgatttagtaaggtggaagacagagcaatttttgtcactgaccgtcacctgtataaaatggatcccactaaacagtacaaggtgatgaagactatccctctatacaatttgactggtctgagtgtctccaatggaaaggaccaacttgtagtgttccatacgaaagacaacaaagacctcattgtctgcctcttcagcaaacagccaacccatgagagtcgaattggagaacttgttggagtgctggtgaatcatttcaagag

SEQ ID NO: 2852 - protein, 968 aa, Homo sapiens
  VARIANT (1)...(968): Xaa = Any Amino Acid
MLKTSAIILDPRAGAMAEQESLEFGKADFVLMDTVSMPEFMANLRLRFEKGRIYTFIGEVVVSVNPYKLLNIYGRDTIEQYKGRELYERPPHLFAIADAAYKAMKRRSKDTCIVISGESGAGKTEASKYIMQYIAAITNPSQRAEVERVKNMLLKSNCVLEAFGNAKTNRNDNSSRFGKYMDINFDFKGDPIGGHINNYLLEKSRVIVQQPGERSFHSFYQLLQGGSEQMLRSLHLQKSLSSYNYIHVGAQLKSSINDAAEFRVVADAMKVIGFKPEEIQTVYKILAAILHLGNLKFVVDGDTPLIENGKVVSIIAELLSTKTDMVEKALLYRTVATGRDIIDKQHTEQEASYGRDAFAKAIYERLFCWIVTRINDIIEVKNYDTTIHGKNTVIGVLDIYGFEIFDNNSFEQFCINYCNEKLQQLFIQLVLKQEQEEYQREGIPWKHIDYFNNQIIVDLVEQQHKGIIAILDDACMNVGKVTDEMFLEALNSKLGKHAHFSSRKLCASDKIFDRDFRIRHYAGDVVYSVIGFIDKNKDTLFQDFKRLMYNSSNPVLKNMWPEGKLSITEVTKRPLTAATLFKNSMIALVDNLASKEPYYVRCIKPNDKKSPQIFDDERCRHQVEYLGLLENVRVRRAGFAFRQTYEKFLHRYKMISEFTWPNHDLPSDKEAVKKLIERCGFQDDVAYGKTKIFIRTPRTLFTLEELRAQMLIRIVLFLQKVWRGTLARMRYKRTKAALTIIRYYRRYKVKSYIHEVARRFHGVKTMRDYGKHVKWPSPPKVLRRFEEALQTIFNRWRASQLIKSIPASDLPQVRAKVAAVEMLKGQRADLGLQRAWEGNYLASKPDTPQTSGTFVPVANELKRKDKYMNVLFSCHVRKVNRFSKVEDRAIFVTDRHLYKMDPTKQYKVMKTIPLYNLTGLSVSNGKDQLVVFHTKDNKDLIVCLFSKQPTHESRIGELVGVLVNHFKX

SEQ ID NO: 2853 - DNA, 3017 bp, Homo sapiens
taccttattccagagcttttattccacaaatgaggacactgatatcgagacaggtggatctcctccttctgaaggacagctgctaacggtagtcagatgcaacccagctctgctggtgccagggattggggtggttttctgatggcagaggcagtccctcaggaggtgacaaagctcctttcctttctcttagcaagtgtgggtggctggcagctgaagcaggccttgggcaaggtccttcagtctggtttactcatctcaaactcagccagagttgaagcccagccaggtccttggaggcctctagatttcctcgtagattttgtaatagaagatttacaactcacttcattccactgaaccagtatggatttcatatttatatatgcaaagtagtacaatagttatttggtggatgcaaaaagaatggtcccatgctcaagacatccgcaataatcctggacccccgcgctggcgccatggcggagcaggagagcctggaattcggcaaggcagacttcgtgctgatggacaccgtctccatgcccgagttcatggccaacctcaggctcagatttgaaaaagggcgcatctatacgttcattggagaagtcgtcgtttctgtgaacccttacaagttgttgaacatctatggaagagacacaattgagcagtataaaggccgtgagctgtatgagagaccgcctcacctttttgctattgcggatgctgcttacaaggctatgaagaggcgatcaaaagacacttgtattgtgatatcaggggaaagtggagctggtaaaacggaagccagtaagtacattatgcagtatattgcggccatcaccaaccccagtcagagagcagaggttgaaagagtgaagaatatgttgcttaagtccaactgtgttttggaagcttttggaaatgccaaaaccaaccgtaatgacaactcaagcaggtttggaaaatacatggatatcaactttgacttcaagggtgaccctattggtgggcatatcaataactacttactagaaaagtctcgagtgattgtgcaacagccaggagaaagaagctttcattctttctatcagctactccaaggaggttcagaacaaatgctacgctctctacatctccagaaatccctttcatcctacaactatattcatgtgggagctcaattaaagtcttctatcaatgatgctgccgaattcagagttgttgctgatgccatgaaagtcattggcttcaaacctgaggagatccaaacagtgtataagattttggctgctattctgcacttgggaaatttaaaatttgtagtagatggtgacacgcctcttattgagaatggcaaagtagtatctatcatagcagaattgctctctactaagacagatatggttgagaaagcccttctttaccggactgtggccacaggccgtgacatcattgacaagcagcacacagaacaagaggccagctacggcagagacgcctttgccaaggcaatatatgagcgccttttttgttggatcgttactcgcatcaatgatattattgaggtcaagaactatgacaccacaatccatgggaaaaacactgttattggtgtcttggatatctatggctttgaaatctttgacaacaacagttttgaacaattctgtatcaattactgcaatgagaaactgcagcagctatttattcagctggttctgaagcaagaacaagaggaataccagcgggaagggatcccctggaaacatattgactacttcaacaatcagatcattgttgacctcgtggagcaacagcacaaagggatcattgcaatccttgatgatgcttgcatgaatgtcggcaaagtcaccgatgaaatgtttcttgaagcacttaacagtaaattgggcaaacacgcccatttttccagccgaaagctctgtgcctcagacaaaattctggagtttgatcgagattttcgaattcgacattatgcaggcgatgtagtctattctgtcattggttttattgacaaaaataaagatactttatttcaagatttcaagcgccttatgtataacagttcaaatcctgtgctcaagaatatgtggcctgaaggcaaactgagcattacagaggtgaccaagcgacctctgactgctgctaccttgtttaagaattctatgattgctctagtagacaaccttgcatcaaaggaaccatattacgttcgttgcatcaaacccaatgacaagaaatctccacagatatttgatgatgaacgctgccggcaccaagtagaatatcttggactactggaaaatgtgagagtgcgtcgggcaggatttgccttccgccagacatacgagaagtttcttcacaggtataagatgatctctgaattcacctggcccaaccatgaccttccttcagacaaagaggctgtcaagaaactaattgaacggtgtggttttcaggatgatgtagcttatgggaagaccaaaattttcattcgaacaccccgaacattgtttaccttggaagaactccgtgcccagatgctcataaggattgtcctctttctacaaaaggtgtggcggggcaccctggcccgcatgcggtacaaaagaaccaaggcagctctgacaataatcaggtactaccggcgctacaaagtgaagtcgtacatccacgaggtggccagacgcttccatggcgtcaagaccatgcgagactacgggaagcacgtgaagtggccaagccctcctaaagttcttcgccgttttgaggaggccctgcagacgattttcaatagatggagagcatcccagctcatcaagagcattccggcctcagacctgccccaggtcagggcaaaggttgcagccgtggaaatgttgaagggtcaaagggctgacctcgggctccagagggcctgggagggcaactatcttgcttcagtaaaagccagatacacctcagacctcaggcacttttgtccctgttgc

SEQ ID NO: 2854 - protein, 859 aa, Homo sapiens
MLKTSAIILDPRAGAMAEQESLEFGKADFVLMDTVSMPEFMANLRLRFEKGRIYTFIGEVVVSVNPYKLLNIYGRDTIEQYKGRELYERPPHLFAIADAAYKAMKRRSKDTCIVISGESGAGKTEASKYIMQYIAAITNPSQRAEVERVKNMLLKSNCVLEAFGNAKTNRNDNSSRFGKYMDINFDFKGDPIGGHINNYLLEKSRVIVQQPGERSFHSFYQLLQGGSEQMLRSLHLQKSLSSYNYIHVGAQLKSSINDAAEFRVVADAMKVIGFKPEEIQTVYKILAAILHLGNLKFVVDGDTPLIENGKVVSIIAELLSTKTDMVEKALLYRTVATGRDIIDKQHTEQEASYGRDAFAKAIYERLFCWIVTRINDIIEVKNYDTTIHGKNTVIGVLDIYGFEIFDNNSFEQFCINYCNEKLQQLFIQLVLKQEQEEYQREGIPWKHIDYFNNQIIVDLVEQQHKGIIAILDDACMNVGKVTDEMFLEALNSKLGKHAHFSSRKLCASDKIFDRDFRIRHYAGDVVYSVIGFIDKNKDTLFQDFKRLMYNSSNPVLKNMWPEGKLSITEVTKRPLTAATLFKNSMIALVDNLASKEPYYVRCIKPNDKKSPQIFDDERCRHQVEYLGLLENVRVRRAGFAFRQTYEKFLHRYKMISEFTWPNHDLPSDKEAVKKLIERCGFQDDVAYGKTKIFIRTPRTLFTLEELRAQMLIRIVLFLQKVWRGTLARMRYKRTKAALTIIRYYRRYKVKSYIHEVARRFHGVKTMRDYGKHVKWPSPPKVLRRFEEALQTIFNRWRASQLIKSIPASDLPQVRAKVAAVEMLKGQRADLGLQRAWEGNYLASVKARYTSDLRHFCPCC

SEQ ID NO: 2855 - DNA, 2910 bp, Homo sapiens
atgggggacactaagactgaggagcctgacagccacatgatgctcctaatggagtccacaggcagcactggccctcctcagtggcaaggcattcgtgctaacaggatgtttctgggcccagtcgctattgctttccggaggctgacctcgggaagtcctctgtgtggactttgtgcacagcggcagggtccatcaccctcagctagtgtgcggcagcgaggcggggcgcacatcccctacccgggccgcagagaacctgtcggccgccgagttctgcagctcgatggcattgcgaggccgaaagcagaatttccaggacctctgagagttgaagtcgttattcggggggaggggattctggcagctcatcgccttcttgtctgtagggtcttggagaccactgtggctggagaagcccagttaggcttcagggagaaaggacagcccaccgatggctccgcctcacttgcctcacttcttaacaaccctgctgtgaagatgggaagatgcttgcaagggccaggctcatcagccctgtccctgctgctggaagcagcacagcagagcctcatgctcaggctgagatggagcagaggcctgcagacgagcacccagctcagctggggttggcgccgatggtggagggtcctcgaaagctctggggacgatggcagagctattggcaggggagccgcagggtcttttgagcccttaaaagatctctctgatgactgtgtggaggacatcacacagtctgcccctgtgctggggcagacccaaggcagagaagccagtccgggctatgacagtaaccaggaaggagagaaaaggaccgtaaattccacgagggcaggcggcttcccaggctctcaggaagaacccctgtctggctcccagctcgggtttcatgtttccagtgccgacacagtgcccggggtggagtcagtccttgtggagcacctggaggtgtcactgatttttgttcagttgggggatgttctggggaagtgggaattagatgtttgcctcagatcaatatccgtggtccaggagagggacaggtccccgagaggggacagagacaggccccgccaccctcagcactcaggcgagtctctgcactgcctcccatctcctgcggtgctggggctcctccgcccaaagagaagagctagcaggaacactgcctccgccaagccccaggggctgggccggtggtgtggaatgccggaaagccagaattgccaacgggaaggagaggaccaactggctgtcccgggacagtacccaccaccagggaggggactgagcagctgtggggctggcacagcagaagtaggacagggagagggaaaggggcccacagctagctcatccacatccacaacccagaaggatccagtgtccaacttctgccttccttcttgctattcaagaaccttcatttcagcagagtggtggcctcggcccgaaccccggcatcaaggctgtagagcatatcctggagatacacggagcccagaggaagcagggagggtggaggcaggggccaccctgctgagcgggagtcaggagagccctgcacggaggagcatgccccgattgtctgaacacgagagggctgggcagaagctcagcgcatgctggccttggccctggcgttcccctggccgtgtggacacgacagcttggcgttcactgcccagcactaagagcagctccgtaagtccagcagagcgttcaaagcgggaccaacctgcccacgccccagacgccatcccgagagcagtgaaaaattcccagggctttcggcatacggagcagagccagccagtcctgactggaggctccgagctcagagctgacaaggcacaagctgaggccagcggggcttcctgctgcacagggttccctgcagcccccggatggattagtgtcagagtcagaaccccagccctggtacaccgaaggacccaggggcttggtcctcagccccagccagagacctggtggcgtctgttcaaccacatggccctccactgtccagtcccatgcgctggcatgggagccaagggccctgccatggtgccgaggctgtggttggaggcccagctagtgccacactcgccttgcctcggcctctctggggcccttcaggcatcctcctggcacttgtggaggaagcaggctgcgccggagccaatggtggccgggagctgccgggcagaccaatctcaccccagaggcaactggatggtgcctttagttggtgcggatgccccgtggccaggtcaagtcagagcacctggacaggtgtcctccctgctgctgaccctgcagagggaaggggtggggatgcaggaccccactctgcgggagccccatagccacctctcttgcccaagggttgctaatcagatacctgctgtcaccacacttgggtcaggaaccctaatgagaacggggagctgccagggcctcaggctggcagtcaggacaggtacagatagagctggtaggaaccccacccttgccgcaattatgggctggagtggctgcttccctgggagccacagggctggatttctccctcctggaaacccgcatggagctaaacctgcagggttggcccatgtggacgccagcccacccctgctggcctgggagaccccgggggaagggagcacagagcagagccaagcccaagaatacgtgggagcagcagcttcagagtcacacctcgacacagggagtctagggtccagagcccctgcaggacccacccggccagacctcaccaggccatgcttgggcctgaccctccttggccggaggttccagtcacccagctctgccacgggagcctttgggaaacagctgccctcacctcggccgacgctaaaccaaagc

SEQ ID NO: 2856 - protein, 960 aa, Homo sapiens
MGDTKTEEPDSHMMLLMESTGSTGPPQWQGIRANRMFLGPVAIAFRRLTSGSPLCGLCAQRQGPSPSASVRQRGGAHIPYPGRREPVGRRVLQLDGIARPKAEFPGPLRVEVVIRGEGILAAHRLLVCRVLETTVAGEAQLGFREKGQPTDGSASLASLLNNPAVKMGRCLQGPGSSALSLLLEAAQQSLMLRLRWSRGLQTSTQLSWGWRRWWRVLESSGDDGRAIGRGAAGSFEPLKDLSDDCVEDITQSAPVLGQTQGREDGYDSNQEGEKRTVNSTRAGGFPGSQEEPLSGSQLGFHVSSADTVPGVESVLVEHLEVSLIFVQLGDVLGKWELDVCLRSISVVQERDRSPRGDRDRPRHPQHSGESLHCLPSPAVLGLLRPKRRASRNTASAKPQGLGRWCGMPESQNCQREGEDQLAVPGQYPPPGRGLSSCGAGTAEVGQGEGKGPTASSSTSTTQKDPVSNFCLPSCRTFISAEWWPRPEPRHQGCRAYPGDTRSPEEAGRVEAGATLLSGSQESPARRSMPRLSEHERAGQKLSACWPWPWRSPGRVDTTAWRSLPSTKSSSVSPAERSKRDQPAHAPDAIPRAVKNSQGFRHTEQSQPVLTGGSELRADKAQAEASGASCCTGFPAAPGWISVRVRTPALVHRRTQGLGPQPQPETWWRLFNHMALHCPVPCAGMGAKGPAMVPRLWLEAQLVPHSPCLGLSGALQASSWHLWRKQAAPEPMVAGSCRADQSHPRGNWMVPLVGADAPWPGQVRAPGQVSSLLLTLQREGVGMQDPTLREPHSHLSCPRVANQIPAVTTLGSGTLMRTGSCQGLRLAVRTGTDRAGRNPTLAAIMGWSGCFPGSHRAGFLPPGNPHGAKPAGLAHVDDPLLAWETPGEGSTEQSQAQEYVGAAASESHLDTGSLGSRAPAGPWDLWCLGLTLLGRRFQSPSSATGAFGKQLPSPRPTLNQS

SEQ ID NO: 2857 - DNA, 303 bp, Homo sapiens
agcctcgcggcgcggcctcgccccggcccctcccgagctcatcgcgggcccacggagcggccccggaggcccgagcgcgcccacctgagcccccgcgctggcgccatggcggagcaggagagcctggaattcggcaaggcagacttcgtgctgatggacaccgtctccatgcccgagttcatggccaacctcaggctcagcaaatacatgggcttagccagagcttttgcagaattttcagaatttgaaattgaaggcatagagtctaacagggctacattagtttgtaggactactcctctg

SEQ ID NO: 2858 - protein, 66 aa, Homo sapiens
MAEQESLEFGKADFVLMDTVSMPEFMANLRLSKYMGLARAFAEFSEFEIEGIESNRATLVCRTTPL

SEQ ID NO: 2859 - DNA, 5658 bp, Homo sapiens
taccttattccagagcttttattccacaaatgaggacactgatatcgagacaggtggatctcctccttctgaaggacagctgctaacggtagtcagatgcaacccagctctgctggtgccagggattggggtggttttctgatggcagaggcagtccctcaggaggtgacaaagctcctttcctttctcttagcaagtgtgggtggctggcagctgaagcaggccttgggcaaggtccttcagtctggtttactcatctcaaactcagccagagttgaagcccagccaggtccttggaggcctctagatttcctcgtagattttgtaatagaagatttacaactcacttcattccactgaaccagtatggatttcatatttatatatgcaaagtagtacaatagttatttggtggatgcaaaaagaatggtcccatgctcaagacatccgcaataatcctggacccccgcgctggcgccatggcggagcaggagagcctggaattcggcaaggcagacttcgtgctgatggacaccgtctccatgcccgagttcatggccaacctcaggctcagatttgaaaaagggcgcatctatacgttcattggagaagtcgtcgtttctgtgaacccttacaagttgttgaacatctatggaagagacacaattgagcagtataaaggccgtgagctgtatgagagaccgcctcacctttttgctattgcggatgctgcttacaaggctatgaagaggcgatcaaaagacacttgtattgtgatatcaggggaaagtggagctggtaaaacggaagccagtaagtacattatgcagtatattgcggccatcaccaaccccagtcagagagcagaggttgaaagagtgaagaatatgttgcttaagtccaactgtgttttggaagcttttggaaatgccaaaaccaaccgtaatgacaactcaagcaggtttggaaaatacatggatatcaactttgacttcaagggtgaccctattggtgggcatatcaataactacttactagaaaagtctcgagtgattgtgcaacagccaggagaaagaagctttcattctttctatcagctactccaaggaggttcagaacaaatgctacgctctctacatctccagaaatccctttcatcctacaactatattcatgtgggagctcaattaaagtcttctatcaatgatgctgccgaattcagagttgttgctgatgccatgaaagtcattggcttcaaacctgaggagatccaaacagtgtataagattttggctgctattctgcacttgggaaatttaaaatttgtagtagatggtgacacgcctcttattgagaatggcaaagtagtatctatcatagcagaattgctctctactaagacagatatggttgagaaagcccttctttaccggactgtggccacaggccgtgacatcattgacaagcagcacacagaacaagaggccagctacggcagagacgcctttgccaaggcaatatatgagcgccttttttgttggatcgttactcgcatcaatgatattattgaggtcaagaactatgacaccacaatccatgggaaaaacactgttattggtgtcttggatatctatggctttgaaatctttgacaacaacagttttgaacaattctgtatcaattactgcaatgagaaactgcagcagctatttattcagctggttctgaagcaagaacaagaggaataccagcgggaagggatcccctggaaacatattgactacttcaacaatcagatcattgttgacctcgtggagcaacagcacaaagggatcattgcaatccttgatgatgcttgcatgaatgtcggcaaagtcaccgatgaaatgtttcttgaagcacttaacagtaaattgggcaaacacgcccatttttccagccgaaagctctgtgcctcagacaaaattctggagtttgatcgagattttcgaattcgacattatgcaggcgatgtagtctattctgtcattggttttattgacaaaaataaagatactttatttcaagatttcaagcgccttatgtataacagttcaaatcctgtgctcaagaatatgtggcctgaaggcaaactgagcattacagaggtgaccaagcgacctctgactgctgctaccttgtttaagaattctatgattgctctagtagacaaccttgcatcaaaggaaccatattacgttcgttgcatcaaacccaatgacaagaaatctccacagatatttgatgatgaacgctgccggcaccaagtagaatatcttggactactggaaaatgtgagagtgcgtcgggcaggatttgccttccgccagacatacgagaagtttcttcacaggtataagatgatctctgaattcacctggcccaaccatgaccttccttcagacaaagaggctgtcaagaaactaattgaacggtgtggttttcaggatgatgtagcttatgggaagaccaaaattttcattcgaacaccccgaacattgtttaccttggaagaactccgtgcccagatgctcataaggattgtcctctttctacaaaaggtgtggcggggcaccctggcccgcatgcggtacaaaagaaccaaggcagctctgacaataatcaggtactaccggcgctacaaagtgaagtcgtacatccacgaggtggccagacgcttccatggcgtcaagaccatgcgagactacgggaagcacgtgaagtggccaagccctcctaaagttcttcgccgttttgaggaggccctgcagacgattttcaatagatggagagcatcccagctcatcaagagcattccggcctcagacctgccccaggtcagggcaaaggttgcagccgtggaaatgttgaagggtcaaagggctgacctcgggctccagagggcctgggagggcaactatcttgcttcaaagccagatacacctcagacctcaggcacttttgtccctgttgctaatgaattgaaacggaaggacaaatacatgaatgtcctcttttcctgtcacgtccgtaaggtaaatcgatttagtaaggtggaagacagagcaatttttgtcactgaccgtcacctgtataaaatggatcccactaaacagtacaaggtgatgaagactatccctctatacaatttgactggtctgagtgtctccaatggaaaggaccaacttgtagtgttccatacgaaagacaacaaagacctcattgtctgcctcttcagcaaacagccaacccatgagagtcgaattggagaacttgttggagtgctggtgaatcatttcaagagtgagaagcgccaccttcaagtgaacgtcaccaacccagtacagtgcagcctgcacgggaagaagtgcaccgtctccgtggagacgcggctcaaccagccccagcccgacttcaccaagaatcgctcgggcttcatcctcagcgtgcccgggaactgacgccccgcggaggcctggcccggagcccggccacactccgagtcctgggtcccagtccagctgctgcctcccaacccatgcccgctagaaacctgctgcgagggcccctcccagaggagccccgcccctgtaagatttccttcctggttttctgcctttggtatcatcttcctctgtccttactgtccacggtccctgttcaataagccaaagaccctggtgccccgcccagacccctgggctgacgtccagaccaatctcaccccagaggcaactggatggtgcctttagttggtgcggatgccccgtggccaggtcaagtcagagcacctggacaggtgtcctccctgctgctgaccctgcagagggaaggggtggggatgcaggaccccactctgcgggagccccatagccacctctcttgcccaaggtgagccagccctggggacccagctcagggaggctctgctcagagttcggcggacccaccccaacccaactcccagccgccagccaaagccactgggtgagcagagtcacccacagggccagcccctcagccaggagccagtggcaggagcggaacagcccatccagcagagtgagtccatccttcccaggttctcccctgggagactccctttgccaccaaggcccccaccagggcctctgaccaccgctctggagaggacagtgtggcatgctccaaggatcatcttacttaactcgcagcctgtggctgtggtcctcttatagatactttcaccgtttgcagggttgctaatcagatacctgctgtcaccacacttgggtcaggaaccctaatgagaacggggagctgccagggtgagggcagccctcagggtcggccgctttccctctggaccacctcccgctgcgtttcctactcagagaaacagcaagggcggggtcaagacacgggatgacgggaagcaggaagcggggcagcagcacagcgtggggtcctggcactgcaggccaggccaggatgcccaccccgccctctacacggccccttggggcctgcgcccgtgaaactggtgccagggagcactgccagcttgccagtttctgcccagcaaaagcacgtatgcttcaggggccttctgagaccaccttccccactgagccccagctgctgagaaggccttgagggaagtagaggctgggagcaaatgccccatgcggtgagaggatgaggggagcctacgcctcaggcatgtggtgagaggatgagggggagggagccaacgcctcaggtggagtgggcagaggtgcaagagagggatgtactgaagcttcttcccgtcctgccacagacacttctcctgccttcccaccctgacccggcagaacccaccaagtgcctgtgtgcagcctcctgtgcctcacccagggcctgaccccagagtggtcccaacaacccggtctcatgcccactccccatccctgcttcccaaaaattgcactgtgtgcagtttgcaacaaagaatcccgctggcatcctgtccttgggaaccctttctcattctccaagcctggtcagctgcctgcacaggcagaggtgccctcagcccagattagcaacactcatagttttgccaattaccagtagacactagtggaaccatctaactggaacttcctctctccttccacttatttcctcaaacttgttgctttacactagacacatgcaaatgtatgttttaaacacaccaaaacagatcatgccaaatgagttgcctgtcaaaggctggagggcaggaggagggcctgggtttgggttctttcctcccagcctttggatggtgccttgggccccttagccccagcgccagggcctcccagctgaggccacaggacaagcacttttttatgatgtactaaaagccacagtatgtggcaactgcaaaaggatcaggaatttagggtatgatctcggtcacgtgtcccgggcgctgaggggaaaggaagcgggcatgattgtagacaatgagggggttctcttgatgtaatgaaatgcaattttatggtttggtgcaaaaactcctattttccagtaaattaactttatttctaaagcatattttgatttgccatcaagagcaataaagcattaaatcttatttttaaa

SEQ ID NO: 2860 - protein, 1019 aa, Homo sapiens
MLKTSAIILDPRAGAMAEQESLEFGKADFVLMDTVSMPEFMANLRLRFEKGRIYTFIGEVVVSVNPYKLLNIYGRDTIEQYKGRELYERPPHLFAIADAAYKAMKRRSKDTCIVISGESGAGKTEASKYIMQYIAAITNPSQRAEVERVKNMLLKSNCVLEAFGNAKTNRNDNSSRFGKYMDINFDFKGDPIGGHINNYLLEKSRVIVQQPGERSFHSFYQLLQGGSEQMLRSLHLQKSLSSYNYIHVGAQLKSSINDAAEFRVVADAMKVIGFKPEEIQTVYKILAAILHLGNLKFVVDGDTPLIENGKVVSIIAELLSTKTDMVEKALLYRTVATGRDIIDKQHTEQEASYGRDAFAKAIYERLFCWIVTRINDIIEVKNYDTTIHGKNTVIGVLDIYGFEIFDNNSFEQFCINYCNEKLQQLFIQLVLKQEQEEYQREGIPWKHIDYFNNQIIVDLVEQQHKGIIAILDDACMNVGKVTDEMFLEALNSKLGKHAHFSSRKLCASDKIFDRDFRIRHYAGDVVYSVIGFIDKNKDTLFQDFKRLMYNSSNPVLKNMWPEGKLSITEVTKRPLTAATLFKNSMIALVDNLASKEPYYVRCIKPNDKKSPQIFDDERCRHQVEYLGLLENVRVRRAGFAFRQTYEKFLHRYKMISEFTWPNHDLPSDKEAVKKLIERCGFQDDVAYGKTKIFIRTPRTLFTLEELRAQMLIRIVLFLQKVWRGTLARMRYKRTKAALTIIRYYRRYKVKSYIHEVARRFHGVKTMRDYGKHVKWPSPPKVLRRFEEALQTIFNRWRASQLIKSIPASDLPQVRAKVAAVEMLKGQRADLGLQRAWEGNYLASKPDTPQTSGTFVPVANELKRKDKYMNVLFSCHVRKVNRFSKVEDRAIFVTDRHLYKMDPTKQYKVMKTIPLYNLTGLSVSNGKDQLVVFHTKDNKDLIVCLFSKQPTHESRIGELVGVLVNHFKSEKRHLQVNVTNPVQCSLHGKKCTVSVETRLNQPQPDFTKNRSGFILSVPGN

SEQ ID NO: 2861 - DNA, 5146 bp, Homo sapiens
atgcagccttatggatgttacagacttctgacgaggaaagccaaggagagccagcagacaagatttgaaaaagggcgcatctatacgttcattggagaagtcgtcgtttctgtgaacccttacaagttgttgaacatctatggaagagacacaattgagcagtataaaggccgtgagctgtatgagagaccgcctcacctttttgctattgcggatgctgcttacaaggctatgaagaggcgatcaaaagacacttgtattgtgatatcaggggaaagtggagctggtaaaacggaagccagtaagtacattatgcagtatattgcggccatcaccaaccccagtcagagagcagaggttgaaagagtgaagaatatgttgcttaagtccaactgtgttttggaagcttttggaaatgccaaaaccaaccgtaatgacaactcaagcaggtttggaaaatacatggatatcaactttgacttcaagggtgaccctattggtgggcatatcaataactacttactagaaaagtctcgagtgattgtgcaacagccaggagaaagaagctttcattctttctatcagctactccaaggaggttcagaacaaatgctacgctctctacatctccagaaatccctttcatcctacaactatattcatgtgggagctcaattaaagtcttctatcaatgatgctgccgaattcagagttgttgctgatgccatgaaagtcattggcttcaaacctgaggagatccaaacagtgtataagattttggctgctattctgcacttgggaaatttaaaatttgtagtagatggtgacacgcctcttattgagaatggcaaagtagtatctatcatagcagaattgctctctactaagacagatatggttgagaaagcccttctttaccggactgtggccacaggccgtgacatcattgacaagcagcacacagaacaagaggccagctacggcagagacgcctttgccaaggcaatatatgagcgccttttttgttggatcgttactcgcatcaatgatattattgaggtcaagaactatgacaccacaatccatgggaaaaacactgttattggtgtcttggatatctatggctttgaaatctttgacaacaacagttttgaacaattctgtatcaattactgcaatgagaaactgcagcagctatttattcagctggttctgaagcaagaacaagaggaataccagcgggaagggatcccctggaaacatattgactacttcaacaatcagatcattgttgacctcgtggagcaacagcacaaagggatcattgcaatccttgatgatgcttgcatgaatgtcggcaaagtcaccgatgaaatgtttcttgaagcacttaacagtaaattgggcaaacacgcccatttttccagccgaaagctctgtgcctcagacaaaattctggagtttgatcgagattttcgaattcgacattatgcaggcgatgtagtctattctgtcattggttttattgacaaaaataaagatactttatttcaagatttcaagcgccttatgtataacagttcaaatcctgtgctcaagaatatgtggcctgaaggcaaactgagcattacagaggtgaccaagcgacctctgactgctgctaccttgtttaagaattctatgattgctctagtagacaaccttgcatcaaaggaaccatattacgttcgttgcatcaaacccaatgacaagaaatctccacagatatttgatgatgaacgctgccggcaccaagtagaatatcttggactactggaaaatgtgagagtgcgtcgggcaggatttgccttccgccagacatacgagaagtttcttcacaggtataagatgatctctgaattcacctggcccaaccatgaccttccttcagacaaagaggctgtcaagaaactaattgaacggtgtggttttcaggatgatgtagcttatgggaagaccaaaattttcattcgaacaccccgaacattgtttaccttggaagaactccgtgcccagatgctcataaggattgtcctctttctacaaaaggtgtggcggggcaccctggcccgcatgcggtacaaaagaaccaaggcagctctgacaataatcaggtactaccggcgctacaaagtgaagtcgtacatccacgaggtggccagacgcttccatggcgtcaagaccatgcgagactacgggaagcacgtgaagtggccaagccctcctaaagttcttcgccgttttgaggaggccctgcagacgattttcaatagatggagagcatcccagctcatcaagagcattccggcctcagacctgccccaggtcagggcaaaggttgcagccgtggaaatgttgaagggtcaaagggctgacctcgggctccagagggcctgggagggcaactatcttgcttcaaagccagatacacctcagacctcaggcacttttgtccctgttgctaatgaattgaaacggaaggacaaatacatgaatgtcctcttttcctgtcacgtccgtaaggtaaatcgatttagtaaggtggaagacagagcaatttttgtcactgaccgtcacctgtataaaatggatcccactaaacagtacaaggtgatgaagactatccctctatacaatttgactggtctgagtgtctccaatggaaaggaccaacttgtagtgttccatacgaaagacaacaaagacctcattgtctgcctcttcagcaaacagccaacccatgagagtcgaattggagaacttgttggagtgctggtgaatcatttcaagagtgagaagcgccaccttcaagtgaacgtcaccaacccagtacagtgcagcctgcacgggaagaagtgcaccgtctccgtggagacgcggctcaaccagccccagcccgacttcaccaagaatcgctcgggcttcatcctcagcgtgcccgggaactgacgccccgcggaggcctggcccggagcccggccacactccgagtcctgggtcccagtccagctgctgcctcccaacccatgcccgctagaaacctgctgcgagggcccctcccagaggagccccgcccctgtaagatttccttcctggttttctgcctttggtatcatcttcctctgtccttactgtccacggtccctgttcaataagccaaagaccctggtgccccgcccagacccctgggctgacgtccagaccaatctcaccccagaggcaactggatggtgcctttagttggtgcggatgccccgtggccaggtcaagtcagagcacctggacaggtgtcctccctgctgctgaccctgcagagggaaggggtggggatgcaggaccccactctgcgggagccccatagccacctctcttgcccaaggtgagccagccctggggacccagctcagggaggctctgctcagagttcggcggacccaccccaacccaactcccagccgccagccaaagccactgggtgagcagagtcacccacagggccagcccctcagccaggagccagtggcaggagcggaacagcccatccagcagagtgagtccatccttcccaggttctcccctgggagactccctttgccaccaaggcccccaccagggcctctgaccaccgctctggagaggacagtgtggcatgctccaaggatcatcttacttaactcgcagcctgtggctgtggtcctcttatagatactttcaccgtttgcagggttgctaatcagatacctgctgtcaccacacttgggtcaggaaccctaatgagaacggggagctgccagggtgagggcagccctcagggtcggccgctttccctctggaccacctcccgctgcgtttcctactcagagaaacagcaagggcggggtcaagacacgggatgacgggaagcaggaagcggggcagcagcacagcgtggggtcctggcactgcaggccaggccaggatgcccaccccgccctctacacggccccttggggcctgcgcccgtgaaactggtgccagggagcactgccagcttgccagtttctgcccagcaaaagcacgtatgcttcaggggccttctgagaccaccttccccactgagccccagctgctgagaaggccttgagggaagtagaggctgggagcaaatgccccatgcggtgagaggatgaggggagcctacgcctcaggcatgtggtgagaggatgagggggagggagccaacgcctcaggtggagtgggcagaggtgcaagagagggatgtactgaagcttcttcccgtcctgccacagacacttctcctgccttcccaccctgacccggcagaacccaccaagtgcctgtgtgcagcctcctgtgcctcacccagggcctgaccccagagtggtcccaacaacccggtctcatgcccactccccatccctgcttcccaaaaattgcactgtgtgcagtttgcaacaaagaatcccgctggcatcctgtccttgggaaccctttctcattctccaagcctggtcagctgcctgcacaggcagaggtgccctcagcccagattagcaacactcatagttttgccaattaccagtagacactagtggaaccatctaactggaacttcctctctccttccacttatttcctcaaacttgttgctttacactagacacatgcaaatgtatgttttaaacacaccaaaacagatcatgccaaatgagttgcctgtcaaaggctggagggcaggaggagggcctgggtttgggttctttcctcccagcctttggatggtgccttgggccccttagccccagcgccagggcctcccagctgaggccacaggacaagcacttttttatgatgtactaaaagccacagtatgtggcaactgcaaaaggatcaggaatttagggtatgatctcggtcacgtgtcccgggcgctgaggggaaaggaagcgggcatgattgtagacaatgagggggttctcttgatgtaatgaaatgcaattttatggtttggtgcaaaaactcctattttccagtaaattaactttatttctaaagcatattttgatttgccatcaagagcaataaagcattaaatcttatttttaaa

SEQ ID NO: 2862 - protein, 993 aa, Homo sapiens
MQPYGCYRLLTRKAKESQQTRFEKGRIYTFIGEVVVSVNPYKLLNIYGRDTIEQYKGRELYERPPHLFAIADAAYKAMKRRSKDTCIVISGESGAGKTEASKYIMQYIAAITNPSQRAEVERVKNMLLKSNCVLEAFGNAKTNRNDNSSRFGKYMDINFDFKGDPIGGHINNYLLEKSRVIVQQPGERSFHSFYQLLQGGSEQMLRSLHLQKSLSSYNYIHVGAQLKSSINDAAEFRVVADAMKVIGFKPEEIQTVYKILAAILHLGNLKFVVDGDTPLIENGKVVSIIAELLSTKTDMVEKALLYRTVATGRDIIDKQHTEQEASYGRDAFAKAIYERLFCWIVTRINDIIEVKNYDTTIHGKNTVIGVLDIYGFEIFDNNSFEQFCINYCNEKLQQLFIQLVLKQEQEEYQREGIPWKHIDYFNNQIIVDLVEQQHKGIIAILDDACMNVGKVTDEMFLEALNSKLGKHAHFSSRKLCASDKIFDRDFRIRHYAGDVVYSVIGFIDKNKDTLFQDFKRLMYNSSNPVLKNMWPEGKLSITEVTKRPLTAATLFKNSMIALVDNLASKEPYYVRCIKPNDKKSPQIFDDERCRHQVEYLGLLENVRVRRAGFAFRQTYEKFLHRYKMISEFTWPNHDLPSDKEAVKKLIERCGFQDDVAYGKTKIFIRTPRTLFTLEELRAQMLIRIVLFLQKVWRGTLARMRYKRTKAALTIIRYYRRYKVKSYIHEVARRFHGVKTMRDYGKHVKWPSPPKVLRRFEEALQTIFNRWRASQLIKSIPASDLPQVRAKVAAVEMLKGQRADLGLQRAWEGNYLASKPDTPQTSGTFVPVANELKRKDKYMNVLFSCHVRKVNRFSKVEDRAIFVTDRHLYKMDPTKQYKVMKTIPLYNLTGLSVSNGKDQLVVFHTKDNKDLIVCLFSKQPTHESRIGELVGVLVNHFKSEKRHLQVNVTNPVQCSLHGKKCTVSVETRLNQPQPDFTKNRSGFILSVPGN

SEQ ID NO: 2863 - DNA, 407622 bp, Homo sapiens; identical to SEQ ID NO: 2850
  misc_feature (1)...(407622): n = A, C, G or T/U

SEQ ID NO: 2864 - DNA, 3343 bp, Homo sapiens; identical to SEQ ID NO: 2851

SEQ ID NO: 2865 - protein, 968 aa, Homo sapiens; identical to SEQ ID NO: 2852
  VARIANT (1)...(968): Xaa = Any Amino Acid

SEQ ID NO: 2866 - DNA, 3017 bp, Homo sapiens; identical to SEQ ID NO: 2853

SEQ ID NO: 2867 - protein, 859 aa, Homo sapiens; identical to SEQ ID NO: 2854

SEQ ID NO: 2868 - DNA, 2910 bp, Homo sapiens; identical to SEQ ID NO: 2855

SEQ ID NO: 2869 - protein, 960 aa, Homo sapiens; identical to SEQ ID NO: 2856

SEQ ID NO: 2870 - DNA, 303 bp, Homo sapiens; identical to SEQ ID NO: 2857

SEQ ID NO: 2871 - protein, 66 aa, Homo sapiens; identical to SEQ ID NO: 2858

SEQ ID NO: 2872 - DNA, 5658 bp, Homo sapiens; identical to SEQ ID NO: 2859

SEQ ID NO: 2873 - protein, 1019 aa, Homo sapiens; identical to SEQ ID NO: 2860

SEQ ID NO: 2874 - DNA, 5146 bp, Homo sapiens; identical to SEQ ID NO: 2861

SEQ ID NO: 2875 - protein, 993 aa, Homo sapiens; identical to SEQ ID NO: 2862

SEQ ID NO: 2876 - DNA, 81608 bp, Mus musculus
gagccacatgcatagtgtaaaatttctgttacagtgttttgttttttttccagacggggattctctgtgtagccctggctgtcctggaactcactttgtagaccaggctggcttcgaactcagaaatccacttgcctctgcctcctgagtgctgggattaaaggcacgtgccaccacgcccagctctgttacactgttaactgagcttggtgatgtgtttgacaggtgtgtgtgtgtgtgtgcgcacacgtgctgagtaaaataaacccaaatcaggtgaaactaattttaagaatattttagccaggtgtggtggtgcacgcctttaatcccagcacttgggaggcagaggcaggtggatttctgagttcgaagccagcctagcctggtctacaaagtgagttccaggacagccagagaaaccctgtctcgaaaaaacaaaacacaaccaacaaacaaacaaacaaaaaagaatattttacttagtttggtacacttgaaatactttttagagtgtaagtctattacctctgagatagtttacattttttgtatgtgaggcctttgaaatctagtgtgtattttctcctcagagcacatcatgatttggattggccatagtccaaatgatcataatgacacggtgattgtttaacagctagattctagggctttaaacttagcttgttaatgttagttgcttattgcttattggtgatctcttcctggaacagattttgttctaagttgtgtgtggtagagtcccaaaggttcctgtgccaaagcatccactgttgcccagttaggctcgttacttcagactgtccattttccctttctgtaggttttctaaactgatctgttcttactgagtttgatcttgcagggtggtataatagctataccttgatgtgttttgttagttcataaatcattaggatttgtatagcttttaacattttcatctttccaggactattttgagaagaattaaatcctaagaatgactttcacccttttcacttttttttccttactgctattttctactacagttcttagtattgactcaaacaatcttttttcatgattgtttttagatgctaatgagacttttttttttctgaaatgagggagaaagtaagggggcattgcctaagtaggactgataaggcactgttcagagttaagagtttaccataaatgactgcagatcttaaaacaatctatctagctttatacataatgaaatgtaaagcacatagcagttcagcgactccttcccacagtactacacaggactaagggttggagttgattactgggacatgaaatacaagagaacttctaagccctattaggcagatgtatatttcatacacttacatctttttaaagagtagtagtgagtagtaaaagcagagaatagcgaaagtattaaagatttcaaactttatagagtaattgttttctaaagattttttactatataatgttcagtaacgtgttcattaaatgtgtagaaataatagaagattcagtgataacatgctttgggattttaaaatagatactttgttcatggagatatattaagaatgttggacattgctgattaacggtagcttgcaatgttgtatggaaacaacctagagaatgtccaaagattattgatattagggctggtgctgtaggtagtggagaacttgcctaagcacgaagccctgagttcagtctgtagcacctccctgcatttgggagatggaggcaggaggaccaggagtttatggttgattacatggtgagtttgaggtcagcctgttttgcatgtgctcctgtaatcaatcaatcaatcaatcaaattattgctggtgctgatgtcttaacctgagcctgttacattggtgaaccttaatgtataaatttgaaagttattagctgggcatagtgaacgtggctttcccagccccctaggaagcagaggaaggtgaatttctgtgagtttgaggccagcctggtctacagggagagttccaccacagccagagctatagagtgagagtctgcctcaaaaccaaaaccaagaaataaactataaataaataaataaattggaaaaataaaattaaaaaatagaaaactattgaattcatggaataaaattaatctgggaatttaagataactaggtttaaaatattataaaaacacgtgtaacaaaattaatcatttttgccttttttccagtatttcagtggtattaaggaaattgacatggtggtacaattgacatcttctaccctttggtccctttgtttttatttttttccctcaaggtttgttttcttgttttctttctttctttctttctttctttctttctttctttctttctttctttctttctttccttccttccttcctctccctctccctctccctctccctcttccttccttccttccttttattagatatatttattttatttatatgagcacactgtagctattttcaggcacaccagaagagggcattggatcccattacagatggttgtgaactaccatgtggttgctgggaattgaactcaggacatctggaagaccaagcagccagtgctcttaacccctgagccatctatcgcctaacttttttgttttttaatgagtgttttaagcacctcatataagtgaaagtatatatttgttattttgtatctgacttatttcacttggcataccttcaagttttatccacattgtagcatgtgggaggttttctttttttttcctttaagactaaacaataactcattgttcatgtagtgtattgtgtacttgctcattgactggcatctgagtcacttctcattttgactgtttgttgtaaacactagtgtgctttccttaggtccctgtttgtcattcttgtggttacacactcagaagtcaaattgctgcattttatgataattttaatttaattatctgaaaaattgccatactgtttctcactgtggctacagtgtttgacattttcattggcaatattagagtttcagtttcactgcatccttaacaatgcttgttatttactggttgtttgttaagtaaccatttttgttggtgtgaagtggtatcttctgtttctgatgtgtagttccttaattactatggctattgagcatagtttcttattggctgcttatatattgtctctggaaaaatacccaactctgtcaaattttaattgttaggattagtatgttttgctttttgtgagtcagtactttgattttgtgacgtatacatgtgtgtttgtgtatgtgtagaattagtagattaatcttggagatcaaaaccagggttcatatgtgctagactactgctgtactactgggccgcatccctagctgtaagcttttgattttaaaataggtcatagcttggtgtggtggcgcatgccttgaatgccaacactagggaggcagaggtaggcagatctctctgagttgaagcccagtctggtttacataatgagttccaaggcagcaaggactacatagaccctgtttcaaaaataaaaacaattacaacaacaaaaccaagtcatagaaccctctttgggcctcaaattctctaccagcaaaatggaagattgttatttctatagcttcctaacacatgctgagaacagatcatttgctccatagcactccacacacaggcatgtgcatgcatttatggaggcacacatctgttatcctgtgatcttggtacttcggaagtcaaagcagaagatctcaactttgaggccagcctacaggacaagttcagtgctagtctgagctacatacattatgagaccttgctccaaagcaagtaagcaagcaagcaagcaagcaaacagaaaccttgttactagaagagctgactttcatgttttgcttttttgagatcactgtgtgccaggctgccttttattcctctgcttccttctccctaagtactgcaatgtctagccctaatggagctaactctttgaacttgagtatgtcttcttcatcatcatcatcttcttcttcttcttcctcctattttagaaaataatcttttagggggcctatgaggtaaaggcacttggccaccaagctcgatgacctgagtttgatccccagaatgcatgtggtagaaggaaaaactgacagacacctacaagttgtcctctcacttccacaagtatgccatggcatgttcatagaacatatacacatacatataaaacaaataaaactctgaaatatagctgaggatcgtttctgtgacatagttgttgaggatttacctctgattttggcctcattgataaatagtgtaaacatcttagaaaacaaacagtagtctttaaagtatctaacagtataagtccttggcttgtcattgtagttaaagacatttgtttactttcccctagtgctaattgtaggtgcctcatgggagtatactataaatgataacatttctctctgaaagaagccattctgagtttagtatgtaagtgctaacctacaggtctctgtactgtaatattcttgactagaatattgctttcaatataagaatcttaaaaatatgagtcctattttagatcacttctccctaatatcatacacaagcttggtttataaatcatattgtatggaagtatgaagagtatattggggtcatttgctagcagtatgggaaggacggttttccttgctgggactaagaaccgctcatacacagggtattgttaataggcagtaggaagtaggcacagtgctgcatgactttagaatattagctttgcatggggattccttggtagctagtttattactttatatcagaaagctagtgtttttttctaatttaaaagttaaatggggccgggagtggtggcgcacgcctttaatcccagcacttgagaggcagatgcaggcggatttctgagttcgaggccagcctggtctacaaagtgagttccaggacagccagggctatacagagaaaccctgtctcgaaaaaccaatcaatcaatcaatcaatcaatcaataaataaataacacacaactggggacccccaaaccaaaaaacaacaaaagttaaacagggacagagagatggctcaacagttaaaggtacttgccatcaagcctaatgattgagtttcgtcttagagactaatgtggaagaggagaacttacatctcctagttgtcctctgatccctataagcacatatacaccacacacaaataaaataagatttaattttaaagtttacattaaataaagtgtaatttaaaaagagaattaaggctgggcagtggtggcacatgcctttgatctcagcacttgggaggcagaggcaggcggatttctgagttcaaggccagcctggtctacagagtgagttccaagacagccagggctacacagagaaaccctgtctcgaaaaacaaaaagaaagagagagagagagagagggagagagagagagagagagagagtgttaaatggccaaatgctcattgcatataggttgttagggaatttgagaggttggccttcatgcttcctttttgttttgtattgagaagtgggacacgtgtcccacattaagaactgtttcacccttggtgacacgattagagcctctttagtttatgttgaagattcctgactttggctgtgtggacacacatgagcacatgtgctagtacacatgcactcacacacacagtcttactggaaagttaccaagtaaagggttttttgtttttgtttttgtttttgtttttcgagacagggtttctctgtgtagccctggctgtcctggaactcactttgtagaccaggctggcctcgaactcagaaatcctcctgcctctgcctcccaagtggtgggattaaaggcgtgcagccaccactgcctggccaccaagtacagtttttataaaggaaacggaggaggtgaggaatgagaaccaataatgaaaatttacacttatattaaatttagaattcttttccaggtatttataaattggcagggaattaaaggaattttgagttgattagggtgtggagacaagtgtgtggtaaataaaggaggatttgtgggttaagtatcatggtttacaaggtttggcaaggatcagattctaaaggtattaatgtgctatgctaatgcttttggatttagtcctgaacattttagggagccagtgatgattttaggctttccagttacatgatcatgattagattttagggagatccccagcagcactgtgaagcaaggagataatgtaggagattctgataacgtctccctaaaagacagagttggatgtagtagtacaccctgcaatcccaacacttaggctaagtaagacaaaaggttccagaatttgagccagccttggttacatagcaattctaggccactctgggatgcatagtaaaacataaagaacaaaaaagtatacttatcaggtaataacacccccaaaagacatgtaggtctataaattacaaatatgtagagttaaatctgtaggaattggtagaaacagggaatgatggaacaaagaaaaatttaagattgtattatatttatggtttagagtattatatggagcatagatttgaaaatagacttgaatggttagttataaataagttcagataccgactttattctatagtatttagtttgtatcagtgcaccagattgctatgtgtcaaagacttacagcaaacacagtatagaggaaagataaatttttctttcactaatggtcaccttctgggccagctatgagaaatacgtaataatacgatggtggtgtgtcctttagcaaaaacaccccttgccccccccccccaaagagcaattagaaacagtatagatgtatagatttgttagtgaagtacgtacttagaagattatttgaacagagtcccaaagaaggtgattttagagggtttaagaagaagacaaacactgagggtacgaaggcagtcctgattaaggaaactggaagactggacccacagaggtggtatgggagaactgatgactcttgaagggaggtggatggctgtcaccatgggatatgggaacaacctggggatcagatccaggctctgctctctttttaggaatgaaaattccattttcagtacagagttcttcatgttaaggcattcttgtaacatcctatacttgttttttgtctcatagcacctaacatcactaagttcatgccttagtacagtgcttaacagaaaatattagttggatgaaggaataacatttgcactcacttagaaggttcatatgtactgcatatgggtgtgaatgcagcactgtttagtgtagagctgtattaagagtctgtgtgtgtgtgcgcgcgtgtacttaattatttttaaacatcgtttggggataggcttgtgctcagtatgttcttgatagcacaggtacctcactattgctaggacactggatagcagcagtgctggataacttcaataaaattgagtgctttagatgagcactagcaatggatgttttggaggtgaacagctgtcagagctattaaatttctttacatatcttggcttaatgactaaggttatactcctttatcatagtatctgtatataatcttcataattcctcagctaaaacctattccaataaagtaagcattgtaatcagaggaaaacaagtttaactgttaatcctggagagattgccgagtggttaagagcactaactgcttttccagaagacccggggtcaattcctataccatctggcagctcgcagctgtctgtaactctggttccaggggaatcagatgcccacttttggcctctgagagcactgcatacatgtgatacacagacacatatgtaggcaaaatatatacataaaataaaataaaataaataaatcttttaaaaacttgtttaaatgttgtatcttggatcagatccttaatcagaaaaaaaaaaaaaaaaaaaaaaaaagcttaagtggttaatccagataatgactcgttcaggtcagtgccttagaaatagagtgtggcttctgaaaactactaatagattggggacctcctatagtgtctctttattttttaatacatttttaattattctgatatgtatgtgattacatgtacaaaaactaagctgagcatggaggcacatcagtataatcacagtacttgggaggcagaaagcagagatttgggagtttggggcaagtccagactattaagacctatttcaaaaatggcagcaataatcacaaaacataagcacagcaaacttgctaggtaagaaagatgtagtgatcaagaactaattagtagaattcacaatttcagaaaagttgaaaaaattgtaatataaatagaacctaatggtattataaaacttattcccagttcaaatacctcaatcccatttctataagatgtctggttttatttttttgcttcttgtttagttctcataattaatgccatagctccagagaatcttataattctaggcctcagtttataaatttcagacattgtttattgttaattgataaagacaagattaatttgatgtcagctgctttggctttgtattgtgtttattagtgaaacatctagactagtcaagtgcaatagtgaggaaggaataagagaacaaagttgacccttgtgacccatgtgagtagttgatgcagtaacccaccctcacaccagcttctgtcaggtactttagtgacttccataacactttcaggttcagtttcttcttttggctttagacatgttgactcctactatctgatggaattctcagttctattactttctactttaaaaaaaaaattggtttttaaggcagggtttctctgtgtagcgctggctgtcctagaactcactccataaacctggccttgatctcacagagataggttctactgccttttgactgctggggtcacaggtgtgtgccaccattggcttttccgttttattacgattttctactgattttaggtctctatataacttttactataatttaatttctttatgccttttcctgaaaaatattaaatagggctagtgtgtgtatatatagtatgtgtatgtattatatattggtttggagttgattaatggtcatttaaggaactggctttaagatggatgcttaaggcagatgtgtgggaaaagattattagtgtatactgccccaatcccttttctccctctagattttcttaccctttaatttcagaatatatctgctgtccttgagaatgtattttctaggttctgacaaaatgaataggccatctctcctacctagctcatgtgcctcagccctgagagtttattttctaatttgctttcttgacttatttctgtggtcatgtaataattgcatatggtatacctaacttattttaactggtttcttaaagctatttgcattatgaatagtgttgtgaatactttatctttgctggtaatggatactttctctccccctacagataataaagacttctgagctaatgtattcatttttgtggtttaacttcttaataaagcaaagcatgttgagttggtaatataattcatttagtagagtgcttggctttcatgcatgagacctcatgttcccaggatccagaatcagataaacaaggcattggtcacacatgcttgcaatcccagcactcaggaggtggagttaggatgatcagaaattcaaggccatccttgactatatagtgactttcagaatagcctgagatatatggacttctgtctcaaaataaaatgaaacattaaaaacaaagaaaatgattttattctatttttttgctattaatcatcactaaactataactttttcttctttattagtgaacacttgtcctgctctttcacctttttcttgcatggagacagcaatgtttgtaccagtgtggaaattaaccaacatcaacctgtataccttctcagtgaagagcatgtcacccttgctcaacagtctaatagcccatttcaaggtagattattttattgccataggcatttgatttcttattctcatttcagtattggagattaaaactttcatgttagcaactatattagtaagacaacaaaattagtaccattagtgaaattatttaaaattcgtatgaatgggaattttcacatttctgtgttttctcctgatagcatattacattatggatatgttagtcatttcaaggctttgtgtgtaagctgtgtttagcatagctacccaggggaacttttaatgtcatttatatcatgaattgttgacctcaagagaagttgttttataaggttgctgattgctttttaagtactggaagtatcttctttaattttaaatgtagtgtgtgttttaaaatttatgtggcagtacttcataaatatttagatttatttatctacattttcttcaagttgcttagagtcagaataaattgaataataggtaaatattcccagttcattttgaaatatgattatattttgattttgtggtaggcatattttaagcaattttcaaaatcttagcgttatattttatattaaaatgtataataaatttactttcttggagtgatgataatagatttccttttttattagtcttacatcattataacactgtttatgattttatttgctgtaaatctttacttactggatatctgctttggtttctagttatcttaagtccatttggactaaatggcactctcacgggacaggctttcaagatgtctgattcagctacgaaaaaattaattggtgaatggaaacagttctatcctatttcatgtggtttgaaggagatgtctgaggagaaacaggacgatatggattgggaagacgattctttggctgcggtggaagttcttgttggtatggattctgatactagtctgaagggggtcctgtgtgtttagattttactaaataacaaaccgctctcttggcattcagtaccaaacagttatttcttgcttatttcctctgcacatcacacaagggctacagcttggctgtgatgactgtctgcatgttcttcctgtacagtccaggttaagaagcacctagggtctgggacacagtgttcctaggaaaacaagggaatgacagggatcacgcctgatgatgaaagtgcattaaagtttctgctgagatgaaaatgagctaaaggaatggtacatttgctcccagtgaattagacaagactggttacctgtccaagccagagttactgggacagaggaacatgctttgttgtccacatgttatagaagggaacaagattaattgtgaaacagttattatttgggggctagaaaaattgacagcctgtattatgtatagtgcttgaatatttaataaaactttcagtaacagaaaatattcctaaataacttctggcattggtgtgttctccataagtcagttctttccagattagcttcagttcatatgtcatgttccaggtgcagccaggaaggagatctgcttctgagtatattaattacatagcagagacaagaagaaaagaggctgcaccgatccctctgagcataattcacttgttaagatgtggcatacagtcaagcctgatagtgtataaagacatggaaggcatggacaatgtataattcagcagataattggaattagtatctgtgatactgtagttaaagcaatctaatacaaatgtcatgtaagggttaccctatgggagttttggagtttttattagggtttgccctgtaacccaggttggccttggactcaacactcaacctgttcaacctcctgagtcctggggttgcagatgtatatcactatgcatggcttttttaaaagttgaaactgttctcattcattttcagtaaattcatgatctattattggaatagttatgacagaaacagtacagatgattactagactttaaagacaagatggtccatgatcttaagtgtccacattacctttattatgtttataaattaaaatttataatacagtgcacattgatcaactgtacatacatagatttttaaaactcatcattacagtagaaaatctatagcttattgaattaaagtacttaatatacaagtctgaggatgtgatttttggatttcaaaatctgcatggaacccaaatacagtattgtatttatctaattccagcactcctatggcaggatgggaggctgagataggagtagacctgcaagctcacagactagttagttagcatggcatatacagtagcctggagaacttgtcctaaactaggtggaaagtgtacactgacacctgagtttatcctctgcaccatagcacgtgtatagctatgctcagagacggatacaatgatatttttatttacataaatataacattagggtaatttttactgcagtgctttttaatgaaagtaattcaatttctgccacagtggtagctgatttgtgtttttttcccttgtttttgtccattttgttttcagcgggtgtccgaatgatctacccagcatgctttgtgctagtccctcagtcagacattcctgctcctagctctgtgggagcttctcactgttcagcttcttgcttgggtatccatcaagtgcctgcttccacaagagatcctgctatgtcttcagttactctcactccacctacatctcctgaggaagtccaaacaggtattaattacactagctgcttcatcaatcagctctggctacaaatctgttcttttgagtacatcagcacttagcaatttttattttgaaattgttaaaatttactagaaaactgaaagtataatgtaaaaaactcatctaaatttatacttaacttttcatgttctgtgtatgtatccattgtcttctctgaactgttagagaaaaagctgcagacttggcaccttatgattcctacatatatatatatgcattttcagaattaagaccattctcatacagatgtacataatacaaatacatgtgcactcccacacacattttgtgtatatgtgtttgcccatgatgctggtaattaaacccaggaccttatatatctcttattcaagataccttgtatatctttgctctctgcatttaaagaaaaaaaaattttgacctcagaatgtcactagaattacaaaatagagcaaagattcgaggagttaacaaaaactccaacttgttactttcagtttgtttttacctttctatagcctctggttttgtgtttgttttcagttgatcctcagtccgcacagaagtgggtcaaattttcttcagtatccgatggcttcagcactgacagtactagccatcatggtgggaaaatacccagaaaattagcaaatcatgtggtggatagagtctggcaagaatgtaatatgaacagattacagaacaagtatgtatctttatttctatttgcccatctatctacccacccacccacctatccatccatcggtctatttgtctatctttcactgtgtaactttggctatcctggcactcagtatatagccgaggctggtctatcaaattcacaaatgcttgtcctcccaagtgctgagattaaacggatgtaccaccatgttcagttgtatatttattttgatatttaaaacttgcatgctgcttaatagtatggaataaaaacagaaaaattaaattttaaaaattaaagattaagctgggtggtagtggcacatgcatttaatcccagcaatcaggcagcagagacagaggcattctcatcttctttgtgtttgatgccagcctggtttacaaactgagtccaggacagccagggctacacagaaaccctgtcttgaagaaaaaccaaaaaataaaaataaataaataaataaaacttaaagctgaaattcagttttaatagaaatatactaaggaatttgtaactcacacttcacttcaggaggaagtattctgctacatccagcggcctgtgtgaggaagagactgccgataaaataggatgctgggactttgttgaagccacacaaagaacaagctgcagttgtttgaggtaagtttatttctaattggtgatgcttatatgtatgcatataataataataatatttgttttgggtattatgcaaatatgttaggatttttttccccaaggagaaaattgagaaaagatagccaacaatttcaagctgattagagaagtacagagaatttatggcttatttttttctttatttttttcagatgtgggctatgtatcaactatagatatacttttggtggttgttttgaggctcttaactactgctctggctgactttgaacttgagattttcttgtcttagcatctagagtactaggatcacagttctggccaccatccttgggtcatacatctctggaggaacacattccttacttgcgttatgtctgagaaatcttccctgggatttttatagaagaaataattttcataatttttaaaatagtaaatacattgttgagtttcgtgtagcaggttgttgttcttgggcaactatcagtgagttactaaaataagatcaagaattactgatcttacaggagacttgaccaaaatatcagctttctaattaactgcatttctgaaggtttggtagcagaatggtttgacttgggattctttgggcaattgaactgatttcatattttgagaccttttgataaaatttgattgtaaggcttttgtcaagtttattactttttggcgtattaaaggtagattatatgcttttaccaccacataataatagtggctttggtatctgttactgtactttgtgattggatatgtacctatccctgttttcccatgaaaatcatctaaaggaatggagtccctccaagttgtggccaaggttgtaggtttttttgtttttgttttggcttttatacattaactgggtttacttgaatatattgacagactcttaagtgttgtggtatgtttctatgtagatttaagtttttacttagtttttttggggggttgagccatctaatttttgaaaggcaacactgttgaaaacttgtatctgttggtagattagaataagtatatgatacattaactaatatttaacagattaaactagttaactacaattgttcttgaacataatttaagaacagaattgacaacttttgtttacttggttaaatgtagttcactccctgttttgttgtatggcctatgagctgaaaatgaaagggcctaacttggtggcacaggcctttaatcccaggggaggcagaggcaggcaggtctacaaagcaagttgcaggatagcaagggctgttatacagagaaactttgtcttgaaaaaaacaactgaaaaaaagaaacaagtatttcattaagtttatggtgttttatctgtgtgtatgcacatcttgtgcctgtattggtctgggaggtgaaaggagtatgtaggatcctctgggactagagtcagagacacctgtgaggcactgtgttggtgtggggatcaaacctgggttctctagaagagcaacccccgcttataaccagtgaagtattgttctagcttttggattttttagagagtttgaaaaagttaaaaaaagtattttgtgatacatgagttatgacatgcaaattttagtgtatataaataaaaatttattggaacatatccatatctcattttcatactgtctgtgatgcattcacttggcaatggcagacagaattgactagttatgtatcactgtatgtgggtatacattttgggaaattctggatccttaggcaatgagaccactggggtgtgcgtgcgtgcgtgtgtgtgtgtgtgtgtgatgtgatgtgatgtgttgtgtgtgtgtgtgtttgtatacacacgaacagctgcaactcttactgtctagtctcatagaaaagaggtttctttgtctatgtagagatttttattgggcagcttttttcgtttataatgtgcttttgttttagttctcttgaaataatggatttcagtaattttatttgaagtgattttagaggaagacgctaaggaatgacattaacatttcaattcttggccttaagacaaaagtttgctcttcgaaagttacttactttcacattttaaagaaattcctcctaggtttatagagattttcatatactaaattagtaaatgtgattttccatgtatttctatagtttagtgtattatgatatatatgtatgtgatttattcctcatagattagaaagccagtattatttctgggatattttatatttgttgtgctggtggattggtggattggcacacacacatctattgatatttaatttaggacaacagctttcctagactcagaatgcatgaatgaacaagcctcttgctgaaacctatactctagtggaagtgataatttgcttacaaaaattcagttctctttctaaaaaatttaagagtgatatgtacaagtcagaaaataggataatgtgacttttaaactcttgtgacttgaatttactcatttcatactcagaaatttgaggcatcatattttacatataaagggttttcttgtgcttgtactgatctgaaaactgtcttcagaattgttattatcaaggagaaaattttttaattgcatctttttgttggtaagggggattagtaagagtaataggaaaaactctgaaagagatcactttgtcataccatgaaggtgacacatcctttaggaagacttacccacttgtttttagtatggaattattgttagaataattctctgtaaagacgccttacattttggaaaggtctatatagaacaataggacggggactttaatgtcaacaatttaaagagctacttctagtaatatttgtaagtcctaattagtagtttctttctttctttttttttcaaagattcatttatttattttatgtatatgcgtacattgtagttatcttcagacacaccagaagaaggcattggatcacattgcagatggttgtgaaccaccatgtggttgctgggaattaaactcaggacctttggaagaacaatcagtgctcttaaccattgagccatctctccagcctgtagtttcttattcacataacaaagtaaagaaatacggctgtttactgttcctgtttcatatacataaagtatagccatgtatttcacttcgtcaatggagatcctgttctccctacccccacccccgtcccccatgtcctccaaggttttctctatgtagttcctgtcttggaatgctctgtagaccaagctggccctgaaagctggccctgaacttggacgcctgcctcctgagtactggaattaaaggcatgtgccaccacaccccgcttggatatcactattattgccttgtaggaagtagattctcaaaatttatgtcagttctcatttatacttaagcgttactactgctagagcttaaggatgtgactcattggtagaatatttgcctggcatggagaagagatggtttgatctccagctcctagagaaacaataaatgaactccaaagtggttttatttatgtgagcctaactttagatacattttaaagtactacttaataaaaaaataattcactttagatacattttaaaccactgcttcattagaaaaaaatcaggaaacctaatatacatctacatgaacaaagtattttttttaaaagttagattaattaatttatgtgttgtgagtgttttgcctgcatgtgtgtttgtaccatgcatgtacctggtaccagtagaggtcagaagagggtatctggtatcactgaaactggaattccaaactaggagtgccctatgagcacttgaaaattgaaccttggtcctttgcaaggacattaagtgatcttaatgaattactaagctttattaattatttccataaactttttttgaaagataaattatttagattctattttgattgaattttttattttttgggatgtgtgtgagatagggtctctgtgtagccctggctctcctggagcttgtttcacacaccaggctggccttgaattcacagagatccactgacctctgcctcctctcaagccctgggattaaaggtgcccatcaccatgccctaagtcagtgtagtgtagaagctaaagctactttaataaaactgattccattaatgattggaatgatgttttacataataggattttatatcatcaagtattcgtcatttggaagacagtggttggctgagttatgcaaatttaaatgttggaatattttgttatatttaataataaaaaatgtatttatgtcaccagtggcctaatgtaactttccaaatttttaaatgttactcaaaagctcaaatttatcagttgttcttaattaaaatggcaaactcgctgtgttttaaaagaaccttattaagcaattttatcaaataatgaaaaaatggataattatggtttatcaaagattattttcctattttgcatgtgacaagattttgttaaatggccacaggttagtctagatctcatgaagctggtggctggcctcatgctgatggttattctgccatattctccaagttctgggttgtggtattcagtgccaccatagtcaactcagtgatttgtttttcaaataaaagtgttattccatgaagaaaaaaacagctagtttagctttgacctcaagtaacaatgtaagtaattttcctcaaagcaatcattaaccttaattgtgtagcagagaggctgcatatggacccatttcttcatacagaaaatggaaagcagtccaagtatataaagccgctgaagtttaataaaatgtgatcctcccctcggtttttgtaggaaaaaaaaaagagaaaaactgagtttaaagtaaaattggctttaaacatatcctaaattgatagagtgcatatctagcatactgtaccagctctgggttcaaacctctgtacatcataaaactcagaaaacacaaatcaagaaatgcctgtgtatctggtagcgaagacaagcgctctcaccgctagcacatttggtactgttcaagggtctgactgctgctggtcttgttccatcactgtgtcagtataatgggaaaggcaataatgttctgctatgaaaatcattttaactgggtgtgatgccacatatttataatgtcaccaggcaagaaatcctgtctcaaaaaatcttttaaattaaaagttttaatctctacaacaggcaagtatttgagtaactaagagatgaatgatactgtcattatttttatgctaaattattctattgtttcttttggaggtgtctgtgttacttttacctatctttatcttctcttaattaggctgccatagaggtttggcattctatgtttgttcttgagtcctatggtacagtagtatatgctgttaattactgaaccctatttttcagcatctaggtcatgttcttggagccacatacaaggcatttttaaaaaaaattatttatttttattttatgcacattggtattctgcctgcatgtatatctgtgtaagggtgttggtttccctggaactggaattacagatagttgctcttaaccactgagccatctctccagcacaatacaggacatttttattattgtagtagaaacttgtcttagagtcagcatttttggcaagagtacttcatagacgatggttttgtaatatgccacatgagaagagacatggggtctggttacccttcttctaagaatgtttaatatttttaactagttgtagtggcccatgcctttaaccccagtacttggaggccaccctggtgtacagacagttccaggactgacagccatggctgcatagagaccctatctcaaaaaaaaaaaaagtttaactttgactacaagttgatactttgacctttgcactgaagtttctatcaactacaaatacagttttgttctcttgagatctttgatttctttttttttctaaaagatttatttttattatttttaattatgtgtcttgagtgtatgtgcccattagtgtgggtacctgaggagggcggaggcctaggattccctggagctagaagagttccaggcaattctgagctacctaataaaggtgaaggaggtctcaaccactgagccatctctccagcctaagatcttttatttcttttcttgccttgctgtgttggataactttttatttaaatattaagcaatagtgcatattacttggttattagtaatagttcctttgttttctcatttactctgttaatgtaaagaataatactgatttattttcatttcttttctattgccataccttaaatttttagctaggataaaccccatttgctttatgatgaatgttttatactttgctgggttgacttgttcctaattatgttaattttttgcttctgtgaatgatgtgcacttctgttcttgaagaatattggtctatgattttcgtacattgtctttgattttgctgtttgggtaatggtgaatttggtttttctgtgtccttcggatattggtcatgtttcctttgatagtatccagtgagatgtcccagaccttgtgtgaaagaactattcagagtgttctttatcagaaacttctgtggaaataaaactggttgccatttttaaaaaccgttttgatttattacacttgtgtattgggggtgggcatgcacacgcagcagtgagaatgtggagatctgaagacagcctgtaggaattgattcttgccttccctgtggcttttcagaattgactcaagtggttagcctgtgctaatgttctgttgtagatttgatttagctaacaaggctcccagaattaaagaaaatatactactgaatttaaaatttcatattcaactctttatgaagtaatttctttgtgtaaaaagaaatttgaaaatacatatatatcttagccctaacaaaattattagattttaagatatggtttaagtccttcagttcagaaatccttcatggatgaagaacaggttgttttaagcatttcttttccttttctagttaagtgatttctcctgcagtgccaaatactgggagaacctaggtagacccatctgtcagtcaattctagcaccttttagactaatcagttactatagtattgtaattaatgactaagcttgggcaagccattcttaatagttactaagtctgaaaaaccaggtatatttacaaatgaagaaatttcaaatttccttatactttttatcttaactagattcatcgagaagccaagatagtaagatgatgtaagttagctagctatttgatcccagagctattaagtgaatgtgagttgatttaaaattcttttagaagacaatatgtgcatgagtgttttgtctgcatatatgtatgtgtaccatatgtatgcctggtgcctgaagaggttagaagaaggttccttggaactgtagttaaatatggttgtgagttaccacatgagtgctgtgaattgaaccagagtcctttgcaagagccagtgctccttaaccatcacaccatctctcctgttctgcacatgggctttatgaattgttctgtacaagcgatttgtaaattcaaatcatcatatttttagagttgcatatgaaaaaccaatgaccttactgtctcaaaatcttactttatatattttgtctaatagttgtatattaacataaataacctaaattttttttttttaacttttcaggcataaaagtctcaagacaagaaatactgggcaacaaggacaggcaccatctttagggcagcaacagcaagtacttcctaagcacaagaccaatgagaagcaagacaagagtgagaagccacagaagcgccccttgactccctttcaccatcgtgtatcagttagtgatgagattggcatggacacagattcagccagccaaagacttgtgatctctgctgcagatagtcaagtgaggttttcaaacatccgaactaatgatgtagcaaagactcctcagatgcatggcactgaactggcaaattcacctcagcctcccccacttagtcctcatccttgtgatgtggttgatgaaggagtgactaaaacaccttcaactccgcagagtcaacatttttatcaaatgccaacaccggatcccttggttcctaccaaaccaatggaagataggatagacagtttgtcccagtctttcccacctccatttcaggaagctgtagaacctaccgtgtatgttggtacagcagtaagcttggaagaagatgaagctaatgtagcctggaagtattacaaagtcccaaagaaaaaagatgtagaatttttaccacctcaacttccaaatgataaattcaaggatgatccagttggaccttttggacaggaaagtgtaacatcagttacagagtatgtattttttgtttttaatagtcactactatcaagagtaaaaagtgatgtaagttcttaatgctgggatgctaggcttggttataggataggatttataaaaacagatattcttggtatttgaataatttctttaatctctgaagaaacctttttattattaaacatttagccacaaaaatgtagagaaaataatgtgtcaaaacttcagtgtctgtcacctaactaagggggttgcctatgacaggatccatctattcttctagttcttctttcactggcctgaatttagcacttatttctacacatgccttaagacatacttagttaatttgtagaattgctttgttgatcttctgttattagtggatctgctatagtatgtctacttttagatggtttttcttagcaacaaattaggtagcagtgaattggggagggtggatacacatttgcttgtatagaatttctttaggaagcacttgtgaaagaggaattgtcacatcttgagatgtatcctttttcaatgaaaggttttagagccagtttgctcttcaaacaactggcctacagtttgtaccatcataagccagtagaccatgaaaatactgttggttttcatttttatcagaccttggcagaagactattttaactgcatgaagaatggcaaggcattattttgatgcatgtttgtagatttctagtaatattaaacatcatttaaaattttcgttgaacgattagtgttcttcatctgtgaattacctgcctaaacttgaaggtttccctttcttactttattcttcccatatttttggtcctagtcctgtactactaaatgtaatatagatagctctctatatctagtttgccaactttgttcacttaatatgtggcaaacttttggcagaatgtggctttcttttgggttttcctttcctttatatattgcttggaatacaatcttagcctacccaataaggcctttttatttttaatgtgtaaatttttctaatagtgtaaatcaaccagcaaaacacctttatagacaatttttggggggggggggttggtttttcgagacaggttttctctgtatagccctggctgtcctggaactcactttgtagaccaggctggctggcctcaaactcagaaatccacctgcctctgccttccaaatgctgggattaaaggcatgcgccactaccacccggcctttatagacaatttattatgagtatggatattttgcctgcatatttgtgtgtgactctgatgacatcagagcccagaggaggctgttgcatctcctgaagttgcagacagttgtgagccaccatgtgtgtgatgctggggattgaactcctgtgctctgaaagagcagctagtgtttttaaccattggcatcccactgttagtcttttttttttttttttttaatttatttatttattatatgtaagtacactgtagctgtcctcagacactccagaagaaggagtcagatctcattacagatggttgtgagccaccatgtggttgctgggatttgaactcctgaccttcggaagaacagtcaggtgctcttacccactgagccatctcaccagcccccactgttagtcttaatgtcacatgatgtattagattttattagttgcttaagattgtatacatcctcccttttttgtgtgtgtgtttcctgtagtcctgggcatccagttcagttctgggtgaatgccaggcaagtagtcttgttactgagcaatactcccaagtgcttggtggcttttgttttagttttgctttgtgtgcatggaacatttcagcctacagcacatgcatgcctactaccctcagaaacctttggaacctaaggttgtgaacctctatgtgggtactggcagttgactactgttgctctgtaacactgggaagtgggagcagctcctagagctggattcacagtcaggaaagaatggttcatttcttccttgtggtcttgggtgctctatagagtcagagaaacttatctagtaacaaactgtagaagcagtacctggaagtgtagtctttttaagacgttaagtacaaaggaatgtgtttccttatgccatttgcataccattatgtcatcatcctttgtcagtagctcctcaccacagcctttctctgtgctgtccatctctgactggttccctttctttggatagtagcctttcattgtttttgttttttaagtcatgtatttcattactcttttttaatcttttcttcccttaagatctctttctcacctcatgatctttttatgaccttcatgacctacacacacatacacatatacctgtgtatatgtttacacacacacacactcacacacacacacacacacacacacacattccatatgtaagaaaaatagctcatcccctttctgagtctggcttattttgcctaacataatgatttctagttctacccatttttctgcaaatgtcatttcattttctttaatgggtgcataaaatttcattatgtttgtaccatactttattcattgatggatgtgtaagctgccatcattcgctggcttttgtttaataatgagtctgctataaacacacttgggtgagtatcttgatggatcatatatggtcgatctctacttttagtttttttgaagaaactttatgagatttccatcatgcttatactagaagcaaggaagtgtttgtttccccatatccttgccagcgtttgttgtccctccccacagtttttggatagccattctgactagggtgagataggatcttgaatttgcattcctgaactgctaagcaacattcaccctatcttctacttgctttctgatttagccacaatatcttcttttgcctctgcctcccgagtgctgggcttaaaggcgtgcaccactacgcccggctaatatcttctttaaaaaacaaaaacaaaagaaaggccaggctcatgccttatggtttttcagattacattagagaagcagagaaccatttactttttaatcatttagtgttgcttgagagttgttggaaagttttctgattattctgtccaagctatggtctgtcttcattctgccaaatcactgcctctcttatatagtgttttttaaaattggttggttacatttttatgtctgaaattatgcgtttattagtggaggctgttccttgttaaaatgtaagctctacaagggcaagtgctcttgtttactgctctacttctcttaacacaagaacatacatggtatacaggcaggcttacacctagagtagtcctgtgcatattgtagagatcccacagatgtttggatgaattggatgacagtatggctagacactttactattctacaacttttttttctttccaggttcgattttcttacttactgtagaaatgtagtgatatgaatatttttacattagaaaactttaggaatgagtttttatgggcacattatgttcttaagttctaagaattctggccatagctttaaacacatgtattggttgcttaagcttataacgtttaatctcagactctgttaaaacaattacttcacattttcctcattgaatacaaatgagaagaagcgtagagtagagtcacagcgtgcccagtagactggtactgtgtcatggctctgtgagtttaggacagaacagatttctgcttctgcctacttctggcctcccatgcccctctgtcatagaaaagggaaagacaaacaatcaaacttgaataaaatgtttgctgttagttttatttaagcaaatttaattttttattttgtggaattgtatgtctttttttgttgttgttataccagataggaaactatattctgtcagaattctttagtactaagccttattgttgtagcacaatgatagatgtcacataaagttacataacaggttttgtttctctgttatctcagaagcatttatgaaatataatagtttcgtacttggtaggttagaaataagagcaaggggctggagagatcgctcagtggttaagagcactgactgctcttctgaaaatcctgagttaaaatcccagcaaccacatggtggctcacaaccatctgtaatgagatctgatgccctcttctggtacatctgaagacagctacagtgtacttcgatataataataaataaatctttaaaaaaaagaaaaaagaaataagagcaagagattggtgtttgttgccttgtggttccctccttttccctggaatcactggaatggcaggaattctcaggtgacactggtcagtgtccacttttagttgtcagagctcaaggtgtgttcctgacatctggtaggttgatattagtgatgctactaagtggcttttaagtgtacgtggtagtatcccacaacaaaaaaattacgccgcacaaagaaagggctgtgttatcttaatgtgtcttaaaagatcctttattataaaaagcttgcaaatagaaagccacataccaaagttacaatgggctttaaagtctgtataacttaatgaacttaatatagttaaaattagcgtaaaatatatttgataatgtggcttttaaagaaatttgacccctaaaactattagcaaattaaatgggccaaatgtatgtaataattaggttctttagagttgtactatttggttgggcagtggtgggacatacctttaatcccagcattctggaggcagaggcacatgaatcacacacaaatctctgaatatgaggccagcagagtgagttctaggacagccgcttcataatgaaatcctgtcttggaaaaacaaaacaaaaaacgaggagcggggagtgtttgtgtgtgtgtgtttgagagagagagagtgtgtgagtgagagagagtgagagttagttgtactattttagttccccaaaccacttgtgaaataattgacttggtcattgatgtccccccttccccttttcccctttcccccttccttctctcatttatttatttatttatttatttatttatttatttatttatttatttttgagacagggtttctttatgtagctggtgttcctggaactcactctgtagaccaggctggcctcaaattcagagatccacctgcctctgcctctcaagtgctggtattaaaggtgtactcctctaccaccttgcagttttgacatgtttttaaacagcttaaggctgcaaattatttgcctttactagggaattaggaacaagaagaatgggaagaaatatggacattatagatgaagttgtttctctaaatagaagtgccttgaaacaactgataacatttaaaaagtaaggtctttgtgaatagttaagctctggctaaataatgacatccttataaaagaaggggaaatatgtatatagtgatagaagagagtctatagatacattataaactttagatcttcggtatatggtatgtgtatgcatacatgatctttggtcattaattagatgatataagcagtacctgttttcctggagagggatcagcatactcttgatctgtccttctgtccttatgactttatagctatgtgaatataagacatggacactgtaaaaatatgtctttagaaatgtgaaataccagcaatttgtacatatgttaataaacaggtgaggcatagatggtacagggaaggaatgcattagaagaattattttcattatgagtgttgccttttgtaggtctgtaccttcaaggataattgtcagtttgagaaacttaaaatttgtgtttccattggtgtaaagaaatgatgtttactgttgatgcttcaatgtggcactatgccccgtaggtgggcggatacaccagagccatggatgagctcagttggaaggaagggtgctttcttggtggtgtgcttgaagctaggtctctctgagactgcagttgcaggtgattgtgagcttcctgtgggtgctgaggatcaaacccataacctgtgggaagcaggcttacgctgcagtgcttttaacagctgaatcagtacttgagccccagtattctacagttttagtagttttggctgcttcactagtacagaataatatagttaattatttctccgtaaaactgcattcttaaactttcatgcatagtactttgtgagagctttttcatgagctatgctgaattatgattccttttctaatctgttgttgttttgttttgtttttttgggggggggaaagaggttcgaggcagggtttctctgtagctctggctgtcctggaactcactctgtagaccaggctgtcctcgaactcagaaatcgcctcccgagtgctgggattaaaggtgttctccaccactgcccggcataatttactaggagaaagggaaagttggggatatatagcagtatagcatatcccatatgcaaggtgtatacatctgtgatgaatatctttatctttttcctggtcattttcaatttgttagttatgattgaaactgttttagaatagagactaatgactttttaaattgtgtaggttatttagtttgtggtttttttttttgagacaaggaaagtcttggtacttttgaacctgcctgcctcttgcctttttttgcctcttgtttcctgagtgctagtattatgtgtatgctctaccacctctggcctagagatttaaaagttaaagatagcccttgtgcagtgcacattttttattccagtaatctctttaattcaagtttaaacacagcctggtctacattgcaagttccagaacatagagggaccctgggctacatagagggaccctggctcaaaacaaactaacaaacccaaaaatttaaagatagaaaaattcatgccaagaaacatggttgttttgatattttaaaaagggatttagcatgtttcaatgtaatatgtagatgcctaaaaacaatctatttttatttagatggtgtttctaaaccctgagcaaagacagcttgcttgagcctagctcttcacattttcttctacagttaggatacattaggattttaaaattatagtcatcagaagaatccttgtgttatagtaaatctaccagatatttattgtatgtatatagttataaaatgcattatttgatctccgaaaatagtagttttgattgtttcatagaaagaagcctgtgatgaaataaacttgttttcatgtcactgtactcaagccttttaagaattctgtttgctattttaatgcaataaaattatacttttgacagctcaaggaatatttctgaatatggagatggtacgagggctagtaccatttaaagaaagtgggaggattttgagctattcagttcttctgtttttaacatttcctccttagtttatctcctataattgttaatgcatattgtcaaaccttttctggaagaattcttttgaataaacacttaaagttttatgtgagtacatatcaagagagtgtgctgttatcttagtgagaggaaggagatgcaattaatgaaaactatacaggcaatttatttcctagtttgggcttttcaatgcttcctgtcattattgtacctgaacttacagtttgtatttagttttgtatctaattgaaattacctttgtagttagtaatttaatttggctctatgtgaaagttccttttgggaaaggacaggtattatttatatttagaaaatcttctgtgtactgtatatttggatagagacatgataatttgtttgaatctggcactttaaaaattttacttttactaagattttaatatagaatgtataatgttattttacatcaactttattgtgacttgctattaatgagtacatttgaaatttttgcatatgccaacgtctccaagatcacttgaataaaacaagaaaacattgtcttttggcagtggacttggtttactcttctttactcatagcagagctctgtgcagtatgttcactccttttaatgatgttactgcacaacagtttaataattatgtatttaaataatgtggcagtctttttgcttctgtcaaaggatggcttggtaagaaagagaagatttgttaactctcactgtgccattcagtctaagtgcagggtattttgttatcctttaccgtctgggtaggtattagaagacgaatagtttagcacttaagttttaatttttatctttgccactaaatgaccttggcgcacaaactatttgttgttacataattctaatcacttagtgaccaccctttatatccattatagaaagttatttttactaaaaaggggcataacaaattaaatactagttaaaaatattcatattagcatattcaacagtttttagcaaagttattcaaggtcgaatgtgatgaagtagagttacttttcagatacaaatgttcatctgtttatagaaagaactatcttaatgagtaattagtatatttcattgacagttgtgccacaagtgtgtttttatgaaactgtagacttggaatgttagatttggggatttgtctagtatctttagaatagtagtaattgcttgagcatctgataaaacattcaggaaacactggcttttattttgatagactctgtttcactccatagggaaccgagtggaggcagtgctaggtattaataatagattgaagtttgaggccattcatacaacttacagtctgggcagtaacttcctgctccaaactctacataagtcttgtttaagtgttgagaggagatggtgagtggcatcagtctgtggttttccttcggtgtttgttgagggtgtatgtatttaagatgagacctcactctctagctcagtctgaccagagggctgggatcacccgtgtgatcttggcggctcagtgctttctaatgtagaagagtggtttacttcacagtacaagatactaatgctaattagcttagtttcgtgctttgtttatatctcatttattctacattagtaacgactgaccttgtgttttagcatttcttcagtattagagatgattcagtgaaccaagacaagacctccgcctttgtggggcttctattctaatgagagtttgaaagagtaacgtatataatattttggaagataactgccctcggagggtttgactacagtgcagggtaagacagttttaaataggtagtcataaggtgcagagaagttggcatttaaacaaagcactggaggaagtaaaggagatgggtagacaaacattgcaagcaaaaggaagagtcaggtggtgtgtgtccttgtgaggcacatcaaggaagcccctggaaacagagaggctatggagaagcatcaggtgaagttggagaggagagaagagtgagattgtgggagatttggcttgggtattacagactttggtgctgtattcaagtaggttttgcaggatgttgaaaatgttctgactagaagcctggctgccttgttctgacaggttgacaacttgagatttgtaaacccgagagaaaaggaattttaaagttttaacgtactttattcaccgaagttatgattttgtattcacattctggtctagcatataaacagtgaatattgcagttcagaagtatgggtcctgaggcttcacagagcttgcccagggtcttcttgtggctcctcccatcgtttagctttaaaatctgaggcctagatttctttgatatattagcttcctcttgtttataacttgaatttctctgctgtcctttctgtggttttgtgtgcctttgttgttttcttagagtataagtgggagcatacttttttttaaatcactgtttccaaccaggagactggtaatatacaaattaatcttccagagtagcaggaagaaaactgagttactttttgacctgttgcttttattttgttttgttgacctcattattaatagcaataatgttattttcataaagtagaaacaaggccttaaaatttgaagcttaaaatgtatctattctttgcaataagaaaaggagagttattttccttgtacagattttatgagagtatcttgtctttgaagattcttctcagtaccagctttggacaagtcaccgtgcttgagaacatgagaacagggcacatgattaaaaggcagcttgttctggtggaaggacaatatgtggagacttgggttttagtttcatttttctgttgttaaaattgaggttataataaatcatattacctcagtttcatttgtaaaattagagattatagggtaaatactatgagtaattctaaaaacgacacttaaagttgttttagaattttcaagtgcttgtttggataacaaatactaattttctaactgtgttttctatgcaggttaatggtgcagtgtaagaagcctttaaaagtttctgatgaaatagtccagcaatatcaaattaaaaatcagtatctttcagcaatagcatctgatacagaacaagaacctaaaattgatccatatgcatttgttgaaggagatgaggaattcatttttactgataaaaaagatagacaaaatagcgagagagaagctgggaagaaacacaaggtgagtaggagagattctgtcctgtcagtgtacacactgccgtgtactgcacattggatgtcaccctcagcactgcttgctttgcttttagtggttttggttattgaacctgggcactctgtcactgaactgtgtgcccagccccactcatttcttcttcttcttcttctttttttttttttttttttttttaagatttatttattttatttatgagtccactgtagctgtcttcagacataccagaagagggcatctgatcccattacagatggttgtgagccaccatgtggatgctgggaattgaactcaggacttctggaagaagagcctgtgctcgtaacctccactctacccaactcacccatttattcttttagaatagaaagattgatcatatgtatgtagatatgtttatgtgacgatgagtaaatcagttgtgtgacacactttgacttagtttctgatgacggagttgtattttaatagtggatgaatagtatattaactttggtcagaattagaacatttaactgcactgtcttggtgctaggtttaataaaatgtgggatatttttgagtatgtgatttagcaagattactttcttcttaaaagcaaaaactttataaagtatgggtaatgaaactatcatctagggctaggctagtgagatgactgagtgagtaaaaacacctactgcctagcctgatccctgcgccttacgtgatggagggagacatctcctttaagttgttctttgagcttcatactcatggtgtggcatagatacacacgcacacacacacacacacacactgtaattaagattatgcatatgattaaagttttaatattaggcaataaataacttaagaatttggcagtaaatctaaaatataagcattgaaaactaaatgtattaaatgatccagtgtttactacaaagcagttcatttcacagagttgtatctagctgtactatatgccagttacttagtcttatctttttttaaatatgaaaccagtactgtctgggaagggtatatccacaatttaaactcaacacagactcgggaaatctatactatgtcaaaagttccagtttacaccatcagctatgatttctgtggcagattccttagcatccctgtgaattaaatgattgatttgtaaggtgagaccgctgattgtttactttaagaattagtgatagctaaatgtaatggcatacatgtttagtcctagcactcaagaggctgaggcacatctccctgaatctgagactagcctggtctacatgacatgttcctggccaggcagagatcccgtctcaaaacaaaaaccccaagtgaaccaaactaaacaatagaaagagtaacaagccccatatagtggtgtgtgctttctagtctagtgtatgagagactgaggcaggaacatgacaaatatgagggcaagcttgatacattaaaccttgttttatacgcaacttcctgactccaaagcaacacaggaattggtggtaatgcatttagaacatttataagaatgtttgacacatagctactcaagaattgataggtttttattgttggtaaaatatatagcactgcccaatctataacactgtttcaggtggaagatgggacatctgctgtcacagtgttatcacacgaagaagatgctatgtcattatttagtccctctaaacaaggtaaaacttctttctaatcattcattccagtgatgatttgattatgtgatttaggaaaagcacctattgcttaaaagtcaaagctttatgaaggatgggcaatgaaaatactcatctggggctggtgagatggctctttgggtaaagacacgtactgcctaacctcatgtgacactgttggatttttaaataatcctttttgcacagtatatttcatggtatggttagatttattgtttatcttgtatttgaagaagcaagttcagatgatagcattttcttagaaattgagatgtatatttactgatttttggctaagactaagtattattgagcatggtggtgcatgtctttaatcccagcactctggagacagaggaaggcagatctcttgagttcaagctatcctggtgtacagagtgagttcaggacacccagagctacatagagaaaaccctgtcttgaaaacccaaaccaacaaagaagaagatcaagtgtaaattgttggaatgttttcctttttttttttttttttttttttaatagctagaaataggtctgtgtagtgagataagagcctaaggttttctgatctgaaaactcaatatttaggactttggggtagatgatcttttattttaagtttcttttcttgtagtccgacctgatctcattcctgagctcttgagcacctgagcccctgggattacaggtgtgtgtacctggtctgcagagctcagtttttaaatgaagcttagaaaactttctgattcttctcatggcttgaatgtatcagagaactttttcttttcttctactttttgttgttgttcttttagctttgtttttcattttttggtgatgtgaccgcgtacagcctttgctggcttctatgtaacacacgatctggtagcggctgcactgcattgaatgtcttttctcatgcctctgcttcccaagtactgggattgtaccatgtgctccatacccaaccaaggattcttttctgatgctattagttcagcttcttgttttgttttgctttttttatttgtttttttggaagcagtttctctgtgtaaccctggctggccttgaactcagagatctgcctcctgggattaaaggcgtgtgctaccactgctttgcagtcgagcatatttatatgttcagactgtagagctatagtagtcaagagtcctttgaaagtatctgtgtgaagaaggtatctaattttaaaaattgatagatagataaacatgatatagcatatgtatatatatttatgatgcatagtttgttgctttctgtggatattttagtgtgctaatcaagctatttaatacgtatcatttcatataagtactttttttggaataaaaacacgaagattggttttttttgttattaccagacattaagcatactataaacgttagtatgtatcatttacattaagcttttgaataggcacagtttatcttttggtatgtgtttttgaaggcaatattttgttttaatattttgagaataaagaaatgaaaataaggaaaaaattatgtaaagaaggagcaggtagtctttcataaggcagcttagtggctctaagtattggtgggtgacatcttagattctttgatgaaggggtctttatcaaatttctagtggcatgttgcacagagatgaagtaaaaaaaaaaaaaatcctggactttgtattgaggctcaaaagaatttggtactgagtaaactcaccaaggtgctgagccaggattttggtatatggctgtagtcacagcactcaggagttgacagaggagttcatgagtctgagattagttggtgcacacagtaagtgtcttactacccctctcctcaataaaaagttgattttcagccatgtgatggcacacacctttaatctttcgcagcatctgggaagcagaggcaggctcttgagttcaaagtcagcctggtctacagagtgagtctcaggacagctggggccacacaaagaatccttgtcccctcccccattggtttattatattgtttgacttcaaaatatactctacagctaatagtagtatagcactggcattaaggaaaaaggtcaaaggcataggccagtaaaacaggggaggggctagacgtaaagtaaacatgtaatgatagtatagtatgttttactacatgtatcccatataaattagccaaatcggggtattttgtacttagtttattaggagccttaaagcccctcttacctagttttttttttttttaattattatatcattataggtcaaaattctgaagtacaatcactcctctatgctataagcaatagaacctattccttctatccaattctattttggtatctattttgtatcctctattttctctcctctattcttctcaaccactaagagttatacacacacacacacacacacacacacacacatcacacacacacacacacacacacacaataacggaaaaaaacataccaagcctttagacaagtagtgatactccattattatctataaatatttcttttttttaacagatacttaacatgtattcatcatacataattagcttgatattctgtgattctatcatctttattacgatatttacatgcagccttatttgcttaaataaatcccatctgtttcaaaatgaaaaaggcctggatagatggcttagcttttaaattgtttgccggacaagcatgacagtgcaagttgggatcttcagtagccacataaatgtcaggcaagtgtgatggagcctgcctgaaattctagcatcggagaagaggagctagggagttcccagagaaagctggatagctggactcattgaatcagtgcgctctaggttcaaaggagagaccatacttaatgtataagttaggaagcaactaaggcagatgccccatgtcaacctctggcttccacattatgcatataatgtgcgcaggtacctgtgaatctgcatatattcaatcacatcacataacacacacaaaaaaggaaaagtatgtgtttttaagtatcattctaatggcatttgtatttttatgaccttttctacagagcttaactatggtgtagattatgtaacttttggagcttcctcgggaagctttatttatgagaaaagaatttcagattttaaattagtgactagaataatcgtgttgcatagttgttgtgaacattaggttttctctcttgtttagttaaacagaatactacttggctaatagttgagttttcagtttatttttttctgattgtcacatgtagatgctccacgccctacaaatcatgcccgtcctccatcaaccagtttgatttatgactcagatttggctgtgtcttacactgaccttgataacctcttcaattctgatgaagatgaattaacagtaagtatcctactaatgattaggattaagttaaatttcattgatttcataacagtttgagttttggaagtgatttatgactttattactatgttttagctctgaacagtaggaaatattttataataaaacacatttgattgatttttactctcatgttaaagtcaccttgacatggtttcctgtaaatcttgatgtgggtatgtttgaaagatagatgatcaagtttcatagttctaccatgtaatttttttttcttcagtctttagaatgatttttctgttctttgatcctgtagtttgagaggtgactctggaattgaattagagaatgtttaagtaattaacattaggactttataccttaccaatttcataaaaatgctagttcttagccgggcgtggtggtgcacacctttaatcccagcactcgggaggcagaggcaggtggatttctgagtttgaagccagcctggtctacaaagtgagttccaggacagccagggctacacagagaaaccctgtctcaaaaaaccaaaaaaccaaaaatgctagtttttctcaaattatttgaccttacttctgttactacgagacatagtcttgaaaatggtaaaggagaaaccagaaaatactacttcatcgttcacacctgttttcagagaaagttgaagataaaagtaaacactttagggctggcaagatggctcagtgggtaagagcactgactgctcttctgagggtcctgaattcaaatcccagcaaccacatagtggctcacaaccatccttaatgagatctgatgccctcttctggtgtgtctaaagacagctacagtgtataatactgtatacgtataataaataaataaataaatcttttttttaaaaagtaaacactttaaatgatttcctagaatgtcagtcgtctagcagttaattgggtgctacagtgtcatgaaagggagtcctttcccatctacttaaaagtagtttaggacctgactggcatatttggtgtttgttgtcttatataatatatcctgtgaggatatctattgcacatgtttgaacatatgaaatctattacagatattggtaagtcagatatagctctatgtgaacattcactctttaccctccagtgtagtgtgtactagggcacgcttcactaggaaaagaactttgaatatggtccatatagacagatcttgtctctactaacacccagacagcagctgtggctttttggaggtaaaaaatttgtcatgtgtgtgctttacttacaaagtgttcaacataagacgtggaacaaacgttccttctaaaaacattggtaagagctggatatggttgcacatgcctttaaaccccggtcttgggataggaggccaaagtgttgggagttcaaactcagctttgtctacataaaaacaagaagcctacttaggttatataaggctttacctatctcaaaaaacaaacaatccaatccaccaaaaaatgttggtggtgagagatgctaaaacttggtttgttaggaagtttccctgaacttatgctcagtattagatctgtaaaaatatttttgctagaataactttattaaaccaaggtgaaaattaaagaattaagaggagttattaattatttaggaaatcttaatatcttttaaattaagggacagattctttgaatatcttttgctaaaaaaagaattgtgttaattttacctttcttgccttttacttgtttattgcttattttcctgaggatgcccttttctctgttaatcccaagacttaccaatgcactccagtgatggatctacctgtaaactgtctagtatgatatttagctctgtcgtagactcagaaaaccacttttgatgaccagtacttaatcctttaacttacatataagcgaataatactgtgtgatcactttgggtttcacattaatatgtttttccccccatagcctggatctaaaaagtcagcaagtggatcagatgataaagccagctccaaagaatcaaagacaggaaatctggatccgttgtcctgcataagtaagcatcccaaatctgagctccagcttggcttaaaaacttaactcctttcaaaactccttcactgtaaacagactcacctcttttagtttgttaacatgggtgttgtactacacacaggcactgcagacctccacaaaatgtaccccacgccaccctcactggaacagcacattatgggcttctctccaatgaatatgaataacaaagaatacggtagtgtggacacagcacccggagggactgtcctggaaggaaatagctctagtgtaggaacgcagttcagaatcgaggtcgaggaaggattctgtagccctaaaccgtctgaaattaaagtaagtattttctagaaaagtcatttcctccctgtgttttcttataggattaattgctgtgtttaagaattttttcacagttgattttagtgttatggctaataaatatgaggagggaattgtgggaccactatgtaaaatgcattcaagaataaaaacagataatatttatacttttgtccatttaaagaacaggctagagaagatagtcgctttgattctgtttctttgtttttgtccctggaatataaggcactgaaagtccccgttctttatattgtaggatttttcttatgtctataagcccgaaaattgtcaagttctagtaggatgttccatgtttgcacctttaaaaactctaccaagccattgtctgcctcctatcaaattgccagaagagtgtgtttaccggcagagctggactgttggaaaattggacttgcttccttcaggcccttcaatgccattcatcaaggaggggtatgattgatgatgttattataatactgattgcttgtgtggggtgtgtgtgcgcgagcgtgtgtgtgagcgtgtgtgtgagtgcccgtgtgtgttagagggcggcactggagactctgcatgagtacgagccacatgtgttgccgtttactcacttgagacatggtttctcattggatctgaaacttggtgttttgttgaagcagactgaccagcagcttcctggaatatgcctgtctttgcctcccaagtgctggattatagcttgtttagttagtcatgctcagctttatcacatgggatctgagaatctgaactcatgtcttcagcttacacagcaagcacttttacccattgagccatttctgcagctcagcttttgtttttcttgaagtagctggtatgctggaaatagaacattggttttggaaatcctaagtaaataaatttaaaatgattcttgtttatcataatgataatagagatggattaactctttgagaccatagaccagaaaccatagaccatttttgattttcaaggtaccttttcttttagcctttgattctgaattgtcctcttttttatactgccattttacaattacttcacatcataacagataaagttttgcattttattaccagtcacatttttataattactatggccaactgggcagtggtggtacatagtggcactcaggaagcagaggtagatgatcaagtttaaggacagtcttgtctatagattgagttccagtgcagccagggtgtgctacacagagaaaccctgtctcagaaaatcgaaaacaaaaacaaaccaaaaaatcaaagcaaaacattcactattaccactttctaacacaaacatcccaaaagtcagaatttattttttgctatcagtagcaattagagtcaatgaagtatggatatttgtagcattagaaatttatagatagtaaatatggttgtccagatgtggatgcttcatgaatttttttaagtctttgtgtatccttacatgacttcatgtgcactacatatgtgtaggtgcccacagagaccagaggacatcaagacaccttggaactggagttaataggcagatatgagcttcctgatatgggtcctgggaaccaaacctctgaacctatggccccccaaaatgcagcaaatattttaaactcccaagccatagttctagtcactgcttcattttataatcttgaatctggttgcttattatttttgattctagttagctcacaagaatctttatagtgctcacagtaaacctgaaataagtcttatttctccctgtaatcttgtaatgattaccatatagaaatgtccagtgttgcttggaagtgtatggaggatgctgttttgtgttccatatattaatgtgttcttttatgcatttgttcctctttttaccctggtgacaacagtgatggcagtaatttggatcaggactatggccccgcctacacaccgcaaacccatgcttcttttgggatgcctccgagcagcgcacctcctagtaatggtggtgcaggaattcttccttccccatccacccctaggtttccaactccaaggactccaaggactccaaggacccctcgtggggctggtgggcctgctagtgctcaaggttcagtcaagtatgagaattcagacttgtattcaccagcttccaccccatctacatgccgacccctcaattctgttgaacctgcaactgttccttccatccctgaagcgcacagtctttatgtaaacctcatcctttcagaatcagtaatgaatttgtttaaagactgtaattttgatagttgctgtatttgtgtctgcaatatgaatatcaagggtgccgatgttggagtttacattccagacccaacccaagaagcacagtatcggtgcacctgtggcttcagtgctgtcatgaaccgaaaatttggaaataattcaggattatttcttgaagatgaacttgacatcataggacgtaacacagactgtgggaaagaagcagaaaaacgttttgaagctctcagggcttcctctgtggagaatgttaatggaggcctgaaggaatctgaaaaggtgcctgatgaattaatattactgctacaagatcaatgcactaatttattttcaccctttggagcagcagaccaagatccttttcccaaagtgggtataagtagcaattgggtgcgtgttgaggagcgggactgttgtagtgactgctgcctcgccttagaacatgggcgtcagttcatggataatatgtcaggagggaaagttgatgaagcacttgtcagaagctcatgcttacatccgtgggccaagcaaaatggtaagtttgtgaatttgactttggctttttttttatccctcggggggggggggggccgtgagtaacttaccagtaggtcacataggaatactaaagtttggacttaaccctcagttaaagacagctacatgttgggtgtggtgtctcatgcctttaatctcagcagaggcaggcagacctctgtgcgttggaagtcagccttgtctacatatggagtttcaggatagccaagaccagtatgagaccctgtctcagaaaaacaaataagactgttacctaatgtgagacttagctgtttagatgagtttcagcaattaaaacgttattgtaatctttaactatgtactgacatagaaatgtaaacggcatgttgcatgttagcaaggagaaaatgagtgattgtttctcatgcagccatctaatttgtcttttgaggtagctgcactgctctcgagctgtgcccgggctctcagtagctgcttacagagcacctcgttcatgctcagcgctgttcatgctcactcctgagcagacacagccgcttttggttttgaatttttattcgattgttttctttgtttttccttatgtgtgtgggtacgtgattgcatgtgtatttggagtttagatacatagaaggatagccttctgtgtcattcctcaaaagccatcaaccttgtgggccccactccttgtgtatatcaggtttttcattcacagggcactgactggctaggttagaatcccttgtccttttgagcctatgatttagtggaggagacagttaaataacaacaacaacaacagaaaatatatacttgcattacataccagttacgagtacgtggaagagaaagcagggcaaaagagcatgtttgcatgggaggatccttatgtgctattttagaaatatggtcagacatgttaggggggagaacatttatagaaaggcctacttgaagtgggaaaagtgagccagagtagttaactgggggaagaatgttagtagacaatgtagttccaagtccttgaggacatagctctcggtaaattttagaaacataagtagtgttaagtatgttgagtgatggtcatactgatacacggtgaagtgtaagaggtgtcccaaacacttatttaatttgtgtgtgagcacttccatgtttgggtgcacatgtgtgctttggaaaatgtgttgaggtcagaggccactttgagggagttggctctttcttcatatcctcttggtttaaggcttgaactcgggttgcaaggcttggcaacaggtacttttaccctggttctgggtgtgggtttttaggctatgcctttagcatttatttgaaatgccttgggaatggttcttaatcggaaagtaacaccactgtctttttagctttaaaaaaaaaatccctgggatgggaagtgagggaagatgagagaagcagcagtaattttgagtagagaatagtcatttagtgaaggtggcagcttggagaagactggaagccatagaactagtggcagtaggctctagattagatggagacgtagacctacagagtgtgctgatccacttaagaaaagatgaagtgttaagcctggtttgtgccaatgctggtactactgcagagaaagaaaataggagggttgcaggcacacatttggaggttaaaattcagaattcaggttgtatgtgggttatcagtattaaatactatggaaagccaggtgtgttgtacatctgtaataccagcactgggaaattgtaggaaaaaatcagaaattgaagatgatctttggctacatagtaagttcgtggccaccctggaatatatgaggccctttcttttcaaaggccggagctggatgggcagttttggggaaaagaaggtcaggaaggagtctgagaaggaagaaggagcaaggaagtgattgctcttgtatgagaatatttgaaggagagtgattatatgtataataatgccttcataaaggtacaatgtgacaagaccactggatgtgacctcatgaaggtagtaattagagacctagataatcagttctggtcaacctgattagagtgagtgtgaggaaatgagaaacaaacttgaaatttgggagacattggtataaatagagttttatgttaggtttaacatatagtacttgtgtgtgtgcacacacacacacatctgttcatggaaagtgattctttctagatcaaaaaatttaaactgacagtaatttcatataattgagtaagtgtggtattttgctatgtaaatatatgatagcttatctatcactttttttgtagtgacacttaaaatcttttagcagctttaaaatatacaatacaataatattagttgtgctcatcatgttactgtgtagaccgctagaacataatcttcctacctaactggaaactcactccctctctccagtctaaccttcttccgtgggaagaattaccatgaaacaaaaggtgctgttgtaggagcaaagacattaagtaagtgaggggaaatagaatacattccaagtagaggtgtatatagacctatatataggaacatgtccatcgaaacaagaagaaaagatggcatttctttggacaagaaaagtgaaagtgaccattcttagtgatttcttttgtagttgtgggtgagagcagtaggagatagtgacagggtcatttgatactgatgtcttaattcacatactagcagcatcacacagtaccactttgttagaaatgcacatttgcagattctcccatgatcttctaaagatttatttatttttattatatataagtacactgtagctgtcttcagacactccagaagagggagtcagatctcattacggatggttgtgagccaccatgtggttgctgggatttgaacttcggaccttcggaagagcagtcgggtgctcttacccactgagccatctcaccagccctcccatgatcttctaaagcaaactctggagataagaatcagttttgtcactcattactaatgtgtctttgaaaaagtaatatattatctttatttctttatctgcattgttggcgggggagtttggggggagggagggttgaacccatgtgtaaaagtaacttttattcccctgatgtaattgtagtttctgaagcttcctgcctctgtctgctaacctaggccaagtcctagagacttccagtctccatacaatcttatttaggcctagagtgttttcagcctctgagacttactgctgaataagctcaccctttctagttctttctgagctctgactggctggttcaactcagctgttctggctcaaactcctctccaagctgatagagtcaatctgacttctctgaattgctctgcttggctttaaactaacattggcaatatgttcttatcttctggttcctttttgttcttggacttgttctgtcttcatcggtgtctagtctgttctgtcttcaacctgtctctgtaaaactctcctggtaaaatcgcctcttttctctctctctttgaactgctccctcaagtagcttcctttcctctcttcttgtgagagttgagcatatcctattgtcagatcattctctgattcatcactttttctgccactcaattagtcattgctttcaaatatatgtctacaatctaactttacctttattaataatgtatactaagtatttgtatgtattccaaccagagcagccagccatattgctggattaaaatccctctacactaggatcttgtgtatgctaggccagtagtttataactgaactatatccccaactcactttattttactaatgaaataaagctagtatttgacttgattagaattgtaaagatttaatgagttcattcatgtaagcataatagatcttatgtaggctttgtatttggtatttttgggaactatggaggtagtctacattttaattgttctcagccactaagataactaaaattataatcagaagtaaaagataatccaaattcttattgatagaaaattcctattattaattactataagacaatattaacaagccctgaaaaaattatgtgaatttgatcatatataatagatgaattatagattaattatagcaatgatagtttgagggtgaggtcagaataattctaaagactatagtaacatgtatgcttttctttttcttttttcttttttacattgtgctttctgtgtgttcagatatgcacacacacatgccatgttacatgttgaattcagaggacacttgcaggaattgcttatctttcattcagtgaagtctttaggcttagctgcaggcacctttacccaatgaaacatctcaccaccccagttaaagccattactttaatgcagttctgaaataagcaaaagtaaatgtgttgttcatttgcacataaaactcagggttctggttatttcttgagacttacacatgtatagaaaggagcaaggaatagaacaaaaggaggcacttagtagactgggaggaagtgtaatacctcttggacatggtggtgtatattttaaatcccaacactcaggaggcagagacaggtggatctctgagtttcaagatagctagtactttatagtgagattctgtctcaacaaaaacgggttttttggcaatgagataataactcataattattttcatcatgatattaaaagtaatttgtgaaataaaacaagaggaccactcatgggctcattattatttatgacaatatcaagattcatttaattcattatactacagggaagagccagttaaagtaaagcactcattgagtgcctggcatatggccctccagtgttactccaacagcagcagagagcaccagggtgctctgtattagtagtttattgggattacctctttgccagacaaatactcaagttctacttggtgcacacttatactctgattaaagtataacactgttgagtatatatagctccagaattaggacctactgtatggattagggcctgtggattgtgccatctgccttggatacctttctccctcatacttaacttgggctccttcttgtctcctttatctcttgttagaggttatggtctgcatttttcatattatttgcttatttccttcttatacatgcaatataatttattggttggtcccttatcccttaagtacacctcatgcaagttctgagaatagttgaatatgaatattcattcaaattaatctaagtctatgaaattggttgagaatgtatctctgtggcagagcaattgactgacatgtcctgggtttaatccttattactttagaagaggaaaaaagaaaatctataagatagtttatatattcaagtggcaacttactattcaagataaaaagttgctcttaattgtcccaatttcactgtcctagcacctcctgatcacagaagaaaaacttttataaacataccatatgattcatctatataaaatatacagtcaaaaatttagtatttatagttgtaaccatttgtacaaacaattttggaacatttgtgccactctaaaagtaataactcattcttagtatttatttgctatttttccccatccttttcttgtagctgtaagcaactattatctagttatcttccctaaaaagtttttttattttatgtttattggtgttttgccctcacatatgtctgtgtgcgggtggtgagtcctctggacctggagttacaggagttatcagctgctgggactagaacctgggttctctggaaaagcagccagtgctcttaatttgtgagccatgtctttagcccgattttttcccccttccgttcagattgttttaagagttcttttttttttttttggttttggttttggttttggtttttcgagacagggtttctctgtgtagccttggctgtcctggcactcatttttgtagaccaggctggcctcgaactcagaaatccgcctgcctctgcctcccgagtgctgggattaaaggcgtgcgccaccaagcccggctgttttaagagttcttaagcatatactttaatgacatagaattccattgtcatatagtggtatacctttttcaaaatcttcaaattgttcatttgaattgaacgcactttggcttctgtgaatatgtgtgtatgattttatgtatgtctttgtttccgtcatacttagatttcttgggtcatggaactaatatttttcaaagcatctgcactactttaaattctaacattagatgtttcactttctccaaacccacaccagtacttgcaatctattttttattgaagacatcctagtggttatgaagtggtttcttgcggtttggctttgaattcccctaatgattaatgatgttcggtgtcttttcatagacaccatttgtgcatcttaggggagatgcttcataaggtcctttgctttactggggagtgggactgagagagttgcgtgtggagaggaagcagctcatcctgcagccccgcctggggcttgtgagctttcagcttcaccagttcatctgactttttgtgttttttttttaaacttgtgtttcattcttattttttaaattattgatctgtaagaatttttatgagctgtgggtgaaaatactttattggtttgtggtttgaaaatattttcacagccaggcattggtggtgcatgccttcagtcccagcacttgggaggcagaggcaggtggatctcgctctgtagatcaggctgtcttcgaactcagaaatctcttctgcctctgcctgcccaccagccctcccttccctttttctctcaatcaatctctatctgtctgaattcagggattatagatatgtaccactacatctgacttctgaaaggtcttatatagttttctgtgtatgcagatatttaggttttttttttttaatgaacagttaagatacctcagatatatttctttttaactctaaagtttgtgtcacccaaaagcaatgaccacttactttttttaatgattgtagatgcgagcgtgcagtgttcacaggatatacttcggatgctcctttctcttcagccagttcttcaagatgctattcagaaaaaaagaacagtgaggccttggggtgttcaaggtcctctcacatggcaacaatttcataaaatggctggccgaggctcttatggtaagttgtgtattgtactagataatgactgatttatatctgttctcagatatgtgctcaacttgaataagtacattagttcttaaatattttaggggactatgacccagttctgattctagcccacctttttacatttgcagcatttagttttcctgggttctttaatttcccatcagcacgagtagctgcactatctgtacatggttgacactcagtatcagtttatctgaaggaagggtgatgagttttgtaaaacccccaaataacttcagttctaaattgaatgagatgaaagattgcggccaaataatagaggccaatactttttttaaaacataagatttttcacataaaaagtttggacaaaaatagaaacaaaagcagtaggtgtgtgctccctggaaggaggagactctcacttagtaggagtgtgttgactgtgctcccctggaaggtggagggagactcttaggtggttgagatactgtttctgcagtagtgtatctgggtgatagctggttgtgtttgtatagtgttgggattgaaccagagcctcacacgcagtaggcaaccaaatcgcactccagctctggaataatagctgttagcattaaaagttctctgtggtttcagaatgcattgtacactgtagtagacttcttgtatttttctcttttttattaataacttaatgatttaaataaatcaattatcatataaattgataatctatgaaaagttcaagttattgatactttttagtataaacttcacatttttctcaaaaccagaacagatttatttctgcacctaattctgaaaattatttctgtatgtattttaccaacatattatctatagatgtaaaagtatttccatcattatccatcatcccacccatactccatcattccaactattttcagtgatttgtttatgcttgccttaaatcatatgtgtagtttaaaatttatattgctgaattatactcagcagtatcaatataaactcaatcagaaatatttactatcccagactttgcagtagattatcaggctgagagtgggtttcctgggttcagattcctacagtgacttcttttatgttgctggataagttgtttaccttttttattcctctttcttatgtttaaaatgagtttaaaaacagtgtctgccaatatatggtgtttgtgaaaattagtatagacagtacctagcatgtagtatagacagtacctagcatgtagtatagtcagtacctagcatgtagagctgcagttattttctagtattcaggttactttcttttacaagatcaaacacctttttttgggtctttactcattttaaaataaggtaatttgtctctttttcctaataatatattgtcgtaagaacatttaacctgtggtaaacatttaacatttacccctttaattcagttttaagtaaaaaaaaaattagtattgttgatttctgtataatgtatagtatatctgatgataatctcatagatttataagtcctttttttatagtaaataaagtaactccatcataacaatcacaaatttgttaactattaaattaaatcaattcatgacaggtgtggtacccgtgcctgtaatttgagctcttttacaggctgaggaaaggagaattgttacaagtttacgaccagactgggctgtagaacaggaacccttctcaagtaaaatagcagtaaatattttaaagtgaccacttaaggatatttttaattctgaaaatatgtcattgcttgcttttcatgtttctgtctttaatattttccttattaattttggaaataaagaggatgacgtgaattggcttcctcctgattgccttctttattactcaggaactgatgaatctccggaaccactgccgattcccacgtttttgttgggttatgattacgattttctggtgctttctccatttgctctcccttactgggagaaacttatgctggaaccctatggatctcaaagagatatagcctatgttgtactctgtccagagaatgaagctttgttaaatggagccagaagcttttttagagatctcactgcaatatatgaggtaagtgttttgtaatttatacttttatgtttaaagtgtactgggagattctatgggctgatgaagaatgctgatgttgacagtagtcttagtaatggattatattcttgctacattttttgctagtctttgttaggtatatgttccatgggtcacagtggaaaatatagtattagagggatataccaagggcataaatgtgttccatttaaagtaacctttggtatgttgggtgtggtggtgcacacctgtaaatcatatgtatttgggtagctgaaacaggagactcgctagaactatgtcttggaaaaaatgtattaccaggggtggttgtatatgtttgtaatcccaacatttgagagggagaggcaggaggatcagaaattcatccttcagcaatataacaagtttgaggctggcttgggttacctgagaccctttgtccagaaaaagaaaaaagaaaaagaaaagcagctggaaatttctaaaggaaaataaccatgtcttcatagttacccatgctttcaactcagttgttagttataagtgagaaggtttgttttaaatgggtcaagttctgcttggattttataatctgtatccaaatagtatggtaaattcactgattctgccttttctatatatattttagtcctgtcgattaggccaacacagacctatttctcgattgttgacggatgggatcatgaaagtgggagctactgcatcaaagaaactttcagaaaagtttgtaacagaatggttttctcaggcagctgatggtaacaatgaagcattttccaaattgaagctgtatgcacaagtctgcagatatgatttaggtattaaatttgtattcatcctacaagagcaatgtgagcagtatgggttggttcaccatctaagtttgtaaataaaatctttgtgtcatgtggccatctccatgttttcaaacactgtctctgcctgcttttgtcctgcaaagtcagaactgaatagatgtggcaaagactgtggtttcagacttaagtatgcactgtctgactgtccatagaaagtctgctagctctgtatatgggaatgctatcaagtagtcattattggttccaaaatattctctgctgcttctgtggagtctgatgtttcctgccattgatcccagcattccggaggcagagtcaggatctctgtgagtttgaggccagtgtggcctcaagacaacagggctacacacatagtaagaccctgtctttaaaaacatttttttttgatttgttaataacttacatacaaatattttctaagtaaccttctgcaacaccaaaaaaagtcttattgtagctaatcctatggctgttatttaaatctttttgttatactcttaaatatcagtgaacttcttttacacttaatccaaagagatgcaataccaaattactgaacctaattagacatttctgaaaattgaacctcatgataatatccctccattttgtattttagttagctatcaatctagacagtatttcttcaacttgtgatttaacaatagttgtagtggtttgatgaaaaattgctacatacttatacacatttgttgatgtattctaattttttcttacacttattacttgtgtcgggatatatgccactgtgaaccagtggaaatcaggactacttggcaaggttggttttctctttccgccttgtggtttctgggggtcaacttaatcaccgagctatcttgttagcttttgtttacatttaattttgcctaagaaatagaattttcttacatttcatactgactatttaaaatttgaatgaaaatatgggtttatttttataattaatttaaaacattttttcttttttttaaagtttctgggagggagtaggaagttagttcgtgctgcactgttagtataaagcagttaagggaagataatcgccataaaagtgtcagctacattgttatttctatagaagaataaaaataagtcagtgaaatcaagaattaaatacccgtttttgttctttaggtccatatcttgcttctcagccgttggacagctctctgctctcccagccaaatttagttgcccctccaaatcagtctttggttactgcacctcagatgacaaatactggaaacgctaatgctccatctgccaccttagcatctgcggcaagtagcactatgacaatgacttcaggtgttcccatatctacttcagttgccacagctaattcaactttgaccacaacttcatcttcatcatcttccagtctgagtagtggagtatcatcaaataaactgccttcgtttccaccctttggcagtatgaacactagtggtacaggatccatgtctgcacaagcaagtacggttcagagtggccagctaggaggacagcagtcgtcatctctgcaggcagcaggaatatcaggggagtcagcttctcttcccactcagccacatcctgatgtgtctgaaaggtaccgttaaatattaggatacttggggttgaaagatagttaagtagtatgtagcatatgtgtttagcatgcttgaagccttatgtacaatgaatgaataagtataaaaaaattaagtttgtggaaatacagaatctatcgactctttatctaagtaaacagtgaccttactgtggaatttagtttaatcatggtaattattttacgtatgaagttataataaagattgtttttaaatttttcatcatagaatcacagggttggtgtttagatcttaaaaattattcaactccagatagtcctatgattgagtctggctgtgtcataagcagatgtaattgtttatgcatattacacaactggttgcaaaatctctgtgtgcctgcctctgtgtgcgtgtgtggggtgtgcgtgtgtatatctgcgtgcatgtgctagagtctcactggagctggcacgtgcgaggcatgcagcctttcactgtgctacgtacgcttcagctctgcttgggaggctttagactctgaatcccagctctgtccttgactcactttgtgataaggagaaggtctaacattgttagcattgcatccatatctgtagtatggaagcagttctacacgctgcacagcaattgtgctaatggtaatggatctcattgtttttatataaaagtcctggggaaattcccttatcagacagtctgatgctcattgtttctctgcttcctagaatgcagttgtttacaaattcacgctcataaatatgaggtaaaagtagactattatctgaacagaaaaacctggcttctgtctggactagctctgtttctaggcaggctgctgagcatgaccagttactgagatgcctgtcagagagacctttagtctcttactgttaagctgcttgagaattctttcttttaaatgcacaaagcctcttatttgaagggatttcatatggtgtgaagtgtaagtatcctgattatcagagaggttttctgatgccttgccccaataaaagagggatgtaaggattcactttggtgctgtaccaggcagacataatacaacattgttctctttctacttcaatttttagcacaatggatcgtgataaagtggggattcccacagatggtgattcacatgcaattacctaccctcctgcaattgttgtttatataatcgatccttttacatatgaaaataaagacgagagcactaactcttctaatgtatggactttggggctccttcgatgcttcttggaaatggtccaaactcttcctcctcatatcaagagcactgtttctgtgcaggtaaggatttcttcatgtttcagagtttcacagttgtttttctctgttcaaaataattttgttaaaagacaggttatattgatttcacttaaatattataataggagttttaagagagtttataaaagataaactttatagttctgggggctaattagatggcttagcagtgaagtgcttgctgctcttccagaggatccaggattagttctttccactcatatctggtggctcatagctgtctgtaatatcagcaactttctgtgggtactgttatatacatggaatacccacatagagacagacacatgaaatctttaaaaaccttgattgtcattctacaatcatgagaaatacaattatattggctgtaggtggtgtgtttctaactaattccatgaagctgaggcagtaggatcagaagttgcaggctagcatcagtacatagttccagactagcctgggctatgtaataagatgtttgttaacctcctaacaccacctcctcctccaacccccaagattatattgagtagattgcttctcctgtgttacttgtaagcacagttataaagtatagcctaaataggaaaataatgcctgtattctatgtgttaattttaattgagacaggttcacagtaaaagtagaaagttaaagaaattttgatttctttaatttgtagactataataggccccggagaactatatttaattagtataactgctatgtatagaaattttaaaagatttctaggtagttctttagttcaggacatacatatatatacacatatatatatatatatatatacacacacacactgtgttacagaggcaggcaggtgagagggctcagtggttaagagcactcacctgcttttcaggactcgtattcagttgctagcactcataaggcatctgatagccatccataactctggtcctaaaggatcccagtgctcttgctaggcttcacagggaataatgtataagtgtatgtatgtatatgcaggcagaacactcgtgcatataccatacaaattaaaaacactgtgtgatagaaaccagtatctttccattagatgttgctcacgtttatctgaggaatttctcttactgttgcaagttgctctgttaatgtttgtaatgctcacctttctttgtagattgttccttgtcagtacctgttacaacctgtgaaacacgacgacagacagatctactcccagcatttaaaatctttggctttttcggtgtttacccagtgtcggagaccacttccaacatcaaccaatgtaaaaacactgactgggtttggtccaggcttagctatggaaactgctcttaaaagtcctgatgtaagtgctatgtttcatatgaacgaagctatcatggtgacttacattttcaaattttatatataactaaatggctggtcactggcagtatgctcctttaataccagcactctgggaggcagagacaaacaaatctctgagtttgaggccaatctggtctacagagcaagttcaggacagccagggttacacagagaaaccctgtctccaaaaaccaaaccaaaccaaaattttgttttagtctaatttctagttataattgggtaaatagtaaatattttcctaagattgcataattctatagtactttcatgttttattttacagagaccagagtgtattcgactttatacaccaccttttattctggctccggtgaaggacaaacaaacagagctaggagagacctttggagaagctggacagaaatacaatgttctttttgtgggctactgtttatcacatgatcaaaggtggattcttgcatcttgcacagatctatatggagaactcctagaaacatgtatcattaacatcgatgttccaaataggtacttatttccttaaacatgcttatcccaatttagaatgttattagatgtccacaaacatactgtttcatagtaaataagtaaccatttgaagtttatatatattatgatattaattgttgaggttctgggtatactttttatctacattttatagttactgcttataatgtataattgagataattaaaaaaaaattggacaggcacatgtcttttaatctcagctcttgaaaggtggaaacaagtgactctctgagttggaggccagtcaggactacatagtaagataatctctcaaaaacaaacgcttcttctccttgctaatctgttacacagagaaaaaagattaaggtccttaacttttatgttgtaatgcttgtgacaataattttggataaagagtttgaaactttagggcctggcagttaagagttatttgttcatcttcctagagggctggacttgtttcttgacatacacatctggtggcttataactcctgttaactctggcttccataggtacttgcactcatgtccacatttacccctcttcccagtacatatagttaagaaataatatgaatcaaatacagttttttaaacattaacttagaaagctcttctactcataaaagtggatcttgtaagatgagggtggaagagtgcacttttaatttcagtattttggaggcctaggcaggcagatcactgagttagccagggctatttaaaaaagaacaaaaacccaaaacataaatacatatttaactgcttatagcataaattctacaatagtgatctatctacctacctacctaacctacctatctgtctgggagaatacaggcattattttcctatttaggctctactttataactgtttacaaagtaacacaggagaagcaatctacttcatataaccttggcaggggagggtcagcaaccaacctccctccctccctttctctctttttattgaaaggctgggtcagtataactgccctggctatcttagaactccctttgtagaccagacgggccttgaactcatagagttttgtcagtcactacctctgctcagattaaagacatgcaccaccactcctggaggtgtttttaaaaatataatttttttgtttgttttttgttttttgagacagggtttttttatgtagccttggatgtcctggaatgtgctatgtagaccaggctagccttgaactcacagggatccacctgcctctgcctctcaagtgctggattaaaggtgtacactgtcaatacctggctcaaaactaattttctttaaatacatttttgagtgagatagttgcattagtcatgagataatttggaaatagtatgcttctctgtgaaggaagagaacagataccaccactgtcaggcttaggttaccattttatttccttactcaaaaggtagaaatgggggtaggagagacagcatttagaattattggctattcttgtagaggattgcattccattcccagcacccacattgtggctcacaatctgttataactgtagtttcaaggaatctagtcttttcttctgctgtctgggcaccaggtacacccacggtacacatacatacatgtaagcaaaacacgtataaaataaagtaaatccttccaacaaagtagaaacagaaacaaagattaagaattatattggtaagccaggcagtggtggtgtgcgcctttaattccatcacttgggaggcagaggcaggtggatttctgagttcgaggccagcctggtctacaaagtgagttccaggacagccagggctatacagagaaaccctgtctcgaaaaaccaaaaccaaaaccaaaaccagaaaacaacaaagaattatattggtaggcaaggttaatcagtgggtaaagatgcttgcctctaagcctaacaacataaattaccccattacccacatgatgaagagagccaactcccaaaagttatcctctgatctttgtccccatgccatggaatgtatatccctacacaaaataaattaaaatgtaataataatagttattataagatataattaggcctgttttcaattaccaccccttcctggtttctaacagtttatatgatattgtgaaaatcaggcagctgagcaatagcttattgatctgcagtgtctgtagagtagttgtctctgcttcatcggtgtgttactatgaaatgaatgttgtgtgtacaccacctaggctgtttatttgtggggtttttttttttttggtttttcgagacagggtttctcagcatagccctggctgtcctggaactcactttgtagaccaggctggcctcgaactcacaaatccgccttaggctgtatatttgtaacagagtacatgctagcaaatgttagctgttgtttctcatttggaaagtggttgtgttacaagcttgcctacctaatgaagcaacctgtatcagaaaacatgcaacaatgttattaggtgtgagaaatgtggtttgtgttggacattctctcccttctaaggtatggagattgctttagtgcaaatcgttggccagaattggacaacaagtcatgttttcagttcttccccatggcactgctcaggaagcagctttcagtagtgatggttgctgatagtttgtaaagcttgaagtgtactcaactttataaaacaaaagctttgggtagaatagacaggatttatggtaaatttaggcttttcgtaggtaaactttgaaaaaaaattctattaggctaagtgtatatcaaactatattttaaaaagttctttatgcatgtttgtgaaagtcaaaggacaaccttcactgttacttttcagaagctttcctcctctttaacggtctctagtgtggactttggaagcacaggccgactgggtagtaaggccaggggttgagctctgtgtctctgtctgcatctccaggttgagattaaagctacacatttgttctcttaggtgctgggaaggtaactcaggtcctaatgcttgcaaggaaagcatgctaactaattaactgtttcttcaggtcacgaacaacaaaacaatccataaacttcagcccgaatatgacatcatacatctatgcttcctgcaactaaagctaaaacattagggtggatgatttgaatttaggaattcaaaaccggcttgcacaaaacataaagagatgccatatcataaacttaggactttgagtggtaaatctttgggatttatttttgtaaaggtttgaggcattaaaattaagcaaaggacaaggaattggaagtgtatgcctatcatccacaagctctgccgcgtctgtaaaacagaataaagtaaagtggatgaaccagttggtcacacatttgatttcatatgtgaatttcatcatgtgaatttttgaaatacttacaaccatttcattcaatagggcccgtcggaaaaagggttctgctagaagatttggtctacagaaactgtgggagtggtgcttgggacttgttcagatgagctctttaccatggagagttgtgattggtcgcctgggaaggattggacatggagagttgaaaggtggattatgcttttatctgtttttcttttttaactttgttttatgttgatgtatatttggttcagagcacattaaataacgtgaataaaatgctaaaaggctcagtacttcctagaggatgtgggtttgctgtctagtgctcacctagtgcctcacaactgtctataactcaaacttcaccggatttgatgccctcttctagcctctacaagccctgtacacgggtggtgtacaggtatacatgcaggcaaaatactcgtacatatgaaaataaggcttcaaatgctagaattgtcagtaaaagtttttgttttaaacaaggaaccatatatatatatatatatatatatatatatatatatatatatatatataatacaacaggtataactagtatctattatgtattatacaagtatatgtaacaattttataaatatataatcatatataattatataatacattttatacatatacacagacatatacactgacttcattctgaaagtaagccatcaggcataagagttttaacttatttatgatgacctctatattagaagaaatacactaatttaaaagctgttatctatttctctttcatcgtcagtctcataacagagcagtaactttaagtactgtccttccctattgatatccacagattggagttgtttgctgagtcgtcgaaacttgcaatctctaagcaaaaggctcaaagacatgtgtaggatgtgtggcatatctgctgcagactctccaagtatccttagtgcttgtttggttgcaatggaaccccaaggttcttttgttatcatgccaggttagttatgttcagtgtatgtcagatttaattatcattgtacgcgtttaacttaactgttacataaaattctgcacttacaaaaaaggaaaatgcatttctctttagattctgtgtcaactggttctgtttttggaagaagtaccactctaaatatgcagacgcctcagctaaataccccacaagatacatcctgtactcatatacttgtgttccctacttctgcttctgtgcaagtagcttcagctacttacaccactgaaaatttggatttagctttcaatcccaacaatggtaagttaattgaaccttaaatttttaatctaatttgctttgaaatcatggtctttctatacagccctgtttggcctagtacttgcccaggtgtggtcttgagctatatccctagccattctttatatatctgtttgctataatacggctttatatcatctactagaatataaatgtaatttagtgaaccttttaggttgtgtttagtagaagaggaaaaaaaatagtactcattgttacttgaaactgttttttttttaaaaaattaggtcttcacggatccacatatattttaataataataataataataataataataataataatgataataatcattttgtttttcaaggcagggtttctttgtgtgtccctggctgtcctggaactcactctttagaccaggctggcctcaaactcggagatcctcctgtctctgcctcccacatgctgggattaaggttgtgtgtcaccagcacctggcatatgtcatcattttgttcttttattatgtaataacttgagtgttttgcttttttagagaacagtgccctttaaaacatgtttgcattccttgctatctttgctttttactggttgcttttataacattattaacgcagtggcttaagaaagcaggagtttgttccattgtaatgctctcaaagtcattctcgtgaggcagggtttcttactgatccctctcagttagcctctcagttagcctgtttccttgcctttgccagctcctagaggccactgtaggttttgacctttggcctttctctccattttgaatgacagcagtacttcctttgtaggccactcttctctttccttcatattagtacatattagtacttcatattagtacttcatattagagctggggttaactcagtggtataatgcttacctgttgtttgtatggcccttgggtcaatctgtgggaccacatttaagaaaaaagaaaatgacttctatgattatagggcccattggaaagtgcagcataatctccatataggtctctttagattgaccgcaatcgcaaaactctttctgtggctagtggcacaatacttgcgcatgattgatgctcaggaaatactagtctcattaactcattttgctttaagatattttttggttgattttgtttttgaggcagggtctcactatgtagcactgactagcctggagctcacaataatccttccccctttgcctctgagtgctgagattaagagcatgtgccaacatgccctgactgttgtaaagcccaggctgacttacctagagcttactttgcaggttggccttactcataacaatcctgatcacccagccttctatgtcgtaggactatgggcatgagcaatcatcccttgcctgtctcattttggttaaaatttattttagtactttaatgtcaataatcacagtatacagaaaatagaatattaatttcttttccctgtacagatggagcagacggaatgggtatctttgatttattagacacaggagatgatcttgatcctgatatcattaatatccttcctgcatctccaactgcatctcctgtacattctccaggctctcattacccccatggaggtgatgctggcaaggtaattttgttaaaaaaaaaaaacgtttcagtgtatggaaatgccatctgtcaatccattcatccatcaatccatccagggattagtatatgaaattaaaaactttccctttgaaattagcaagaggtgaatatcagttgagctcatgtactcttatttagtcattaaaacttttgttgtgcaatgatcttcctgcttctacctcagaagtgttgcggtctcaggcatgtgttgtccgtggcctttttcctgtgtgttttttgtgtttttttttgttttgtttttttgttttttttttgagttggagtctttgtatacagcttggggtggctcctaacttgagagcctcctgtgtgctgggattccaccaatgtctggttcttcaaaattcttgctttttttttaaacattagaagtaccactaattttatgatcaaaacacattatatgaaattctcaaagaactgataaaaacgttgggggagaagctgtttctcctgtcttatcacagtagaagggtttatggtgcttgaggtactgatgtaatgaatatttttattatgcattttatttttcttttatctgttttcttaaagtaaatgctgagaaatttgttggccaattcaaagggaatgaataaaagtctgtggtattataatgtcttccaaaacactgttgaaattaatggcattttatagatagtgctatgggaacagagaatggaatctgccttttgaattggggcaaggaattagttgaataagtattaggacataagtggcagctatattgaaccatttgtattttgtactcagttcaacctgaggcatactcattttgtctcacagtttttgtaacacactgcttttatgatattactacatttagttattaggcttggaattaaatttaaatgtcacatatgttagacaggtatgctcccgtgaacctagatcctcagccctctttttttcttttgagatggtctagctgagagttgtccagactaaccttgaacgttgtagcctacacgggcctttaacttctttttatcctcctgctttagctctgagtagtagatattattggcctgtcaccaggttagatgtagtactaattgagactcttaagtaaataaccatttaatttttagtattttatgtggtttattgagatagtaatatgaaattattaattgttgtaagcatttgtatttatatttgttgtctagagatgtattaaatgaactaataatactcttgtctttttaagggtcagggtactgatcggctactttcaacagaatcgcatgatgaagtaactaatattcttcaacaaccattggcccttggatactttgtatcaactgccaaagcgggtccattacctgactggttctggtcagcatgccctcaagcacaatatcaatgccccctttttcttaaggtattagtatttctgtgccaattcctaacgaatcctagtagatagtttttagttctaataattactaaagtagcattttaaagttttatagctcatttgaattccaagttcgtttatgctttgttgtgtatatttctgtaaatggtgtcataaagagaattacttaatatgaaacacataattataaaaaatttatatgaagattgactgttattcttaaggctcctggaacttttggttttaagttgtattttcattgtagtacagaagctgagagcctagaaacactgccctgtctctttgtgttcttatcttccatctaaatatattgtaactttggaaactcattcatctaaagtcataactttgtagtagacatcaagattaaagcctgagtctttgttatttgaatggactcatactaaactcctattttattattttgaagattaaaaaatttagcaactttgtaattcttggttttagtttaatttacctactctaaaaagtttcctttgtataaattacttttgagtaggatgagtgtgatagctcatgcttttaatcccagcatccaggaaccagaggcagcaagatttctgtaagcttgaggctattctggtatacatagagagttccaggccagccagggatacgtagtgagacttctgtcatagaaaaaagcatataaacaactagttgagtaggttgggcatggtgacttgggaggcataagcaagaagtttacccaggagttgaaggccagcttggtttacaatgagttctgagtgagccagtgggacagagctagaccttctcaaaacataagctgctgagcgggttttaggaagtgagaatcttagacctatagatacttatttttttaaccttcattttatagtctaaattatcagatggtgaagtaaaatgagtcatgaaagccctgtgtgattattgttaaagttgctactaccagtacaaaataataaatgaagacctgactctcactatgtagaaaccactgtaagtgggctcttcatgtttcaggtcagatggtaacactttaatttcttgagattatattttctatttttttgataccctggatatatatcccattctgtgaaagctacttgcgattaaacaatgggcttctgtcgcacacttataaagactattaactgtcgttaataatctgagtaattttccccttctcttaatgtgaattaactatgctaggcaagtgctctgagctctccctgcccttgaattgcctattaataaaaattatagtttatcctgtgacttttattcttctctgagatattcattggtctgttgtaaatctcatttacatgaacatcttctcaaggggctttctgcagaatagtaggatggaatctccactaagcagagttccttggtcctttgggaagtgctgcccacttacagtcacagaacctgtatgtacactaaagttcttataatagcagtaaataactttgcttacccagcattttccaaatttagtataatacctatttgtagttcatgaccttagtgtttcagggcacacttttgttagtaaacacttttatgaaaagtccaagggactatccagattgttttctactcaatatttatttacagagaggatagtgtaaagtgagcattcaccctcagatacagtgtaacacgattaggactcctgaaccccaggtaaggcatgacttaacgtaactttgttcaccttttatttttttcatgtatcccattttagttctgtactgtagtcaataaaaccacatcatatatttcttttttacttgagaaatcagtgggttttagatggttaaaaataatttttattataagaattaaaccagcattcatttactttgtagtggttggccaagtgagacttacttaagattcataaatccagaatttataaacagttcaaacataagtattgttggctatatttttgtatgtactttatatgagctcatacatatatgcagtcatgatggagaatgcatatgggtataaagaagcacctttaaagagtgtagaaaacttggttgaaggattgtctgcgatgagcacccccactgtagcatgacattaatactactatacgacttacatactagatgattaattttacttaattgaaatgtgaaaaatagtaccacatttcttctgctcattgctatctgtaaatgtgcgtgctgtcgtttatatgcctctgataattaatgtattgcacaaggagtcatgtgtgcattgtattgattgttaagtgttcatccagaggcaattttgttaaatttccagctttgcaaaaataaataaataaataaaataaatgtgcaggattactcctttgacattttattttattttattcatttatttttatagcacttaggtcccaagtgtgactgtgtggtctcaattttgttcaacccagggacagggtacacttcaggcctatgggttcagtgtttccttaatcatttgctttatagacttgggcagattatatttagaagataattgtaaagcttgtttttaaggattgctatacgatttttaaaagtaaggctaaagtaaaaattgtagagagacacgatgtaagttttacaccttaaagtttccatcaaaaccatgaattttttatagttgctcccacagataacactgtcataagatcagtttcatcaggataatacattaggagaacacagtgaaatgaaatgttgctttccctctgtggctgactgcgtccctcccttcctttgtaggcctctttgcacctccacgtgccttcagtgcaatctgacgagctgcttcacagcaaacactcccacccactggactcaaatcagacttcagatgtcctcaggtatagctcccatgatgctaagggttctctgtttcaacttgggtaaaagagaatggttattatgagatatatttattcttttgggtaagagttcacagcgttttatttttgaatcattgggtgattccccaccccaccccccacccccgttcatgatatagacaaagcatagtgcctgtgctggcttggtaaattgctctacctctgagctaaactccatttaaaaccccatttagttattatttcttaaaaacaattttattctttttatgtccatatatatatgggtcttttgtctgcatacatgtccattgcaccatatatacatgcagtgccactggaagccagaaggcatcagataccctggaactggagttctaggctgttagcaggcatgtaggtactgggaattgaattctggatctctggaaaagtagtactttaagcatgagtcatctctccagccccaacctcgttaaattattgagaatgaatacctttctaaaatgaatacgtttttgagtttttttctccccacctcattcattcaaaaagcggtcttatgtatcttaggctagctttaaacttcctatgtggtgagatctattccttatatgttactctttcattgcgtattttttgagacagggtctcactgtattcctttgggctgcctggagacaggctttccttgtgcttaacagagcttgatccacttctgtcactgcgcacacgtgcttttttattttttcttttgagagggttctgattatcctggactcagaataggccttggacagagatccaccagcctcgtctcttcggtgccaggatgaaaggcttgtgctgccatgtctggctctgctgctcttcttaagaaaatgactgtgtttggtggtcagagctatgtttgggaaggttagacaggagaatcattacaagttgaaactagcccatcttaaaacaaataaaacaaaaagcaaacaaatagaacaaaacaacaaataaagtgactttggctaggcatgatgccattcaggaggccaaagcagaaggctttctgtgagtttgaggctaacatgtgctacagtatgaaattcttagcaaagagggtttctgtggttgtggtattgatgtcatctcattgtttaggcagcaaagggtgtctctctctctctctctctctctctctctctctctctctctctctctctctttctctctctttctctctctctctctcacacacacacacacacacacacacacacctctttgagtcttgaaagtactatccaagtgtatattgaatgagatggattgacacagtttattcgctttcaggtttgttttggaacagtacaatgcactctcatggctaacctgtgaccctgcagtccaggacagacgctcatgtctcccagttcattttgtggtgctgaatcagttatataacttcatcatgaatatgctgtgatcctcgtttgatggaattacgcaaggaaagaacgggaagaaaggatattttgctgcaagattaagttacagttctcagtggaagtcatttgtgatggggtctaattcttattacttcaacaaatattgttttgacttggggggcggggctataaccctatttttcattgactttactgagctctttaggatgatgactgattattcaaaacgtattataacactttcgtagcaaaaattaaccttttttttccagtcacagtatttgtgaaaagtaatgagccatagtacccattaatgttaaagaatattaaagcatggagaggaacatgaggaacaatgaattccaacatatggctttagaacatcaggatgttcttgtattggatatagtatctagtattcaaaaatgcctgcatctcttatttattgtaagtttttaaatgtataaattgtcttatatttcttaacctcttttataaaaattttcctagaaggtttatactgccttcttgctttaaagcaattggtctaaaatatatgtaatcgtcttaattaaaacgttgcagtagggttgcttttagagtattatttttttgtaagggggtggggtggacagtaaatttgtattgtctcaatgtacagtttaacagggatagaggggaaataatgtccatgccattgtgtgtggaagatttacagctaagctgtagttgcagagtacatgtacagtaatgaagttcactgtgtttataaactgaaaaggtaccgggtcttacagcattttatatatcacacctttacagaataacatgatggcaatatacatacgtgatattgttaggtggaataacttagaataaaatgagaattcttgagttatattttgtactatggtttagggctatgactaatatttcaggccatttccagtgaaagaaacttagttttacaagaaaacatttgctactgaatgcttacactaatcttggtgtttaatgttacatgcttaaattcttttcagttttcacagtggcacatttaggcatggggatagtactaattatgaaatttcctgcaggatctgttctaaggttgaaatttagcccagctctaggcattttacaaattattttaagaacagtcactcttgattgttttactttttatttttaaattaaagattgggaatgcgtgtgagagtatgcataagcatggcaggaagagaggggggagagagaaagagagagagagtgagaaagaaagagagagtgagagtgtgtgtgtatatgtgtgtgtgtgtgcaatcaaactgtggtgtaaatagatcctcagtgaattctggtattcagactctgttccactagtgaatgaaccattttctaaacgtttccctttgacttttttatttattgaattttcttggtttggagatggcagtcccaaacaccagagtctgtacttttctatgacacagctcaaattaaagtagggcacatgccaaggaggttctcacctccctaaagaagggacttgaattttagggactttaattcaccctttccttcaatccagctttcccccttcttgtttgcacatgccaagataactgcttttatgcaggctttacccctgaaaaactcctttctacagtgctgctcacgagagcccagccagtctcatgcctgcattgctgacttgaactcacagtcgccaagtctacctatctttcttggaagcagtctttcaaaattcctacttgtatattcatccattgttgacaaggacaaaatcagttgtatttacaaaactcttaactcggtattttttttttaaactgaatcctgttttgtaaataatatacatttaatgttgcttagcataaaaaatactttcttacagtaatcttctttaaattgggtatatgaaaacattaccaactcttgtttttctataaagaaatacagttaataacaaggtttcaaattattcctttaacattaatagaacaatccaaatgttgagcatattttgatattaaactaaagatcacgtctctgtttttaaattatgctaacaccaccacagattatgttgacgtattttcttctgtattttcttggtgggacttgagatttgaggaaaaaagatgcttatttggaatttctattaagaactatccttgttattttcttagctcaataattactcaagaaaaataaaagattataatctcagtttaaaattactaatgtgtgacaaccatacctcagtttgaaatagatttaacaagattattccctgacattttcttccatgtagccataagcagggacccagcatacaattcttcttacctaggaatcaggaactagtcccaaatatacaggattgagtcatggtttgctttttttttttttcctttcctttttttctcccctttacacatcagattttgctcaaataggaggtaactaaatagccattagaagaagaagtgaagcctttcatgcaggatgatagatctaacttatcaatgtactgtcacagtacattaatcgttttatttgagtaggtaaacaaatttgcacacttttccccagtgaattcccaacaccttgacttcctcatttcagtgctaataacctgttttgtgtgcagttaatccattctgaagcaggtgaaaggtcagtattttagcattttaaaagatgagttatataatgtctgcttccagccagtctgcaacatctagccatacctttcttatgcaagccattcagttatcaggactgtgaattaacactgtatgaatacatttctgtacaccttattgtttggccagagggccaccaagtgtacttatatgtaatccttaaattttaaactagcttgtgatttttaaatatttctaaacttttcttaaaccactaaaattaagctcttactacttagtcaactatcctcagctgtattcgtcttcaattgtcagtatggcacagatcactgtattaaaatgctctttcgtcttcatatttaccttctgaggtcattttttaacttaatgtgttactacaaagatttgcagatctttaatcaagcactatgttaatactgtaatatcaaaatactatgtcgaattatttcagatgttcagattgaatagggtaaaagaaagtctttaaatgctatcgcatcctagaccctcttcccacctactatggcattgcatattagtctgttgagacattcattgttgcttgactgacattttggtctgggttttcttttaatattttattttaattaaaattaggaaaaaatgtgttcaacaattttttttttgtcccatcttctccaaatcagtgggaaaagcttaccttttggtatatcttagtgttttcatgggcccagaactgtggtttaaatttttatatgtattctcattctcatattcactcatactcactctttttctctctctccctctctctccctctctcccccccccttctcttttgtggagtataaattaaaaaaactggatttgggacctacaatactcctcaggttgagatattcttgaagttttaaaatagctttagtttttaaagtaaactggatttgtggaccttaaagttactgagtttaaactacaaattgtaacatcattactgaacatgtccgcatcaaccctctgagaataacttggtcactttatgaaggggcgtttttaagttgtttagcagtgacatttaatatggtccaattgcttttctttttaacatgacaaacaattttaaaagagactaaggaacaaacactattgcgccgaatgccataacactgagttgtacaaattgtgattgaggagatgaaaaagtttatactttttaaaaaaaaaaaaaacaaaaaacaaaacttcaaatggaataaattattcatgaagccttccttgtggtgtctcattctgtggaaagtacaagctccttacagcttccccatggttagcagcagggctctttctgtgtcatttgcttggggacggtggttttgaggcagggtcttgctatggagaccaggttggtcttgaactcagtgatttccttgcttgtgccttccaagttctgggattaaaggactgcatgcaccactaatctcagctctgaataatttttaaaagagaatgctggttctccacacccagtattggtgatgtgtgtgtgtttacacacccaagctcctttttgtcttacaatttggtgttaattattcagtcaaaatagttatgttgaaataataatagtgtttttctttgtgtcttgggtgtgtatgtatgatcacctaatcatgtttgaatcataaggaaaaagttaaatattaaaatatgaatcatgcattaaaatagccgtgcattagtcccgtaggcagtggtataaaatgttttgttcagacttaagcaaaagttatgatcatttaaaaactttctcccaagagtttcaaaagctttcataaatgatggtgtatggcattgaaatttgtatctcaaattatttcttataattttcctctgattcatttctaccttgttattactgttctctatgagccatgcaaattaagcatttttacaagtaagaatattcattgtttggacaactgcatacatcttttcaattgtggtttacagtactcagagccaatctttgggcactgtaacttagacctcattggtagagcactttcctaactacaaaactctggcctcagtctccagcaatgcaaacaatgtctcaagtaactgttgggcggtttgcaaaggaaatgctttttttctttcagtaactatgcataaggtgtttatacttattcctagtgataccagttgtttggagagatctctcttactcacccctaggcaaacacagtttctctattggagctatgtgagccatgattttgtcataagccaagactgaagtctaagaatggtcgttggttccttttatgagtattttcttttgaaaactttcctgtcagagctttccatatgaatttctttaaagtaacgaatacagggagttaaaagcatgtgagaaatggcaaacattttcaaggagcaggaaactcaatcctggacactgtcttgatcttttggtgtcagtagcacactgttgatagccacacatgaatttgttggatttgagaggtgaactgaaagaatactatttttctcttcagactgttaataaattaagaaatggttggagttatactatgtagtcattgaaaataatttgagaaatttacatgaagaaaatccaatttagatgaaacgaaacagtttgaattggactcaatctattacgtataaataacttacaaaagtgttgagaattatggtcatttattagtggaaatcactttattaatcatgttgaacgcaaatgcctaggctttgcttaacagagtattacgggatttgtggcctgtcaacagcaagttgcagtgcgtcttctggctccctatctccctacacacccataggaagaacaagagcatgtaactcagatcccagatgtctcctggtctgcttatgggggtgtgtgattgtttgtttgtttgtttgttttgttttgttttttttgagacagggtttttctgtgtagcagagccttgtctgtcctggacttgtttgtagaccaggctggcctccaatgcacagaggtccacctgcttcccaaatgctgggataaggcatgcaccactatgcctggcgaacactcaatcttagagaaaaaaaagaaacgaggcagggtttctctgtgcagccctggccttcctggaagtttacctgtaaagcaggctggcctcgaactagacagcttcctgcctctgatgtgctgggattaaaggcatacaccactactgccagctttttgtttgtttttaacaatataaagaagaaaatgttgtttttggctcatggggaaaggattttttaaagtgtctaaaatgtgtatattcctgagctgctcactattctattgttattctcatttttagtctatactgtaggagggtgccgatcctggtccagagactcaagacctcttgggtatgagtgcaaacagaaattctgcatgaggaaaaaaagaagcggattgttatgtgtgtgtggatgtgttcaggttaatacagtgtgtatgtgtgtgtgcgtgtgtgtaggctagagaactatgttgatggttgtttctaaggtgctgtttgtacacagttttgtttgaggcatgctctctcctgggacctggtgcttacagcaatcctctgatttttccgcctttcttcttcctcagtgctggtaaattgttcatcaccacccctggctctttaacgtgagtcctgggctccaatcaggtcctcatgcttgtatggcaagcactttgctgattgagccatctcttcagccaaaaacgagattttaaaaaaaagtactcccctcctccccaccctccaatactggcccagagaaactttattaaagaatggccttttgtgagcagggcgtggtggcgcacgcctttaatcccagcactggggaggcagaggcaggcggatttctgagttcaaggccaacctggtctacaaagtgagttccaggacatccagggggctacacagagaaaccctgtctagaccccctcccccccccacacacacaaagaatgaccttttgtatagataaaagccaaagacgaccttattttgtcctgccctactactatacaggggtggaaaaaaggaagtttacagctctcaaaacttgtagtgtttctagacttgagttcagaatgcctaactatagaccttggctcttggattcttttgttctgagaaagtctttatagcatgaattatccacaaagtccatctggttcttatagtgttctttgtttctgccatctgtaaggttctatagaacataagaatctcatctttgaagccttttgctagttgtttacaaggacatggagatgccagtctacaatcccagagaaggcaagaggatgacagtttcagtccagtctgggctatgtagcaagactgtctcaaaaaagacacaaaggaaaacaagttaacatctggggattgttagtacttaggaaactaagtagggcattgggtttgaggccaggctggaataaatggcaagacctttctggaaaacaaaatcccaaataattgtaattatttggctgtaaattattggtcagtgtattgattgtcaaatgtactcttttgacctaagcatatcaagtattaggtaaaactactttatttgggttggtcgttaagaaacaattattttgagacatagtctcaatctcttgttacagaccatgctgaccttgaattctccataaattttcctcagtctcataagtggtaggattataagcctgcactaccaatacctagcttgcaataaactctttacctggtctttctcctcctggagtgttagtcaccaaatccctttatatcttgatatcaggaagaaaaccagtatcaagccttgtttccttctgtaacttcacaaagggtcctcggtttcctcctagcctgtttagcatctaagttcatttccacatatacctcagatgaagttcccttgtcatactgccatttataacaccctctgtgcatctgctacactgcttcccagcttgtactctgcaactatttgtctccaccaaaaagctccagaaagacacaaaacggggtttatttgggtaaccattgttacaggcagaatgtagcacatgtcatcttttactaagatgttgaactattcttgaatactttcaacctcttattataacccaagacttagctgaaatgtgggttttacctataaataaaattctaatattgtagttactttgagttttcatttgcagagtgcaaagcttacaagaaagagatgttaaaggtgtctgaaagcacttttaaatagttcctagcaaaactagagacaaaatgtagtgcctctctagctttccctccttcattcctctacccattctggcaaaaagatcagcctgaagtattatcagatttaagacaaagcaacatagagtgaaatcagaggacacatttagcctatgttttccttgactcatgttctgggtggtggacagaaagagtccgggaaatctttggaaaatgcaaagaaacaaaagagtcgaaactggtgctttcctactttttaagattttaggcaaaacactcatcaaatcaaatcaatctaaacagttttaatatgttacgaagtcggttccagaaattagcagcaaatgagctgtttgggagcactgataaactgacaggttataggagcaaacatgcatgaagaagggtggggattttattgtttttgaaacattcttgctagagctccagctatctctgccctccaggtttctgagggatgagacgacaggcatatgtgttaaccgttttccattgtgagaggtgtcttctaagatccttgtatttcttcattttttaaaaaaatatttattgtattttatgtagctgtcttcagacacaccagaagagggcatcagatcccattactgatggttgtgagccaccatgtggttgctgggaattgaactcaggactgcaagagcagtcagtgctcttaacctctgagctatttctctagccctaaaggttcaaagaggtcccaccgagatttgaacttggattgctggattcaaagtccagagtgctaaccattacaccatgggtcctgctgctactgctgcttcttttttaaattggatattttatttatttacatttcaaatgttatcccctttcccagtttcccctctgcaaccccccccccatcccttttcccattactctgcttctatgtgggtgctcccctctccacttacctactccaggctcactgccctagcattcctttacactggggcatcacaccttcacaggaccaagagcctcccctcccattgataacagataaggccacttcacctccttcagtccttcccctaactcctccattgggctccctgctcactctgatgaattggctgctagatccttgtatttctgaaacattgttactgtttcccaagagtactgagtagttcaatctttaatttcttgaaccatcacttgtagcacgtgctttcttcttgtttattcctctgaggatagggagaggaagtaaatcagagtcagccagccagtcaaaaggatgctcacttaatttggtaaagtcttctcttgatttaaacaaaatgtatgaacaatgtttcacctaatctaagccttcaataattatgacacctttgtgtcccactaaggggaaattttaccaagtaaaacaacactactgataagcctgattcagagatgtcaaaatttaaaaagaaatgccatcacagaatttataaagtatcgtcatagttgggcataaaatgggcttcgtactacagtagtcattaaaagagattgtttcttcagttttgtatgataatcaaatttgagataatcaaagttgtaacataaacaaatagacttattcctactttaaagaactatttactatttgtgaagataatataattaaacttttgaactacaaggtatttgtgaaagctgattttaccttctttaaggagtcaaactgtgaggacacaattaaaactccaaacaattttttttttcttttttttggattttcaagatagggtttctctgtgtaaccctggcagtcctggaactctgtagaccaggctggcttgaactcagaaatctgcctgcctctgcctcccaagtactgggatgaaaggcctgtgtcatcactgcaggcctaaaactccaaacttgatggctgtttttttttttttttttgttttgttttgtttttttcagtagggtggccaaattctgtacgattacccaaatagtttggcaagcattgttttcatgatttgaaagacttctaagttgataagagtgcgacctccatacttttgccttaagaattcaagctgtgctcacagtgactgaaaggaaaaacgaagcaagggggacaatgagaaagggacatttccgcactcacttctgagtcattcaggctgggctcatttactgttctgtttcttgaggtgggctgtgcgtgcatggccctgatctgaaatatcaccttgttcttgggtgagctcttcttattagtccatcaaaccaatgccttgagtcctctttctcttttcctgtgaaaaggctactcaggaagtttaaattgtttaatctcttagttttgatccttccagctctcccctttttgtgagacagtcattttgaagttcagcctgtgtgtgctgaaattacaaataagttctcttctctctctgtcttcctgtctcttttgagactggatccatgacccacagagatcctgcctgtcacagagatcctgcctgtgccccggaagtgttgggattaaaggcacatgccaccaaacccaacca

SEQ ID NO: 2877 - DNA, 6627 bp, Mus musculus
attagtgaacacttgtcctgctctttcacctttttcttgcatggagacagcaatgtttgtaccagtgtggaaattaaccaacatcaacctgtataccttctcagtgaagagcatgtcacccttgctcaacagtctaatagcccatttcaagttatcttaagtccatttggactaaatggcactctcacgggacaggctttcaagatgtctgattcagctacgaaaaaattaattggtgaatggaaacagttctatcctatttcatgtggtttgaaggagatgtctgaggagaaacaggacgatatggattgggaagacgattctttggctgcggtggaagttcttgttgcgggtgtccgaatgatctacccagcatgctttgtgctagtccctcagtcagacattcctgctcctagctctgtgggagcttctcactgttcagcttcttgcttgggtatccatcaagtgcctgcttccacaagagatcctgctatgtcttcagttactctcactccacctacatctcctgaggaagtccaaacagttgatcctcagtccgcacagaagtgggtcaaattttcttcagtatccgatggcttcagcactgacagtactagccatcatggtgggaaaatacccagaaaattagcaaatcatgtggtggatagagtctggcaagaatgtaatatgaacagattacagaacaagaggaagtattctgctacatccagcggcctgtgtgaggaagagactgccgataaaataggatgctgggactttgttgaagccacacaaagaacaagctgcagttgtttgaggcataaaagtctcaagacaagaaatactgggcaacaaggacaggcaccatctttagggcagcaacagcaagtacttcctaagcacaagaccaatgagaagcaagacaagagtgagaagccacagaagcgccccttgactccctttcaccatcgtgtatcagttagtgatgagattggcatggacacagattcagccagccaaagacttgtgatctctgctgcagatagtcaagtgaggttttcaaacatccgaactaatgatgtagcaaagactcctcagatgcatggcactgaactggcaaattcacctcagcctcccccacttagtcctcatccttgtgatgtggttgatgaaggagtgactaaaacaccttcaactccgcagagtcaacatttttatcaaatgccaacaccggatcccttggttcctaccaaaccaatggaagataggatagacagtttgtcccagtctttcccacctccatttcaggaagctgtagaacctaccgtgtatgttggtacagcagtaagcttggaagaagatgaagctaatgtagcctggaagtattacaaagtcccaaagaaaaaagatgtagaatttttaccacctcaacttccaaatgataaattcaaggatgatccagttggaccttttggacaggaaagtgtaacatcagttacagagttaatggtgcagtgtaagaagcctttaaaagtttctgatgaaatagtccagcaatatcaaattaaaaatcagtatctttcagcaatagcatctgatacagaacaagaacctaaaattgatccatatgcatttgttgaaggagatgaggaattcatttttactgataaaaaagatagacaaaatagcgagagagaagctgggaagaaacacaaggtggaagatgggacatctgctgtcacagtgttatcacacgaagaagatgctatgtcattatttagtccctctaaacaagatgctccacgccctacaaatcatgcccgtcctccatcaaccagtttgatttatgactcagatttggctgtgtcttacactgaccttgataacctcttcaattctgatgaagatgaattaacacctggatctaaaaagtcagcaagtggatcagatgataaagccagctccaaagaatcaaagacaggaaatctggatccgttgtcctgcataagcactgcagacctccacaaaatgtaccccacgccaccctcactggaacagcacattatgggcttctctccaatgaatatgaataacaaagaatacggtagtgtggacacagcacccggagggactgtcctggaaggaaatagctctagtgtaggaacgcagttcagaatcgaggtcgaggaaggattctgtagccctaaaccgtctgaaattaaagatttttcttatgtctataagcccgaaaattgtcaagttctagtaggatgttccatgtttgcacctttaaaaactctaccaagccattgtctgcctcctatcaaattgccagaagagtgtgtttaccggcagagctggactgttggaaaattggacttgcttccttcaggcccttcaatgccattcatcaaggagggtgatggcagtaatttggatcaggactatggccccgcctacacaccgcaaacccatgcttcttttgggatgcctccgagcagcgcacctcctagtaatggtggtgcaggaattcttccttccccatccacccctaggtttccaactccaaggactccaaggactccaaggacccctcgtggggctggtgggcctgctagtgctcaaggttcagtcaagtatgagaattcagacttgtattcaccagcttccaccccatctacatgccgacccctcaattctgttgaacctgcaactgttccttccatccctgaagcgcacagtctttatgtaaacctcatcctttcagaatcagtaatgaatttgtttaaagactgtaattttgatagttgctgtatttgtgtctgcaatatgaatatcaagggtgccgatgttggagtttacattccagacccaacccaagaagcacagtatcggtgcacctgtggcttcagtgctgtcatgaaccgaaaatttggaaataattcaggattatttcttgaagatgaacttgacatcataggacgtaacacagactgtgggaaagaagcagaaaaacgttttgaagctctcagggcttcctctgtggagaatgttaatggaggcctgaaggaatctgaaaaggtgcctgatgaattaatattactgctacaagatcaatgcactaatttattttcaccctttggagcagcagaccaagatccttttcccaaagtgggtataagtagcaattgggtgcgtgttgaggagcgggactgttgtagtgactgctgcctcgccttagaacatgggcgtcagttcatggataatatgtcaggagggaaagttgatgaagcacttgtcagaagctcatgcttacatccgtgggccaagcaaaatgatgcgagcgtgcagtgttcacaggatatacttcggatgctcctttctcttcagccagttcttcaagatgctattcagaaaaaaagaacagtgaggccttggggtgttcaaggtcctctcacatggcaacaatttcataaaatggctggccgaggctcttatggaactgatgaatctccggaaccactgccgattcccacgtttttgttgggttatgattacgattttctggtgctttctccatttgctctcccttactgggagaaacttatgctggaaccctatggatctcaaagagatatagcctatgttgtactctgtccagagaatgaagctttgttaaatggagccagaagcttttttagagatctcactgcaatatatgagtcctgtcgattaggccaacacagacctatttctcgattgttgacggatgggatcatgaaagtgggagctactgcatcaaagaaactttcagaaaagtttgtaacagaatggttttctcaggcagctgatggtaacaatgaagcattttccaaattgaagctgtatgcacaagtctgcagatatgatttaggtccatatcttgcttctcagccgttggacagctctctgctctcccagccaaatttagttgcccctccaaatcagtctttggttactgcacctcagatgacaaatactggaaacgctaatgctccatctgccaccttagcatctgcggcaagtagcactatgacaatgacttcaggtgttcccatatctacttcagttgccacagctaattcaactttgaccacaacttcatcttcatcatcttccagtctgagtagtggagtatcatcaaataaactgccttcgtttccaccctttggcagtatgaacactagtggtacaggatccatgtctgcacaagcaagtacggttcagagtggccagctaggaggacagcagtcgtcatctctgcaggcagcaggaatatcaggggagtcagcttctcttcccactcagccacatcctgatgtgtctgaaagcacaatggatcgtgataaagtggggattcccacagatggtgattcacatgcaattacctaccctcctgcaattgttgtttatataatcgatccttttacatatgaaaataaagacgagagcactaactcttctaatgtatggactttggggctccttcgatgcttcttggaaatggtccaaactcttcctcctcatatcaagagcactgtttctgtgcagattgttccttgtcagtacctgttacaacctgtgaaacacgacgacagacagatctactcccagcatttaaaatctttggctttttcggtgtttacccagtgtcggagaccacttccaacatcaaccaatgtaaaaacactgactgggtttggtccaggcttagctatggaaactgctcttaaaagtcctgatagaccagagtgtattcgactttatacaccaccttttattctggctccggtgaaggacaaacaaacagagctaggagagacctttggagaagctggacagaaatacaatgttctttttgtgggctactgtttatcacatgatcaaaggtggattcttgcatcttgcacagatctatatggagaactcctagaaacatgtatcattaacatcgatgttccaaatagggcccgtcggaaaaagggttctgctagaagatttggtctacagaaactgtgggagtggtgcttgggacttgttcagatgagctctttaccatggagagttgtgattggtcgcctgggaaggattggacatggagagttgaaagattggagttgtttgctgagtcgtcgaaacttgcaatctctaagcaaaaggctcaaagacatgtgtaggatgtgtggcatatctgctgcagactctccaagtatccttagtgcttgtttggttgcaatggaaccccaaggttcttttgttatcatgccagattctgtgtcaactggttctgtttttggaagaagtaccactctaaatatgcagacgcctcagctaaataccccacaagatacatcctgtactcatatacttgtgttccctacttctgcttctgtgcaagtagcttcagctacttacaccactgaaaatttggatttagctttcaatcccaacaatgatggagcagacggaatgggtatctttgatttattagacacaggagatgatcttgatcctgatatcattaatatccttcctgcatctccaactgcatctcctgtacattctccaggctctcattacccccatggaggtgatgctggcaagggtcagggtactgatcggctactttcaacagaatcgcatgatgaagtaactaatattcttcaacaaccattggcccttggatactttgtatcaactgccaaagcgggtccattacctgactggttctggtcagcatgccctcaagcacaatatcaatgccccctttttcttaaggcctctttgcacctccacgtgccttcagtgcaatctgacgagctgcttcacagcaaacactcccacccactggactcaaatcagacttcagatgtcctcaggtttgttttggaacagtacaatgcactctcatggctaacctgtgaccctgcagtccaggacagacgctcatgtctcccagttcattttgtggtgctgaatcagttatataacttcatcatgaatatgctgtgatcctcgtttgatggaattacgcaaggaaagaacgggaagaaaggatattttgctgcaagattaagttacagttctcagtggaagtcatttgtgatggggtctaattcttattacttcaacaaatattgttttgacttggggggcggggctataaccctatttttcattgactttactgagctctttaggatgatgactgattattcaaaacgtattataacactttcgtagcaaaaattaaccttttttttccagtcacagtatttgtgaaaagtaatgagccatagtacccattaatgttaaagaatattaaagcatggagaggaacatgaggaacaatgaattccaacatatggctttagaacatcaggatgttcttgtattggatatagtatctagtattcaaaaatgcctgcatctcttatttattgtaagtttttaaatgtataaattgtcttatatttcttaacctcttttataaaaattttcctagaaggtttatactgccttcttgctttaaagcaattggtctaaaatatatgtaatcgtcttaattaaaacgttgcagtagggttg

SEQ ID NO: 2878 - protein, 1938 aa, Mus musculus
MSDSATKKLIGEWKQFYPISCGLKEMSEEKQDDMDWEDDSLAAVEVLVAGVRMIYPACFVLVPQSDIPAPSSVGASHCSASCLGIHQVPASTRDPAMSSVTLTPPTSPEEVQTVDPQSAQKWVKFSSVSDGFSTDSTSHHGGKIPRKLANHVVDRVWQECNMNRLQNKRKYSATSSGLCEEETADKIGCWDFVEATQRTSCSCLRHKSLKTRNTGQQGQAPSLGQQQQVLPKHKTNEKQDKSEKPQKRPLTPFHHRVSVSDEIGMDTDSASQRLVISAADSQVRFSNIRTNDVAKTPQMHGTELANSPQPPPLSPHPCDVVDEGVTKTPSTPQSQHFYQMPTPDPLVPTKPMEDRIDSLSQSFPPPFQEAVEPTVYVGTAVSLEEDEANVAWKYYKVPKKKDVEFLPPQLPNDKFKDDPVGPFGQESVTSVTELMVQCKKPLKVSDEIVQQYQIKNQYLSAIASDTEQEPKIDPYAFVEGDEEFIFTDKKDRQNSEAGKKHKVEDGTSAVTVLSHEEDAMSLFSPSKQDAPRPTNHARPPSTSLIYDSDLAVSYTDLDNLFNSDEDELTPGSKKSASGSDDKASSKESKTGNLDPLSCISTADLHKMYPTPPSLEQHIMGFSPMNMNNKEYGSVDTAPGGTVLEGNSSSVGTQFRIEVEEGFCSPKPSEIKDFSYVYKPENCQVLVGCSMFAPLKTLPSHCLPPIKLPEECVYRQSWTVGKLDLLPSGPSMPFIKEGDGSNLDQDYGPAYTPQTHASFGMPPSSAPPSNGGAGILPSPSTPRFPTPRTPRTPRTPRGAGGPASAQGSVKYENSDKPASTPSTCRPLNSVEPATVPSIPEAHSLYVNLILSESVMNLFKDCNFDSCCICVCNMNIKGADVGVYIPDPTQEAQYRCTCGFSAVMNRKFGNNSGLFLEDELDIIGRNTDCGKEAEKRFEALRASSVENVNGGLKESEKVPDELILLLQDQCTNLFSPFGAADQDPFPKVGISSNWVRVEERDCCSDCCLALEHGRQFMDNMSGGKVDEALVRSSCLHPWAKQNDASVQCSQDILRMLLSLQPVLQDAIQKKRTVRPWGVQGPLTWQQFHKMAGRGSYGTDESPEPLPIPTFLLGYDYDFLVLSPFALPYWEKLMLEPYGSQRDIAYVVLCPENEALLNGARSFFRDLTAIYESCRLGQHRPISRLLTDGIMKVGATASKKLSEKFVTEWFSQAADGNNEAFSKLKLYAQVCRYDLGPYLASQPLDSSLLSQPNLVAPPNQSLVTAPQMTNTGNANAPSATLASAASSTMTMTSGVPISTSVATANSTLTTTSSSSSSSLSSGVSSNKLPSFPPFGSMNTSGTGSMSAQASTVQSGQLGGQQSSSLQAAGISGESASLPTQPHPDVSESTMDRDKVGIPTDGDSHAITYPPAIVVYIIDPFTYENKDESTNSSNVWTLGLLRCFLEMVQTLPPHIKSTVSVQIVPCQYLLQPVKHDDRQIYSQHLKSLAFSVFTQCRRPLPTSTNVKTLTGFGPGLAMALKSPDRPECIRLYTPPFILAPVKDKQTELGETFGEAGQKYNVLFVGYCLSHDQRWILASCTDLYGELLETCIINIDVPNRARRKKGSARRFGLQKLWEWCLGLVQMSSLPWRVVIGRLGRIGHGELKDWSCLLSRRNLQSLSKRLKDMCRMCGISAADSPSILSACLVAMEPQGSFVIMPDSVSTGSVFGRSTTLNMQTPQLNTPQDTSCTHILVFPTSASVQVASATYTTENLDLAFNPNNDGADGMGIFDLLDTGDDLDPDIINILPDTDVHSPGSHYPHGGDAGKGQGTDRLLSTESHDEVTNILQQPLALGYFVSTAKAGPLPDWFWSACPQAQYQCPLFLKASLHLHVPSVQSDELLHSKHSHPLDSNQTSDVLRFVLEQYNALSWLTCDPAVQDRRSCLPVHFVVLNQLYNFIMNML

SEQ ID NO: 2879 - DNA, 29650 bp, Mus musculus
  misc_feature (1)...(29650): n = A, C, G or T/U
agtgttggcattacagatgttcaccattgtgacctgccattttcctactttgggacaggaaggtgtacaaccattttattgttactcttgactcagtggcatagttatctctgtttcacagatacccaggaactgttctcaaggagttgtacttaaggaactgcatccgagaagcctcagttctgcctgaacttaacttagatgttgagatgctagataaacttccaactaatgctagaatgtgatgatagttctgttaacttggtggagggagtgtatgctttttacatgtaaaacagacatgaatcacttgggaccagaaggtatgcctagttgctagtctccaagatagcagctagtttctaagacagttcatttctagttatttctgcttcctgatattcatacccttgtgtgattccttcctactctttactacagttggtctgtgtgaccaacagctcgtggcagaagtgatggtatgttgcttctgagattaggttgtgaaaaactggcttccgtatggatctctcccatcctcctcatcccccaacccccgctcccaatcttggattactccttgttggagaagttagctgtgtgtactgcatagtctcagaagaccacttggcagaaaacagctgggcaggaactgttgctgccagtggctgtaggagtgaacccggaagtgagatctttaaccctactctagctctaaccaacatcttgacaaccttatgagagaatgtgagccagaagcacctggctaagccagccaccctctgttactaactcccaggaactatgtgaggtaataccatgtttgttctacgctggtatgtttccatgccatttctatacagcagcagcagcagcaacaaccaaaccaaaccaaaccaaaccaaaccaatagatggatggatgtacgtttaggagccaagacagccaagcaggcagcacagagggtcttttcttttcttctctgagatcatctcaggtggatcaggctgcccttaaactggctatgtagtagaagatgatcttaaattcctgatcctcctgcctcagccttccaggtgctgtgattccaggcatgtaccatcacacaacctgattccaaatcaaaccacaaaggaattagtgaggaagcctgatgcttgctgtctgcaaggagcagtctagcacagcaaaggagaaggtagaagcgagggtgaatagacagattttcagcaaccaagattccccccccccactaccaccactttcagtaaaattcccaatagtagttttcagaactctgacctcaaactccagctggaagaacacgatctaaattcttcatcctaaaaagcagggcatgcccaagtcctattcatcagtgaagaagtcctaagagaaacacaaagttctttttgagttatttcttccttagtacctagggtagcacccctcttctctaagtaccatcacacttgatcctcagccatttaaaccatttgaaaacacgattgtaaaggtgtttattgtatgagacataataactattttaagagtctggtctggggctggagatatggctcagcagttaagagcactgactgctcttctgaaggtcctgagttcaagtcccagcaaccacatggtggctcacaaccatctgtacagctacagtgtactcatatacataaaataaataaatctttaaaaaaaaagagtctggtctgcttctgattcactgtcattcattggcccatcacacaccacttagtaaataccagagcatggtaagagaatgaatgaatgtcaaagccaggggttgaaaagctgtaataggtattttcctttctatgaccatcaaataagctgtcctataagcttatggtgaaaccaagagattgtagaataaacttttcttggttgtcatatgttttgaacttccttgaactttttcttgaggaaagagaataacgagattgcaaactagtttgtatctgggcaggaataatgatcctgtgagaccaaactcctgcctggtatttctctcctcctcttcctcctccttcttttcctcctcctcctgtcctgcatgaggagtaggctcaaagaattacatttgtcttctcttttagctttggccactcagaaaaaaaaaaaaaaatcacctcaaagaagaaaagcgtggtcagcagtgattccctctgttttctcaggttccctgctgatgggataaatgacagtgggggtaaatgggaaacagaaagggtgtttgtagacaagctcctttaacttgggtcagtcctctcctctcctcttcctgcctgaattgccaccatgcccccaacaagtctcctggaagtttgtttctgaaaacaaatcttagcttgtcacaatcttatttaatcttttctggaaaagaagcaaactctttatgattaagacccaggatttcagccgggcgtggtggcacacgcctttaatctcagcacttaggaggcagaggcaggtggatttctgagttcgaggccagcctggtctacaaagtgagttccaggacagccagggctacacagagaaaccctgtctcaaaaaacaaaaacaaacaaacaaaacaacaacaacaaaagactcaggatttcttctctaaccaaacaaactgtccagcccctcttttttcccctttcttcttctgggattttccccctcccccacctttcttggctcaacccaactaactcatccttcaagattttgtttcaactgtccctccaagacgtttctcagagcctttgtgatatattaggccccttagcctgtttcagaggctgctgtgggcacagggaagctattctatatctcaacatttcaatctagaaaagtggaataatagaatacctcagaagctaggtgcacagttacaagaaccctgtctgatatgtactgcctgtcacatattaggtgttagtgggagtggccatttagcccaatctcttcatccctttgtaagaacaggagatccagtcagtcaggtaatttgactggaataaagacctggaaggagacagtactgaggttttgctaataaaggtttgctaacctaatttcaaagtaatggaattaggaagggttgatttcaaagttcatgctaaaatgaaacatttgatagaaaacttgaggctgagcatagttgttatactttcaagaaaagtagcaatttaggtttttcatagatggaaagacaatgttttcttcttttctgagctggctgatttcatttgctttgttcccccacctttgtatattcacattccctgactgaaatgctgtgtaacttcttagtccttctttctattgaattaagtacaacattaaaccattaacatgaccttaagaaaaatcaatactgtctctaggctgaagatcactctctctagggcttaattggttccttctttgctttcagcttttgactctaaacttgtattacccaacacagtagcccttagtcacgtttagctattgggcccttgaaatgtggctggtctggattggaatattctttgggaaaaacaaacaaacatggattttggaaggtttggctaaaaacaacttttaaaaaagggatagctatatgaatatattttatatgaactacatgtaaaatgatatagtttctgatatattggccaaagattttaatatgtctaacaaacagtaattgaaattataggatttatttggctttgtttcatttctattggctagcgctactctagacttggcttttttttccagaatcatgggtagaggattaatcctaaggtcaaatgctgccctttcctggacttcgctatatcaagtaaggagtccacaggccagagcctctgacattccatacagaatggagttcctgaaaacccaaaagacttacagaatggttttaggtgcagagatcactgagtggatctgtatttcaaagagaagatagccagtaattattgacccaaggctacctctcaaagtcattttgaaattcctactgggctactgttaggtattttttcctctctcttagtcactgcaacaactctcacagctggtgccattttacaaacccattttataaatgagtcaattggaattgtgaggcaagaaggaatagttttgactgcatttggtccaactgtccagatgtcatatctagtatcttctccatcttattcttgcatgttcttacacacatacacacacacatacactatgtgctgtgtaaactgtataatgtacaacaacaatgtaatctgaaccctatagaaaaagattatagagaaaaacgggaagatttgtttgtttgcttatttatttatttatttattcatccatccatttattcattcattcattcattcattcaaggtcttgctatgtagctcaggcaggtctcaagctcactcatgattctcctgcctcagccttttgagtatatatatatatatatataaatacatagggtttttaaaatagtatatatatatatactattttaaaaaaagcaattgatgaacctacattgacacatcactgtttcctaaagtttctatttttgtttctctttagctcacacaaaatgtcatcttaacacaatgtaggtggttcccaagatgctctctgagagtgatgctggccccgttttctctttctccctaggtttccatccctctctctgctgggatcttagtcctccactgctccgcttcattccccttctcagtctcttctgctgtcacccctgccccatcccccttggtcccagagttctttccttcttgagaagtctttttttgttgtcagattctcctctcttttggagaagattgacattcaaatgaaagttcaatcaaatgttacttcctacgtggtagatgtcaggcaaattctacctgcccctgaattcctaaggtatgtatatgtgtgtctgagagggggaagaggaggaagggagggtggggtggggggagggaaaaattaaggaggatggatatacattagaaaaggagtgggagaggacatttcaagttgaggaagagaacagaacaggtatgtgaggattctctcagagaaggagagatgagtgaaggagcctttgcctcactgagtcttgggatccctgactcctggtgctggcactcagttataaaggataccgaccttagttgatttgagctcctggattgaattagtcctggttgtataattgactttgatatgtggcctttggatctgaattgggcttaataagatttaactgcttcaaagagctttataagaattcattctatccttcaaatctgatttcagatgctgcctacttgacgccctctcaacttggaaactcctcctccagcgctcctagtgtgtcacacttgatgcctgccttattcaggtcactgccttttctcttattctgtaggaattgcttctccagaaatcccgaggaacaggcacatactcaaaaaattatttttcttttctattggaggaaaagtcttgccactacccgagtctggtctcgaaccctcagtcttcccgtcttagcctcccaagtacgggactgcagatgtgtgctaccacttggtcatgatttagaaaatcattttaatggttaacattcatgtgattaaggaagcaatgggaccagtacttatgatcaacattatttcatcaaacactttaggagaaaactactctgattatccttgatttatgataaactaatttgatttagggtcagatttgatctaaggtccactggcaagcagcagaactttctctgcaagtttttggcttgaggaccttaatcagcactaaggtggacaaagaggtggtgaagaatacttttcattttatggctaaaaaagtaagctagaagagtctactattttacagagataattgtgacttaaagttctgatagctcctaactgttgtctcttcttttcttcttgagacagggtgttactatgtagcctaggctagcatggagcttcctttgtggaccagaatggcttcaaactcagagattccccctgcctctccagagctgggattaaaagcttgtgtctttactcctggtatcattatctcttaatctttcccgattcctccctcgtctcctcctagaatccttttaaagtttgcatggaaaatgttttgaactcttcactgaagagtaatccagcccagaataattgtttgggaagggatttaacatcatacatggtttttcttattcatttctaagttttcaaatatcaagtacctactgtgtgctagaacattttaaggcactggacagctatagcaacaaagggtcagttctcctgattctcactctcagagttcacgtgtttctcaaagtaaccacagaaaggaaggatggaagtatagtaatgcatgccttacactgcttatcgggcgcaggcacgaggctagtgctcaggttgtattcatgcatcatataacaaacataacatttgttttcctcattttacagatgaggaaactgagtcacaaagaggtaaaagactggctccagcttcgaatcctgaacagcaggactttatttctagttcattaaccacaagaccatatcgtttcattttttttacctctttattataacttaaaaagagagggcgaggctggtgtctatccagctctcattctttagccctagagttctgcgatgtaccccggcggccttatggagtgaatgagaatgcattggaacgtctttctttttcttttcttttttctttttctctctctctctctctttttttttttttttgccaactttctcttccaaagaatttgaactgatttccaagtaattctcgattttgaagtgaaccttcctgcgctgctgcactttccccagccagcagaaagctagggccaagactcgggtcatcttaaccggggcatccagcagatggcgccatgttagtagccaccagctggccgcccggtccccggggctccgaaagcttccctgccctccctcaccgccttctctctcccccctccctacggagcccggcccacgtgacctcgcggcggccaatgggcgagcagagagggcgagctggtccctgtggccgccattaaagcgaagggaaaacccgtgaattcggattaaagggggaaaaacaccgcccgctgggcccacaaaatgggggagactacggcgtccaggcggtgaggcggcaggagagcagacgttaggcaggcttggcccagggacaacacgaggacacagccggagaatggactgagcccacagacgccgccaccacctccgccgctgaggagactctgggcttaaggacatcgccgctgccgggccgggggcccggggtgctctgccggtcctcgcccttcccgcccctccgcgggcgtccccgggccgcggagaaccctcccgggcttctgggctcggcccgctcggactcgggctctgactatttatcgtgtacctgattgttattattatttttttgtttttcgtttttttttctcttttcttcttttaaatctttttttatttttctggtggaagggacagacatcccttcccctcctctccggagagggacgcgcgtccgcgggctccgcagtcccggcggccggccgagcgcggcgcggccctcccgcctgcgggctcggccccgggcggatgggtgccttctggcgnnnnnnnnnnnnnnnnnnnnnnnnnnnnnnnnnnnnnnnnnnnnnnnnnnnnnnnnnnnnnnnnnnnnnnnnnnnnnnnnnnnnnnnnnnnnnnnnnnnnnnnnnnnnnnnnnnnnnnnnnnnnnnnnnnnnnnnnnnnnnnnnnnnnnnnnnnnnnnnnnnnnnnnnnnnnnnnnnnnnnnnnnnnnnnnnnnnnnnnnnnnnnnnnnnnnnnnnnnnnnnnnnnnnnnnnnnnnnnnnnnnnnnnnnnnnnnnnnnnnnnnnnnnnnnnnnnnnnnnnnnnnnnnnnnnnnnnnnnnnnnnnnnnnnnnnnnnnnnnnnnnnnnnnnnnnnnnnnnnnnnnnnnnnnnnnnnnnnnnnnnnnnnnnnnnnnnnnnnnnnnnatgccggtgtcccccggctaggccccgccggagtcggcctcctccgaggctctgcggccgccccgggaggcagcgtccgctcacctaccgaccggggctctgctgggaagaggcttgtctttccccccaccccctcggtctttctcctcctcctgtcttgttttggactcttttccccatcctagtcttttccttaacttgggctgcttatctgcccggatagtaatattttcttgtgtgcttcttgcttccccgcctccccgccccccgccccttgtatcgaacagtgtatcccttttccacactttccacgattgcccctgctcgactgcctttaagctcgcttttcccttgtaagtgggcttctcttaaacaggacccccccaaaaacttacgtattaaaaccctcttcgttttgtaagttaaactaatacaggggtagtgtccttatgggtgacttcagatctttgtgtaaaaacagtgtgtgccggttcatatgttttctttttaaactttgaaaacattttgccattttgacaatttctagccatcttgcttttattagaacattatgtttttgtgagagtggaggggcaagtggaggaggtactgtggtttcgcactaaacgttctatatttgtctgttttgcttacgttttaagaatgttttgagctggctgttccttttattgaactgaaaagtctggggcagctggaattagggatgttctagtacgtgtatgtaggtcggcccaaatcggataacactcaagagttaagacttttgtcaaaagtaccaactgttgcaaatatctagtcctgaattaaacgatagccgagcttcctgaatgactaagttagagtgacttttttcatttttcgtgtgctctgagaaatattaagtctatcataggtaagtgaattaagtgggtggagcataactagttggcaagcataaactgccagtcatgtatcagcagtttcatttttggcaccttatgctttctgtcactaagttagaataaggaattactgaatttcctttgttgaatctctttcacgatgtggtaaatggggatcttcagcacacttacgtcttacagattagactggttttcttgacatgtccattaatcagcatctcgtcacatgtagtaagatgtacagcaggtttaacgtttctgtcttccccaactggatctatttttggcactttgggtttttttttttttttttttttttgaagctagattagcacaaatctgacagctctttggaagtggttctttccttggagctgtgtgcttgtggagaattaacaggctttttttttttttccttaagaaaaaaaaaattcagatggttttcgtattagagccatgacttcttacaaacctggaatgagagtctttactttccagttcaccaaggatcaaatgtgactgacagagaggactgtaggacagaggaggaggctagacttactgtgcaggcttagcatcattgtctcattggtcagctctggatatgttgcatttattgtagacttgctactcagtgacatctttgataatttatgtaacagttttgtgttcttttccttaagctcttgttggttgaaacattagaattctttgctgtggtgtttttggtttgtttggttgtttattttggtcatatctttaggtacttaagcatgcattaaaaatagtgatgttttaatgaaatcaaggactttatagtgaatatatattttatatataaatatataaatagtatacttatattattatacttaataacaaatatttattacttagagtgaatgaacaataatatagatattttgctttcttttccttcaggccgacttgacaggaattaagtggaaaagatatgtatggcaaggcccaacttccgcccctattctgtttccggtgacagaagaagaccccattttgagcagttttagtcgatgccttaaggcagatgtacttggtgtttggcggcgagatcaaagacctggaagaagagaattgtggatattttggtggggtaaagatcccaattttgctgaccttattcaccatgacttatcaggtgaaagcactttatcctttttaactgtgccttagcaatgttgtacactttcccaatgtgcttctgctgtggtggacggccttgtcagcctggatctgtaagagggttgccatgctctgtttcaccatctttgttttggtttccttaagttacctgtgtagattccaggagacttgaactctgactgagtttcttcctctacctcccggcttctttctgtaatttctcacaggcagtttgtatctagggaaagcattttcattaacctgagaaaaatggaatctggaagcatgttatttttacagttatataatagtcttgaagccaagtgtaactcacctttgagtctagtttgctgtgttcttttttgtctgaccccgtgggcaggcctagaaatgtaactttgtttggcatagattttcaaaagtatagttgtattttaatattatttatgattatgtattaactcggggaggcatatgctgtttttggggggtggggggtgggagggtctttagaccctgcttcgtcaaagggtatattagtaaggacaagggccatctcattaacttttaaaggacaaaggtcattatctgaaaggttgtacagaaacggtttattatgagcacatcaatatttcttttttttttattttcttgacttttagggccaaatatactttagaaagaaactatagccctttatgaaaattactggttatgtttattttaaactcagtgtaagtgtatctttgactagatactctcggagggaaccaagttctagtttgataagagttttgacagctaaattgaaaatttttaaggtctttaaaattttctgtgtgagcagggagtgtaggtgtgggtgtagatatgtgtgccaccatgttgtgtagaggtcagaggacaacgtttttggagtcctgcttcttccatcttggtgagacagggttttactgattgttttgcccttaggaagcttatttcgggccacctggccctctttgtttctgactgctcctatctctgctccccttcttggtgtaggggtgctggaattacagatgcaccacatctagtttttttgtgtgggttctggaaatcgaactgagactgactagtgtttttactctatccccgagccatctctcctgctccttaggtcttttgaaaaaaagctttcttgtatgaaagttagttttctgtggtttatggttttgaactgtaggatctgttttattttgtatgaaatataatccagaaatcatgtagccttacttaaataaataccttaagtttactcacagggtttagtcttcttgataaagttggcacagcatctgaatacacttttttatttgagacggagtctgtgttgccttgaattcaaagcccccttcaagctcagcctcagtcctggttggtattacagctgtgtgctactctgtacagccttgaacaaacctttccatggaacacattttatgccctttgaactcgtattccttctggttcctgctggaattagagatgtgtgccatcagactaggctccagatagctctatcttgaactaatactttctaaggtcaacatttgtttaagaatgcgccttttatatatttttaagtcaccttttgtttttaatgaattcttcagcattttgagagtggtgcagttgttttatgatagagcattctggctttcctgaaatgttactgaagaacctagttcttagttctaaatattataatgtgtttgtgattttgcttgttttgagacagtgttacacatagtccattagggctttgaagtcctgattttcctgcctccacttctcaatgctaggatcaaaggtgtgtgctactacacttgacttatacagttttagatagtaaagagatgagtgtatatctgtaaatgcatactgtgttgtctgagtgtgtatcagtagccttcgtgccttttagcaaggtgtgctttctgcttcatgcactaaatgctaagcatacagcttccttttcctttcattgacttaggtgagagttattttaaacattgaaatgattcatgaagtcacctcagttaaagtgtttgtaggttgtttgtttgtttactttcttttaagtgctaagtattgaatcttgggccatgtgtatatattaaccaagtgctctactgttgacctttatccctggctcattgttaaaatgttgatagactgtttagacactgttgttaaattgaaatgtttaagcaaacacagtcagtgttaaaactataatggtgctcagagtgtttggctagcctgagtaaggtcctggctttgaactcccaataccacaagaaattatatgaataccttaagtctatgagagtttagtcttcttggtaaagttggcacagcatctgaatacactttattatttgagacggagtcttgtggtgttccttgaattcaaagcccccctcaagctcagcctcagtgctggttggtattacagctgtgtgctactctatacagccttgaacaaacctttccatggaacacattttgtgtaatcaaagataagtttaaatacatagtgtttagttttaccatagtgattctaatgttttgaaggttaaaagtctattaaaatagaatatgagctgtttaataacaatgtatgttgttaaaacactttgtgtagcttttttcttctggatttgaggtcatcagaagtgtgttcttaagcaaagcttggttagagtttaaagtttctccttccttctcctttagcataattttaaaatgacaatacctgcactctaatacagatactgatccttgaatataatcaaaattttgttgctgtcagagtctgctgactgctattgaatagctaaatatttttatcaaagtggaagtgacccaaagagtgagcacacacactgttgagtagcatgtgagcatgtccactgtctcaaagctagccctgaactcttggtttacaaagtcagtggtatttatataatgttttagcttctttttaacctgttgtttactttagaatgttacttagatcagactatcttaaagaataataaggtcttttcagatggagtatatttatcttgcccttttttttttttttttttttttttttttttgctccagggacaccgtctgcctcccttttggggtaattagtgcgcctctgtgctctagctaacccccttttcatttcttcccatctgtggcactcggttcccttcttttaagctcccttgagaagagagcagctggacagtaggggtggcatcagctgcatgaggcagtcctgagctccaagtggaggtgtagcagtgaggaaagaggaccaggaaggacccaggtggtgactaagcagctagttaatttggcttgggcctgctcttctcagtcagtgtccctctgtttggttcaacacctactacttcttgttactgacatgtttgtgattatggaaatattgccctccttatagggggtaggaggagaaggtaggcaatcatttttgtaaagattagaattctctgtttgtttttttcccactgatgtgttcaataacaaaaccacagagtagcccctttatctactctgtctcatctacagctgtttttaagaataattttctttgaggtaattttagatttatataaatcttggtaggatagagtagagagtgcctgtgcatctcttacttaacttttttttattcttaatatctatgtcagaatgatggactttctaaaactcataaatcagtattgttatactaaaatacctaatcacttggatttctttattttcacctagttctgttgtttttaggagctggcctgggctgccaaatgatatttacctgccctcttattttttgctcttctgggctttgacagtttctcggggaacctccctgctcctttttgatgattttgacagttctaagagtctggtgtctagtcaggtttcgcagtgcatgttaaatttaaccttctcttctgcctcacaccatttaacacatttctgggttactattaagtttagctaatgtatagacagaaaacatagactgagtaaattgtattctacactttgaatttttgcttattttgtatcagtagtacttgatgctgtttcacaaagtgatttgggaaggtctggtgatttttggataaggatttgtgctcattggtattagcttaagtataacattccagaaagacatttgttaaagagaaaaatcccttgaatttcaaagccaaatatatgagtttttattgtatttataggagaatggataggtgaatctgtgttggtttattctggttacaggtttttgagttgtttagtagtgtgtgaatgacagatgtaaagttggtggtgggaaaatcttagctcactggctcctgtcaatttctccagtgggtgtgattgattgactcttttaaatgtactgttagttagttcgctgttttaaaaagcaagattgttttaattttgcttggtgtgtcttggagcatgtctgtgtatttttactctgtatcctaagatttcaaaattttattgcagccactggtttttattcttaaaaacaaaactattcattctcccaagattgttgtcttaaaaaaaaatcataaggtagattctgatgagactttggattccttgaagtaaaaagtatgctgaatcaaggctaaaatatgtgttctttttttgtggttttggaggtctctatataggagtttagcaccacatccagatactttcattatagtatagttttgtagtgcatattgcttagctgggtcattattccagatttaattttggatgcttttatcagaggacatcaattatagtggactttaaccttaacgggcagcttttagcagagttgatagacacaaaagcagcaacctaagacatgctgaagaattatttctatctttgttttttaaacttcataaattgtgtcccatttccttggctaatcttatgagtgatgactgtgtgtatgctctgtagtatccttttttgagtaagaaagtgttattgtttagatcgtcatgtcagatgtaacagtcacctcagtaagctgttttaaataaatcttcaagttttgaccctaagtgaatgatgtgatagctattatttgttagatagatatttgttgatttaatgagttatgaatgagaaataattattaagagagacgctgatttagacatgttgattttttttcaagaaatctgtactattttcttttcctaacatgctaatttttgtgtcattccttatccattggcatatgttgcatcttagctgtttagcaaaattattgggaaaagatgcctttttaaaaatcggctgatcaccatggagacatttaaagaggtcatttttgaggaaaatgttgaatattggttgttatcaacttttttgcttttgatactaatttttttctaattcatagttattttgatgacctatgacacatcctttggcactcctataatctgtgttcttagtgaaacatacagctttagcatttgaacttttatgttgttgcattctacagctaaatgtgcaaaattttttgagtatcactggtggttaagatttctaataccaatagtaatggaaaagtactaaaaacagaatagaaactttgttttctctggggattaaagatacgagaggggggggaaacatttatttaaatgcattaagcagacttttttccattagcctctggttaagttctaaagtgcctgctaaagcttccatgtgttcccacctcctttctttccttgttacagtgctggtgttgattcaaggagcttttaattagtgtaagataaaagatacacagtacttgtcttaggtggttggttctgccgttcactgtttatatctgtgagtacagtatgtagaaagtactttttgtttttacaacatcagggaattagaaactggattcagtacactttttgtttctaggtgacactcttcccaaaacagaacctaaatttctttagacttttcattgggtattttattaggaattagtatttcattagcaatgaaaaatggaatagttatttagtcacttaccatgtacatgaaggtgtagatcaggggtggttttttttttttttttttgttttttagggttgttttttttttttttttgccttgggtgggtcctgtttgtactaatgaaaattatgagcttctgggacaagagcctcctgaaagcattaagttcatgctaaggttctctagataaaagttaaagcaatgagacaagtccttaaaaattaatcctgctttctaaaaagtgtgtgtgtgtgtgtgtgtgtgtgatacatgtgcactacacatatgtggagatcagaagacaactttgtggagttgtttctcctaatcttatgcaagttctgaggatcaaacttaggtcatcaggctgtcagcaagcacttttaccctctgaactatcttgctggccttggttagctaaaccacatttggtattcttagcttagatttagtcgaaatagattttaaaaaataaagactttttttatgacatgtaaaaatgtataaacaactgtaagttttgcttttctaaagatttttgtttttaaatgcaaagcagttcataatttgctgaacagtttttaaaatataaacaacattcatatatttatttttgtgattgtgtatgtctgtggctatacaagtgcagtgcacacacatggagttcagagaacatctgtgggagtctgttctttcctctaccaagtaggtcctgggattcaaacccaggtggttaagcttgctgagccattattattggttcaaaataggcttttagtgaattggaactttgtgcttaacactcttgttttaaactgtatgaagaggtaaattattcataagttttaaatgaatttattttgaattaatctagaataattaatttaaatgaataacagtttgtagcttagatatgtatagaagtaactgtgtatcttatgtcttcttaaaacttagcagtagttataatgcaaagatcagagccattgtgtttagaaggtagggagttttgaaggtaacaaaggacattgaacaggtggggaattgggagcagttcctggcatatttcttttggaattatgaacacatgtatttctattactgttgtcatgtaatttgagatacacgctttaatgaagctatttgactttgaaatcagaagtccttattaagccaaaagatgggttcttatttcctcttagctgctcgcacatatgcttgtgatctagaccttaaataagtgaggtcactatgagccagctccttttctctcaggatatctttataataagaggagacccataagcatctgagctgtaagtgaagtagataaggatctctaacataactgaatgggaagttttcctacttaaaattactttattctagcctgcgagtattactgatttcctttgtttttctgtagaggaacaatattagttgctttgaaaggtctgacaatgatttgggaaagaacacttgaaagaagaacatacaatctgtgttaacctttgtagtggcagcttccaatgcagttcaagcccacggtcgctatggtttctagttaatgtttaccctgaccatttgctgtaatacattctgaatataaactgagtgccactcttaatacagctctgtttttattcaaaagctcatagtaaatgttatttttctaggttcagcatgtaagtttgtgaactgagaaatacttgtcctttcattttgttttgtttgaaaattaaatgagaacaagacatggtggcacaggtctgtaacctcagcacttgagaggctcgagaggcggagatagaaagatcttgagttcaaggctagccttctagagcaagctcctgtctcaagaagaaaataggtgatggtgcataagtcggaaatgtttagagctgggagtggtagctcacacatacaatcccagtactaagtactgagacaagaggattgctgagagttcaaggccaacctcgtctatgtagttagctccagtccaggacaactgggttaaaaagagaggcaaaggaaaggtcatatatataaagatacagtatattagaagattcctaattatatttgggctaacaaaataaaatgtaagttgctgatgtggtacctatcattatttggtacccttgctgaatgttttgttacagataaaagagtaaattatgttctctgaactatgtctagacttactagtgattgatttctgccccctactccctaccccgaaacttaacttagagtgattaatagatttagtgggaaatttgaggctatgtagttagtgaagagcaatacttcttctgactgatacacgtttttatatttcctcctatactgaataatcatgtgagtcattgaaatgagatctgtttgataattaacacgttgcttggtagacttggtggcagcagcttcctttatactcatcacttagttttgtagttgagtcatagattagaatgctgattgtcatgaaatattttgagtttaattattaactgatagactttctgcccctcctccttcaggttaaatgattagaagaattaggacaaagtaacaagtgagccagtttagaaacaggcatcatatagtatgcttaatattttccaggttatccaaatcaatacccttttttaaaatacagaaaataagactttatgtttatgataccattgctatcttttatattgtggaaaataatttttaggcagttttgtagagctcttaggtattgtcaatcttgcaggatatctttgaaacctgatgttttgatgtttaaagatgtattaaagaacagtaagtatagtggtgcgtgtttgttatcccagcactcagaaggtagaggcaaggttgctgtcaagttccaggccattcaggtctaaatagtgagactctcaaaaacagacaaacaaacaaacagaaagccacctccacacccccacacacagttcaagagatcaaaagattgcagctctgcattctgaggtaaaggagagagctatggatatagacattgatctgtcacatatttagttttcccggagaagatgtagtctcactaacttactttctacttgatttttttttctttagaagaggaagatggagtatgggagaatggcctttcctatgaatgccgtactttgcttttcaaagcagttcacaatctgttggagcgatgtttgatgaaccgaaactttgtacgaattggcaagtggtttgtgaagccatatgagaaagatgaaaaacctataaataaaaggtaagctgtcttattttcctcttttgatagttgatgtttgttaattttatgagattaatagttaatatattttacaaaacatattcagaagttaatgttggcagagtactataggtatttctgtccctctccctttattcatgtaagaagtttcttgcaatgggaatgagctgtatatatgtttttgagagggggttgttttttgagtagtgtctcacctgtggacctgactggcttggaacttgatttgtagactaggctgaccttgaactcctgatgtctgattgtgttttgtgtagggttgacctatttaatttttaaagatttatttttgttttgcatgtatgtgtaaatgtcttgaatgtatgtatagcatgtgagtgcctgatgtctgaggaggccagaagagggttttgtatcctttagaactggagatagacatggttgtaagctgccaggtgggaggtgggaatggaacccaggtcctctgcaagaatagctagtgttcttaactgctgagccatctccagcccctaaattccccaatcttaagtggctttaactaaagtaaattggtgttctgcataagatgtgtttaattttagagaagttaattttcttgagctttaaattagatttatgacacagaaaaataaaaaagttgcagatagaggtacatagatttttagggcaagcatctctctttctctttctctctttctctttctctttctctttctctttctctttctctttctctttctctttctctttctctttctctttctctttctctttctctttctctttctctttttctctctctcctcgtctactgcttagtgtagccttaggtatcctggaactcattgtgtagctcaggctggcctcttgctcacagagactcacctgcctctgtctcccaagtgctggagttaaagtagtgtgataccactgcctgaccagatttgtttttaatggaaaaaatatgtttttagttttttaagataattgtatcatttttccttctcttttccctctctagcttctcctacctttattctctctttgaatttatggactgtttttctttagttgttgttgtgtatgtaaaactctgggcatggtttggagtgggtctattaccacagcactgcggggaggtggagctaggaggatccctagcacttgctggctgccagcctagctttagatttggtctcaggggctaagatggagagtggtggatacacacacacacacacacacacacacacacacacacacacacaccctcgctgtctgtgtctctgtctagattgcctttcttgtgtcttcctgtctccccatctcttttgtggtaatagagatcaaatacatgccaggccagtgctctccccactgagttgtatttctagtatttagttgtatttttattttgaggctacctttcaaagttgcccaagttggcttcagacttgtaatcttcctgtgtcagcctctggagtagttgggattgtggcgtactgcatggtaagtccagggagatattcattttctaatattctggacatagacctagttaatttgtctactagttactaaggactgaaagacaagaagtggagtcaccttctagtgcattgaggaaaggtataaagaacctttcaatttatgagtagttagccatggaatcaaattagtctttagataattgtataaaagaacatctaatattttatcttaaatagttgaggggttgttctgcagtacatgggttttgtgctagtcactaggtttgccagtaagattataggaaaattggatggtataagaaccagtgacttgcgatgcttgattgtatatccaaataagactgtcttgagaagagtattatgagtttgtattttgttaaacattttgtcatgttgaatctcttatagccattttgctgattgggcagttaagtttgtatatttggcaagattttttgttttttcttttgagccaattctcattgtgttgtccattgattcctggtgcagttgatcttcctgccttgcctttctcctagttggtattatagataggctctactgtactggctaacatttttttatccattcatgcccccccccccaacctacccctgtgtgtatatggtatgcttgtattatagcatgagtggtttcatgtgcctgtctgtgaaggtcagtggatgtcttttagaagttggttatcttctgttatgtggttcctgggaacagaacttattgtcagatttggtggcaagtatctttatccatttagccagtctccccagcccctcacttagcaagtttcaaatgtgtctaggaagatatacagggtagaattacattggtctacaactctttttttgagacaactgataccttacagagtatattgacataggagattttgctaagtagcagatgatactatatacaatattataaaatttgtagctcagactggcctggaataactgtagcctagactaatctagaacttgaggtgctctttatgcctcagtgttcagaatattgggcttacgggcaggatttaccacatctggctaatattcaattttaatatataccataatcttatcctatacattcagttatagatatgtaacttttttttgaaaacaatattgctaattttgttagtagtctttgacatttttattctatatatattagttatctttagcctcaattttaaaaggcaatgtattttacaaaacctatacatgtgagcatgcatatacatgtaagcatgcatatatacacacacagagacagctataaatacaggataaaaaaattcatggtagatataacaaaaaagagataggatcaagaatgtggttcagcgtgttcttgtgtcctgggaaagaacctgatccacaaagattaagatgttcttggtttttgttttgtggggaagaggagaggaatacctcaagcatttgtgatatattgtcgtaattagaatattaaagctgagcatggtggcacatgtctgtctgtaattccagcacttcagagactgaagctgcaagttcaagatcaatccagactacatagtcttagcgcaccacaactgccccttacccctcaaaaagaaagaaaaggaaagaacattagggtggaatattgaaataatgatgcttttttccccttgaaggtgttttacgtctgtactgtttactgtaatagccactagcttgctgctatttaaattcaatacattgaaattaagataaaaaattacttcttcagtttcataagctacacttattttatataatggctgttgtttagtataataatgtttcagagatggggcatttctatcattgtaggaacttcttttggatgatgttgcctttataactaacagtgcttttagtgttttatacaagcagttggtcaagtgttttatttttttaatcagtaggcagaagaatattcttatatgctttaaattccataataaaactgtttattcctacatggtggcttctgcattatctcctgatctccaaaattaactaaaagtaagcaccatgatatgtaaatctctcctggaaaggaactgggagcagttagtaggtttaggatgatctttgttccttggctatcttactacctctgaacaggtgaaggtggtaagaggcattgctatgcgttgttcttgtttgttcagaggggatcatgcttatgtagcctagcctggccttgacctgggcctgtaggcatgcattactatgtctcctttacaagtatgtttcttttctttgtgtctctttagtagcataaagaaataggatgaacttgagccacatgcatagtgtaaaatttctgttacagtgttttgttttttttccagacggggattctctgtgtagccctggctgtcctggaactcactttgtagaccaggctggcttcgaactcagaaatccacttgcctctgcctcctgagtgctgggattaaaggcacgtgccaccacgcccagctctgttacactgttaactgagcttggtgatgtgtttgacaggtgtgtgtgtgtgtgtgcgcacacgtgctgagtaaaataaacccaaatcaggtgaaactaattttaagaatattttagccaggtgtggtggtgcacgcctttaatcccagcacttgggaggcagaggcaggtggatttctgagttcgaagccagcctagcctggtctacaaagtgagttccaggacagccagagaaaccctgtctcgaaaaaacaaaacacaaccaacaaacaaacaaacaaaaaagaatattttacttagtttggtacacttgaaatactttttagagtgtaagtctattacctctgagatagtttacattttttgtatgtgaggcctttgaaatctagtgtgtattttctcctcagagcacatcatgatttggattggccatagtccaaatgatcataatgacacggtgattgtttaacagctagattctagggctttaaacttagcttgttaatgttagttgcttattgcttattggtgatctcttcctggaacagattttgttctaagttgtgtgtggtagagtcccaaaggttcctgtgccaaagcatccactgttgcccagttaggctcgttacttcagactgtccattttccctttctgtaggttttctaaactgatctgttcttactgagtttgatcttgcagggtggtataatagctataccttgatgtgttttgttagttcataaatcattaggatttgtatagcttttaacattttcatctttccaggactattttgagaagaattaaatcctaagaatgactttcacccttttcacttttttttccttactgctattttctactacagttcttagtattgactcaaacaatcttttttcatgattgtttttagatgctaatgagacttttttttttctgaaatgagggagaaagtaagggggcattgcctaagtaggactgataaggcactgttcagagttaagagtttaccataaatgactgcagatcttaaaacaatctatctagctttatacataatgaaatgtaaagcacatagcagttcagcgactccttcccacagtactacacaggactaagggttggagttgattactgggacatgaaatacaagagaacttctaagccctattaggcagatgtatatttcatacacttacatctttttaaagagtagtagtgagtagtaaaagcagagaatagcgaaagtattaaagatttcaaactttatagagtaattgttttctaaagattttttactatataatgttcagtaacgtgttcattaaatgtgtagaaataatagaagattcagtgataacatgctttgggattttaaaatagatactttgttcatggagatatattaagaatgttggacattgctgattaacggtagcttgcaatgttgtatggaaacaacctagagaatgtccaaagattattgatattagggctggtgctgtaggtagtggagaacttgcctaagcacgaagccctgagttcagtctgtagcacctccctgcatttgggagatggaggcaggaggaccaggagtttatggttgattacatggtgagtttgaggtcagcctgttttgcatgtgctcctgtaatcaatcaatcaatcaatcaaattattgctggtgctgatgtcttaacctgagcctgttacattggtgaaccttaatgtataaatttgaaagttattagctgggcatagtgaacgtggctttcccagccccctaggaagcagaggaaggtgaatttctgtgagtttgaggccagcctggtctacagggagagttccaccacagccagagctatagagtgagagtctgcctcaaaaccaaaaccaagaaataaactataaataaataaataaattggaaaaataaaattaaaaaatagaaaactattgaattcatggaataaaattaatctgggaatttaagataactaggtttaaaatattataaaaacacgtgtaacaaaattaatcatttttgccttttttccagtatttcagtggtattaaggaaattgacatggtggtacaattgacatcttctaccctttggtccctttgtttttatttttttccctcaaggtttgttttcttgttttctttctttctttctttctttctttctttctttctttctttctttctttctttctttccttccttccttcctctccctctccctctccctctccctcttccttccttccttccttttattagatatatttattttatttatatgagcacactgtagctattttcaggcacaccagaagagggcattggatcccattacagatggttgtgaactaccatgtggttgctgggaattgaactcaggacatctggaagaccaagcagccagtgctcttaacccctgagccatctatcgcctaacttttttgttttttaatgagtgttttaagcacctcatataagtgaaagtatatatttgttattttgtatctgacttatttcacttggcataccttcaagttttatccacattgtagcatgtgggaggttttctttttttttcctttaagactaaacaataactcattgttcatgtagtgtattgtgtacttgctcattgactggcatctgagtcacttctcattttgactgtttgttgtaaacactagtgtgctttccttaggtccctgtttgtcattcttgtggttacacactcagaagtcaaattgctgcattttatgataattttaatttaattatctgaaaaattgccatactgtttctcactgtggctacagtgtttgacattttcattggcaatattagagtttcagtttcactgcatccttaacaatgcttgttatttactggttgtttgttaagtaaccatttttgttggtgtgaagtggtatcttctgtttctgatgtgtagttccttaattactatggctattgagcatagtttcttattggctgcttatatattgtctctggaaaaatacccaactctgtcaaattttaattgttaggattagtatgttttgctttttgtgagtcagtactttgattttgtgacgtatacatgtgtgtttgtgtatgtgtagaattagtagattaatcttggagatcaaaaccagggttcatatgtgctagactactgctgtactactgggccgcatccctagctgtaagcttttgattttaaaataggtcatagcttggtgtggtggcgcatgccttgaatgccaacactagggaggcagaggtaggcagatctctctgagttgaagcccagtctggtttacataatgagttccaaggcagcaaggactacatagaccctgtttcaaaaataaaaacaattacaacaacaaaaccaagtcatagaaccctctttgggcctcaaattctctaccagcaaaatggaagattgttatttctatagcttcctaacacatgctgagaacagatcatttgctccatagcactccacacacaggcatgtgcatgcatttatggaggcacacatctgttatcctgtgatcttggtacttcggaagtcaaagcagaagatctcaactttgaggccagcctacaggacaagttcagtgctagtctgagctacatacattatgagaccttgctccaaagcaagtaagcaagcaagcaagcaagcaaacagaaaccttgttactagaagagctgactttcatgttttgcttttttgagatcactgtgtgccaggctgccttttattcctctgcttccttctccctaagtactgcaatgtctagccctaatggagctaactctttgaacttgagtatgtcttcttcatcatcatcatcttcttcttcttcttcctcctattttagaaaataatcttttagggggcctatgaggtaaaggcacttggccaccaagctcgatgacctgagtttgatccccagaatgcatgtggtagaaggaaaaactgacagacacctacaagttgtcctctcacttccacaagtatgccatggcatgttcatagaacatatacacatacatataaaacaaataaaactctgaaatatagctgaggatcgtttctgtgacatagttgttgaggatttacctctgattttggcctcattgataaatagtgtaaacatcttagaaaacaaacagtagtctttaaagtatctaacagtataagtccttggcttgtcattgtagttaaagacatttgtttactttcccctagtgctaattgtaggtgcctcatgggagtatactataaatgataacatttctctctgaaagaagccattctgagtttagtatgtaagtgctaacctacaggtctctgtactgtaatattcttgactagaatattgctttcaatataagaatcttaaaaatatgagtcctattttagatcacttctccctaatatcatacacaagcttggtttataaatcatattgtatggaagtatgaagagtatattggggtcatttgctagcagtatgggaaggacggttttccttgctgggactaagaaccgctcatacacagggtattgttaataggcagtaggaagtaggcacagtgctgcatgactttagaatattagctttgcatggggattccttggtagctagtttattactttatatcagaaagctagtgtttttttctaatttaaaagttaaatggggccgggagtggtggcgcacgcctttaatcccagcacttgagaggcagatgcaggcggatttctgagttcgaggccagcctggtctacaaagtgagttccaggacagccagggctatacagagaaaccctgtctcgaaaaaccaatcaatcaatcaatcaatcaatcaataaataaataacacacaactggggacccccaaaccaaaaaacaacaaaagttaaacagggacagagagatggctcaacagttaaaggtacttgccatcaagcctaatgattgagtttcgtcttagagactaatgtggaagaggagaacttacatctcctagttgtcctctgatccctataagcacatatacaccacacacaaataaaataagatttaattttaaagtttacattaaataaagtgtaatttaaaaagagaattaaggctgggcagtggtggcacatgcctttgatctcagcacttgggaggcagaggcaggcggatttctgagttcaaggccagcctggtctacagagtgagttccaagacagccagggctacacagagaaaccctgtctcgaaaaacaaaaagaaagagagagagagagagagggagagagagagagagagagagagtgttaaatggccaaatgctcattgcatataggttgttagggaatttgagaggttggccttcatgcttcctttttgttttgtattgagaagtgggacacgtgtcccacattaagaactgtttcacccttggtgacacgattagagcctctttagtttatgttgaagattcctgactttggctgtgtggacacacatgagcacatgtgctagtacacatgcactcacacacacagtcttactggaaagttaccaagtaaagggttttttgtttttgtttttgtttttgtttttcgagacagggtttctctgtgtagccctggctgtcctggaactcactttgtagaccaggctggcctcgaactcagaaatcctcctgcctctgcctcccaagtggtgggattaaaggcgtgcagccaccactgcctggccaccaagtacagtttttataaaggaaacggaggaggtgaggaatgagaaccaataatgaaaatttacacttatattaaatttagaattcttttccaggtatttataaattggcagggaattaaaggaattttgagttgattagggtgtg

SEQ ID NO: 2880 - DNA, 405 bp, Mus musculus
gccgacttgacaggaattaagtggaaaagatatgtatggcaaggcccaacttccgcccctattctgtttccggtgacagaagaagaccccattttgagcagttttagtcgatgccttaaggcagatgtacttggtgtttggcggcgagatcaaagacctggaagaagagaattgtggatattttggtggggtaaagatcccaattttgctgaccttattcaccatgacttatcagaagaggaagatggagtatgggagaatggcctttcctatgaatgccgtactttgcttttcaaagcagttcacaatctgttggagcgatgtttgatgaaccgaaactttgtacgaattggcaagtggtttgtgaagccatatgagaaagatgaaaaacctataaataaaagg

SEQ ID NO: 2881 - protein, 135 aa, Mus musculus
ADLTGIKWKRYVWQGPTSAPILFPVTEEDPILSSFSRCLKADVLGVWRRDQRPGRRELWIFWWGKDPNFADLIHHDLSEEEDGVWENGLSYECRTLLFKAVHNLLERCLMNRNFVRIGKWFVKPYEKDEKPINKR

SEQ ID NO: 2882 - DNA, 142754 bp, Homo sapiens
  misc_feature (1)...(142754): n = A, C, G or T/U
aactgttcatttgcagttcgcgccataaagatacagccaatactgaggcacagggagagggaaaatcctagcttcctcatggcccctcatttgccacccttgcctccattggccaaaccaaaccacaaggaaattgataagggagcctgagaaatgtcatttccaaggagcagcctctagctacagtaagcctggacaacatggtgagaccttgtctatacaaaaaatttaaaaaattaagtgggcatggtggtgcacgcctgtggtcccagctattcaggaggctgaggtaggaggattgcttgaacccaggaggtcgaggctgcagtgagccatgtttgcaccacggtactccagactgcactctagtgtgggtgacagaatgagaccctatctcaaaaaaaaaaaaggtcagtcatggtggctgacacctgtaatcccagcactttgaggggctggggcaggcagatcacttgaggtcaggagttgaagaccagcctaggcaacacggtgaaaccttgtctctactaaaaatacaaacattcaaaaattagccgggcacggtggtgggcacctgcaatcccagctacttgggaggctgaggcatgagaatcgcttgaacccaggaggcagaggttgcagtgagccaagatcacaccactgaactccagcctgggcgacagagcaggactctgtttcaaaaaaaaaaaaagaacagaggcaaattaacagcacagccaagaactcttttacatggaattcccagtagcattcttcaaaaccttgtcctcaaactccagtttgggaaacactagcctaaattgctcttttccacatctctgcaagttcaaatcttattcattaattcgtatctatttaaaatgcaaagtttttctccactaaccttttcttccttgtgacttggggtagccccctcttctttcaattccacaacatttgatctatatcaatttttcgcattttcaaataaaaattgtagttatttatttcatatcttatcatctgagaattaaaaatcttcttgagagtcagctctatttctgatgcattgtttcatattgctcaatcatcacagtacctagcatagaaccttgcacatagtaaacataaatattattaaatgaatgaatgaagtaatgtcaaaaccagtggtagaaatgttatataactctagtacttttgtttatgttactatttatttatttatttagagatggagtcttgctctgtcacccaggctgaagtactgtggtgcaatctcggctcactgcagcctccacctcccgggttccagcgattctcatgcctcagcctcccgagtagctgggattacaagtgtgcgacactacacctggttaattttttttttttttttttgcaattcaccacataagtgtattaaaaaacaaaccatatggttgtcccaatagatacagaaaaggcatttgaaaaagttcaccttcgggccatgataaatatagtcagcaaactaggaatagaagggaacttcctcaaattgatgagggccatctacaaagaacctatagataacaccattcataatggtgaaaaactgaatactttcccactaagattggaaacaaggtaaaggtgtccactgctaccatttcttttttttttttagtatttatttatcattcttgggtgtttctcggagagggggatttggcagggtcataggacaatagtggagggaaggtcagcagataaacaagtgaacaagggtctctggttttcctaggcagaggaccctgcggccttccgcagtgtttgtgtccctgggtacttgagattagggagtggtgatgactcttaacgagcatgctgccttcaagcatctgtttaacaaagcacatcttgcaccgcccttaatccgtttaaccctgagtggacacagcacatgtttcagagagcacggggttgggggtaaggttatagattaacagcatcccaaggcagaagaatttttcttagtacagaacaaaatggagtctcctacgtctacttccctctacacagacacagcaacaatctgatttctctatcttttccccacatttcccccttttctatttgacaaaaccgccatcatcatcatggcccgttctcaatgagctgttgggtacacctcccagacggggtggctgccgggcagaggggctccttacttcccagacggggcggccgggcagaggcgccccccacctcccggacggggcggcggccgggcgggggctggcccccacctccctcccggacggtaattttttgtatttttagtagagacggggtttcagcatgttgcccaggctggtctcgaactcctgagctcaggcaatccacctgcctcggcctttcaaactgctaggattataggcgtgagccactgtgcccagcctgtttatattactattacatccctttaaactcttggttgagtcaagagattctagaataatctttctattttattggctggtcacatcttttgaactcctttgaaccttttcttggggggagagaacagtaaaattacaaatcagtttgtatctgggcaggaataattatcctgtgagaccaaagttctgcctggaactttttagcaggaggagcacgttcaaagaactacacttgtctcctctttcagctttggtcactcttagaaaaatcatctgctcagtaagaaaagcatactcagcctttgcaaaagtgatttcttctacttccatatcttccttgtcgatgccttgactgagggaatagatgcaaaacagaaaggatgtttttagaccagctcttcttaattagctcaggtctcttcacttcctgcctagattaccaaaatgtcctcaacaagtttcctggtatcttgtttctaaaaacaaatcttagctcatcactctcatgtttaaagtctttcaatggtttccaacctaggcaatataccgagacttcatctctactaaaaatttttaaattggccaggcatggtggctcatgcctataatcccaacactgggaggccaaggcgggtggatcacctgaggtcgggagttcgagactagcctggccaaaacagtgaaacccgtctctactaaaaatgcaaaaattagccaggcgtggtggcgggcgcctgtaatcccagctacttgggaggctgagacaagagaaacgcttgaacccgagaggtggaggttgcagtaggccgagactccatctcaaaaaaaaaaaagttaaaaaattaagctcaggagttcgagaccagcctgggcaacacagtgagaccccatctcattttattttaaattattttttaaaagaagaaaagaaaaaaaattttaattagctgggcatcgtggcactcgcttgtaatcccagctactcaggagactgaggtggtaggattgcttgagccccggagactgaggctgcagtgagctatgatcgcaccagcctgggcgacagagaccttgtcttaaaaaaaaaaaagttgtttttctcttccggataaaatccaaattcttcatgatttgttcctggggttacttcaccagccaaatcatttcctaccaacaccaagctgttcaggcctccccatcttccttctgtgcctgtccttcttctccctttcaatcttttccttgctcaacccaactcatccttcaagacttggtttcaactgttttccctaagaagtttctttagagcttctcttggtagatgaggcttccttagcatactttacagacctcttcggcctgaggccaaagaggcagggtgctatctaaacctcagtatctcaagctagaaaattgggataatatggtacttacatcagaaactgtggcaaagatacttgacaccgtgtctgatatatattgtcacatattaggtgttaaatcacagcaattacttaagccaatctcttcctcatgtttgagaaaatagatccagagaggtcaaatgactggctcaagtaggagaaagataggggaggggaatttctgatttgcatatggtttacaaacgtaatttcaaagtaagaaaattaggggaagtagactttaatattaaaatgaaacaattaaaatgaaataaaacttgaggttgagggtggatgctacactactgagaaaaatggcaagtcagcaacttttgagacaactcaggatattcgatgctttgaattaaaatgtttttttaagtgtctcaacctgctgatttgttttaggtctgtttatttctatattcaatgaagtggtgtctgtgcattcaagaaataaaatggtttgtaacttcttaacctttttttctattgaattaagtacaacattaaaccattaaaatgaccttaagaaaatcaatattgtccccaggctcaagaccactcactccacagcttaattggtccttagctttcagcgtttgactctagacttgtactctccaacacagtagtcactagttgcaaatggctaatggccacttgaaatctgctaggtaaaactgaaatgtgctataagtgcaaataagtgtggattttgaaggtttggttaaaaaaaggaatgcaaactatctcaacaatttttatattgactacatgtaaaatgataatgattctgacatactgagataaataaaatatgtacttcacattaatttttacctttttttttttttttgagacaaagtcttacttcgttgcccaggttgaagtgcagtggcatgatctcggctcactgcaacctccgcctcccaggttcaagcgattctcctgcctcagcctcctaagtagctagctgggactacaggcatgcaccaccacacccagctaatttttgtattttcagtagagacggggcttcgccatgttggccaggctggtcttgaactcctgaccccgtgatctgcccacctcggcctcccaaagtgctgggattacaggcataagccactgcgccaggccctaatttttacttctttaacagggctactgaaaaatttcaagttacttatttagctctcattgtaccttttttaaaaatttatttttctatttcaataggttttagctctcattgcatttctattggacagtgctgctctagaccttgcagatttttcagaatcatctgattctgaatcacaatatggagcatcaggggccctttcctggacttgtctgtctcaggtgatgtaactctgtcaccttcctggaggctaagtggtagtttgtaagccagtgcctctaccatctcattcagaatggagaccctacaagacagaaggggttacaaaacagttttaaatgcagatcattgagtgaatccatatttcaaagaacagaagacagtcggtgattattgacccagattattgacccaaagtaacctctaaaattaaccttaaaattcctgattggctcctattttacttggattatctcttttaatcattgcaacaactctgacatttaggtgctattattacatacacattctacaaaggggtaaattgaagttagggagctagcaagcatggagttctgcttgtttgcttgctttttgagacagggtctcactctgtcacccaggctggagtgcagtggtgcaatcttaacttcccaggcttaatcaacctccccacctctacctcccaagtagctaggactacaggcacgtgtcaccacgcccggctaatttttttattttttttgcagcggggggtttcgtcatgctgcccaggttggtctcaaactcctgggttcaagcaatctgcccacctcagcctcccaaagtgctgggattacaggcatgagccaccgtgctgggccaagtatggagttttgaccccagttggtctaactgttcaagtgccattataagcaagattatgagctgcttgtatatgctgtattttgtcaatacatgacctgacacatactagatggttaatacatgtgggtagttaagtggtcatatagtatgatctcaaccatgtaggaaaaagatacatagggaaaagtcaatacatcaaaatgttaaaaagtgattaattatgaatggtaatgatacggacttttttgggtaatgtacatttaaaattttcatctttacgcttttatgtatctgccaaacttttgacaatgtgtgtgtaatgtttttatttatttattttgagatagagtctcaccctgtcacccaggctggagtgcagtggcgtgatcttggctcactgcaacctctgcctcccgggttcaagcaattctcctgtctcagcctcccaagtagctgggactataggcatgtgccaccacgcctggctaatttttgtatttttagtagagatggggtttcaccatgttggccaggctggttttgaactcctgacctcaggtgatccacctgcctcggcttcccaaagtgctgggattacaagcgtgacacagcacacctggccgacaatatgtgtgtaatgtttttagttatttccattactttttaaaaatcccatataactcctgcccccacacatacacagcctccctcattatcaacatcccccaccaggatggtatacccaaagtccgtatttccattactctctttttcttttttttgagaacggagtctcactctgtcgcccaggctggtgtgcagtggcgcgatctcagctcactgcaagctccgcctcccgggttcacgccattctcctgcctcagcctcccgagtagctgagactacaggcgcccgcctttttgtgtttttagtagagacagggtttcaccgtgttagccaggatggtcttgatctcctggcctcatgatctgcccgcctcggcctcccaaagtgctgggattacaggcgtgagccactgcacccggcctccattactctttaaatcacacaaaatgtcatttttaccgaatgtaagtggttactgatacgttctttgtgggctgaaaatatttatttcttctctttcccttctcccaatgattccattcccctcacaactgggatcccccccattctaatctgcttctccattctctcagtcctgtctttctctctctctcctgctcccttctgcgatcctccatcagactttttcttctgggtcttcctcccttcttcgcttctgtctccttgtctccctcttctttttgaaaagattgacattcaaacagaaaggtcaatcaaatgttacctcctactggtaggtttcaggtatattctacctgccattggaatcctgaggatggtgctcaagtcagggggtgggggcaatgggagggcaagacttctaaggagaatggagacccctttagatgtgaggagggcatttcagcctgaggaaagcagcggaacaaagatctgaggagtttttcagggaacgggaaatgggcagaggagcgcttacctcattggatctggggattgctgtctcctggtgctggcactcggttataaaggatgccaaccttagttgatttgagctcctggattgaattagtcctggttgcataattgactttgatatgtggactttgggttcgaattaggtttaataagatttaactgcttcaaagggctttataagaattcattttatccttcaaatctgatttcaaatgctacctactttatgacaacttctctaagtttgatgctcttcttctagtgcacttactatgccatagtaggtacatactttattcaagcaattacccccattgtattttaccttattctgtaggaaatgtttcctttagtgcctctcttcaggaatcttgagggacaggcaggtatcttattcctatttgtatcctaggcctagcacagagcaggaacacactcaattgagccagcaggttctcaatgatttttaaaattacattaataattaacattaagtaagcactgtggcaagcactgtatctacattgtttcattcaccagtcattttagaagaaaagtacttttattacccccattttacaataaccgagagaaagcaaaattaatttgatctaaggtcaaatatgatctaagactaactagtgaggggcagaactttttctccaggctttgggcttcagatctgggctcttcaccaccacagatgaacaagtggataaatgaggacttcttttcattccgtggctgaagaagtgacatggaagagtctaccattcattttacagatacaattatgtatctgtaatacataatacataattatgtatctgtaatacataaaattacagtaagtcctaactcactgatgtttctaacttctgaatcatctttttcttcttctttctttcttgcaatcctaaaaccgtcagagaaactgttttgaactcatattgaagtgtaacccatccaagcactgggtgttttatgggaaagagaataaaccttttgtttggttcttacttcttaccacccattcatttgtaactatacaaatatcaagcacctactgtgtgctaggaacctttttttaggcactagagagacagaagtaaacaacaaaaaaatagtgagacctttacatacactagttctcctgctcgtcacaataactatatgaggtaatgatgacaacaataatagttaactcttaacagtgcttatctgtgcggggcactgggctacctgcttaatttgtattaactcattacaataagcttgtggggtaagggatatgttttccccattttacagatgagtaaagacacagagcaggaagtgatttgctcaagcttggaacccaggcagtgtggctctaattcccagtctattaactacagggcaatattttgtttcttaaatttatatcttcatatcacaacttttaggttgaggagtcttatccccatccagatcatctgactcccaaatccagaggtttgcacctgcaccccagcggcctcgcgaaataaatgagaatgtcttggaatttttgccaatactttctcttccaaagaactcaaactgatttccacgtaattctcactgatttgtgaaatgaaccttcctggactgtaaatttccccgcaaagagagggccagggccccgggtcgttttatactggccggggcacccagcagatggcgctatgttagtggccaccagctggctgccccgtcccccgagctcaccgcctccgccgaaagcttcccggccctccctcgctcacttctctctccccctcccaaccgagcccgggcccacgtgacctcaaggcggccaatgggtgagcagagagggcgagctggtccctgtggccgccattaaagcgaagggaaaacccgtgaattcggattaaagggggaaaaacaccgcccgctgggcccacaaaatgggggagactacggcgtccagccggtgaggccacaggagggcaaactttaggccggcttggcccaggaacgacacgaagacagagccagagaatggtctgagcccgcagacgccgccaccacctccgccgctgaggagactctgggcttaaggacatcgccgctgccgcgccgggggcctgggcttctctcccggttctcgcccttcccgctcctgtgcgggcgcctctccgcccgggagaaccgtcctgggcttgggctctgccgtctcggacttgattttgattatttattgtgtaatttattatttttcttgtggtaggggcacacatcccctccgtcccccagagagggacgagcgtctgcgggatccgcagtccggcccgccaggcgagcgcggcgcggccctcccgcctccggccctcggccccgggcggctgggtgccggccgggcggcgggggctgctcgcggcggcggcggcggcggcggcggcgggggggtgggtggggagggcgggcgcccggcggcctcctcttccaccgcccccccaaccactaccccccccccggccctccccggtgtctgtgtttctctctctggtcggaggcggcggtaatggcggatggtgggttgtggcgccggcggcggctgctgtgagggacgatgagtgcctccttcgtgccgaacggggccagcctggaagattgtcactgtaacctcttctgcctggtgagtgccggggccggcgggcgccgagggaggggggccgcgaggtgcgcccttgggccgtgggggagggggccgggtctggtccagatgcccgagttcccgggcgaggcccagccggagccggcgccctgcgaagctccgcggccagccccgggaggcggcgttcgctctcctacggtcccgggctctgtttaggggagtgttggcattttttctcgtcttgtttcggactctccttctcaccgtagtctcgtcctcaacttgagctccttatctggcaggacagtaacctttccctcttgtcttgcttaactgttgcttttctccttattggccctgtatccctgcttcacactttacattattgcccctgctccccaccgcctttatgtcttacccttttaatttggtttccccatgtaaacaggaccccagaacttaagccctagaaacctgtcttggttttacattttttttgtatgagtcaaactaacgccaggttagtttctttcttgggtgacttaagatctctctgtaaaagccagtaggtgccatttcatatgttttctttttaaactttgaaaacagtttgccatttttgacaatttctagccatcttgcttttattagaacatgatgtttttgtgagagtgaagggggctagtggacgaggtgctgtggttttgcactgtttctatatttattgtgttttggttgctttttcagaatgttttgagcaggctgctcccttgtttgattgaaatggaaagtcgagagaagcgggatgtagggatgatcattgtgtaggttagcccaggtctggtaacatccaacagttaaggctttcagaagtaccaactgttgcaaataacttgtcctgtatgggacagtagctgagcttcatcaatgactttaagtttgggtgactttactttttcattttctcctttgtgctatgagaaatattaagagtatatgataggtaagtgagttaagtgggaggagcacaactagttggcaagtgtaaactgccagtcatgtatcagcagtttcatttttggcaccttatgctttgctcctttaagttagattaaattactgaattcctcttgtcgaatttcttaacgcccatgctaaattgagatctttaatactctatcctcgtctacagtatgtttttcttttcaatgtccattaatcagcatctcttcacatgtaataagacatacaccaggttttatatttctatcttatccaactcagtctatttttggtacttttaggatcagttctttgaagatagactagcacaaatctgacagttctttgtgagtagctatttgacttttccgacaggggtgtgtgtgaagaattaacatagattttttcagaacttgttcagatgtcttttcattagagacgttacttctgtaaatgtggaataaaaacccatgatagggtctttaataattgattttcagttaaaagtttgacaccagtgaacaaatgtgaccagttaggacagagaaaaatgtactctgtttgcatattgaagtgtgtgtctatatttaacatcattcagtttcttctgtttctacttggagtacatatttgcttgctattcagtgacatggtggtggtaatttttaactgtattcttctccctaaaattcttggttgttgaattataaagtctttttttgttctaatttgcagtcaatatctcaagcatacattgaaaaattgtaatgtcttaatgaaataagagacatcatattgagtacttttgactttgagtgaatatgcagtaataaaacttaatgctttctttccttcaggctgacttgacaggaattaagtggaaaaaatatgtatggcaaggcccaacttctgcccctattctgtttcctgtgacagaagaagaccccattttgagcagttttagtcgctgccttaaggcagatgtacttggtgtttggcggcgagatcaaagacctggaagaagagaattgtggatattttggtggggtgaagaccccagttttgctgaccttattcaccatgacttatcaggtgaaagaaactttccatttctaactaatgatatagcaacattgtatacttctcccagaatgtcatatgtattacaaattaagtttgtttttgtgggagacttaggaggccagataaaaattcagcttcattgttttatttcaccatgattattttattttacttaaattatccatgttgttatagctgggtttttaaggcgtgaatgactttctccttccaccacctctcttcttaatttctcacaggtagttagggcccgaagaaggcatgttacattaatctaaaaaaatggaatcaggaaacagagttcctaacaaagtcgtgtaatagtttagaagccagatgtaacttttgagtcacttcagccactgctgaagttgagtcttttgcattgaataggcagatgattctaaaagtactggaaatgtaactatccgtgtgtgtgtgtgtgtgtgtgtggtgtgtgtgtgtgtgtgtgtgttttaaggcatgtattttgttattgtcatttgtgctatttgattaacttatgaaggcatatgttaatttagttatttttggaaagtgactcatatactgttctgtcaaacataataagagaaaagtgccaacttgtttagcttttatgggacatgggatcataatctaaaaggttacacaaacaattttattgtgagcaaatcaatgtgattacttccttattttcttgacttttaggaccaaatgctactttagaaagagaaactatagcttttcatataattactgaagctttaaattgtgaaagtcagtattaactgaatcttagataataggaatataaatgattggttgtatgctataaggttccaaagacttcagtaagatagtttgataatgatttttgacagataaacttaggatttctagataattttttttaagttcttatttgaaattgagtactctgaagtttttgttattgtatctctgacctataggatctattttatttttggatagaatgtattctaggtgtctgtatcttgaactggtacttagtaagaccaacatttatgtaggaatgtacgtgttacatttgtatgttttgataattgcttttcacattctaatgaacatactctccagtgttaattgttatttttgagagtgactgcaattcttcaagaaagctttccagcttttgtagtttttctaataagatgcctgctgcagagtccagtccttagttgtgtgtatttaatgtagttctaaatgtgtaaagtgatgtgtatatgtatatacatatatgtacatatacatgatgtatgtatatatggtagttttagcgagacaatactttctaattatgccaaaagctaagtccgccagcctcctttttctttcattgttttggatatagtatttgagttattttaatcgttaagtggtcataaaaatcaccttactagaatgtttggagactgtataacattgttgaaaaactataaactattgataaaatatatttgttgataaaacataattattgataaaactataatggtgacttaggggctttggtcttcttaataaagttggcagagcatctaaacagactaaacagatctttttttaagattccatgaaatacactttgtagaatcaaagataattttaagagatacataatgtttaattttttttttctttttttctttttaagtagagatggggtcttgctgtgttgaccaggctggtcttgaactcctgaactctagtgatccttccatcttaacctcccaaagtgctgggattacaagtgtgagcccctgcacctggcctagttttaccgtaatagaaaaaatattgtgaaagttaaaagactattaaagttagatgtgagctgctttgatggatattgttaaaagtcagttttgtcttctaggtttcatgttaccagtcagatatgttttctccactgaaactaggttacagtcttaaacatttttctctagctttgatttttagcgtaattttcaaaaatggtagttacttgtacctttaaaatagtgatcagctgggtgccatggctcactcacgcctgtaatcccagcacttttgggaggctgaggcaggcagatcgcagggtcaggagatagagaccatcctggccaacatggtgaaaccccatctctactgaagacacaaaaattagctgggcatggtggcacgcacctgtagttccagctactcagtaggctgaggcaggagaattgcttgatcccaggaggcggaggttgcagtgagccgagatcttgccactgcactccagcctgggcgacagagtgagactctgtctcaaaaaaaaaaatagatagtgatcttgaacgtgaatgaaaataattttgggaggttggttttttttttttttttgagacggagtctcattctgtcccgcgggctggagtgcagtggcgtgatctcgctctctgagtgcagtggagcttgcttgctgcaagctctgcctcctgggttcatgccatactcctactacctcagcctcctgagtacctgggactacaggcgcccaccaccacgcccggctaattttttgtatttttaatagagacggggtttcactgttagacaggatggtctcgatctcctgagcttgtgatccgccagccttggcctcccaaactgctgggattacaggcaggaggtagggttttaactgctgtcagactttactgaatgctaatgaatggtaaatagctttttttttgagatggagtcttgctttgtcgcccaggctggagtgcagtggcgcaatctcagctcactgcaacctccacctcctgggttcaagcgattctcctgtctcagcctcccgagtagctgggattacaggcacatgctgccacactcggctaattttttgtatttttagtagagatggggtttcaccgtgttcgccaggctggtctcgaactcctgagcgcagacagtccacccgcctcggcctcccaaagtgctaggattacaggcgtgagtcactgcacctggccgtaaataacttaaaaatttatcaaagtgaagtgattgaaataataaactgaaatacaattaggagtggtatatgatcatatttattgttccaaagcttgtcctgtactgttttagtttgcatagtcagtgttatttatataatattttagcttttcttaaaaataaaacctgttatttacttaagaatgttgttacttaaatcagacgtatcttaaagcataataaggttttttcagatggaatatatttgtcttgcccttttctttgctctagggacagcgtctacctccctcttggggtaattagtctgcctctgtctctctagctaacccctttttcatttcttccatctgtggcactctatttccttcttctaagctcccctgagaagagagcagctggacagtacagggtagcatcagctgctggaggcagtcctgagttccaagtggaggtgtagcactgaggaatggggtaccggaaggacccaggtggtaactaaaaagctggttaatttagcttgagcctgctcttcacaggcagtgtccttctgtttggttcagcacacaccacatcttgttactgaagtgttttttattatggtgataatattgcccttgtttttcttggtagtgagggaagagggaaagcatttcttttttcaaagattagaattctcagtttttcttaactggaatattcagtaacagaaatacagaattgcctttgtttaacccccttagctcctttgtgtcatgcagtgtatttttaaaaattaactaatgaaccaatattgatactttattattaactaaagtatatatttggatttcctttatttttttgcctaatatgtttttcttttctaggatctcatttaagatacccctattacatttaattgtcatgtctccttaggctttgttagactgtgacagtttctcagactttctttggttttgatgatttcgacagttctgaagaatctgttcagattccatagtgcattttaaatttcattttctcttatgtcacttagcatttgtttgggttaccttcctttcaagtttagctgatgtgtagaaatagaatgtaaacttattttattgctaactggcaaagatcagttacagcaaatcacgtctgatttaatacatactttaaaccctcagttactcattttgtagcagtaagtcaataccgttgagcaaagtaatttgcaaaggctggatgatttttggatcaggatttgtgctaactagtattagccaaactataacattccagaaggttatttgttcaaaaaatctcttgaattccaaagccaaacatagatgattttcttactttttgctttatcctctataggataatgattagttgaatcggggtcgatatgttttgatacaaaaaggattagggaataaaactcctttggggttacagcttttttctttctttctttcttttttttttttttttttttttgagatgaagtctcgctctgtctcccaggctggagtgtagtggggcgatcttggctcactgcgacctccgcctcccaggttcaagcgatccttctgcctcagcctcccgagtagttgggactacaggcatgtgtcatcacgcctggctaatttttgtatttttggtagagattttaataggagtttcgccatgttggccaggctggtctggaactcctggcctcaggtgatctgcccgcctcagcctccccaagtgctgggattacaggcatgagccaccatgcctggccccttttttttaaaaattgtattttgtagctttgtttagtggttgtgtgatagtgggtgaaagaggtataaaatgggtgatgggaaaatcttagctcagtccctctggtcaagaatctctgtggtgggtaggactggtacttttaagtgtactgttaatttgcttcagagcaagattgtatcattttcattaatgtgttcttgaaggagagttttctgtgtatttttattctgtgttctaacatttttggaattcaattgctgtcatcattggcttttattctttccctttaaataaaaataaaagcaaacactgcgtcctctcccatttgtcatcttaaaaaaatcatagcaagttagactgtgatgagactctttgagaaaactgataccttgtgaactaaaaaaactcagggctaaaaatatttgttctttttcctggctcctgaggtctgtaaagtagattttagtaacatgttcagatagttttattataccagaattttatcataatgaatagtgctcaaactaagtggactattgttctgaatttaattttggatgttttaattgaaggatattaactgtagtggactttaaccttaaatgacagctgttaataggattgacagatagataaacagccaggcataggaatctagtcccagccaaactaaaacattgttgtgtgccccacatagtctaaagagagtaatttatttctactattgtaaaatttacttgtgatgtggcccgactctttaaattggctagtctcctaggtgacaacttcatttgctgtatttcttctgcatactgtttttttgatcaagtgtatcttctaagttttcaagccaaacataacatactaggctgtttttaaatcagttttcaagttttgccatagataatgatgcggccaacttaaggctctcggtatatttgttgaatgtataggttattaatgattattcaggagaaacactgatctagcatttaaacatttctctttatttcaggaaatacatggtattttctaccatgttaatttttgagccattattcattagcatatgttacattttaatagttttgcaaaattgtattggagaagattcattttttaccaccgtggagatatttaaagatgccatttttttgagaaaaatgttgagtgcagggtgtgtctgcttttttggttgtgattttttttccccattgatagagaattattttgatgacttatcacatactttggcactactgtaatctgcatcttcaggaaaaaaatatggtaatcaaatttagcatttgtgttttcttccaataaatagtccataaaaatttcaagaaacactgatgattaagaactgtaatgctaatagtaacagaaaagtactaagaatgcagagttgaactttattttctctggacatagagctacaagagaaggaatttttttttcttttttttgtagggatggaggtcacactttgtctcactcagcctgcagtgcttaatcatagctcactgcagcctccgactcctggactcaagcaatcctcccacctcagcttccccagcagctgggcctacaggcattgccactatgccctactaactaaaaaaagttttttggagtcagggtcttcctgtattgccaggctagtcttgaactcctagcttcaagtgatccttctgtcttagcttcccaagtagctgggattacaggcatgagtcattgcacctggctagaggaggaaaatagttatatagattaagcagactttttctattaggctctggttaagttcaaaagagataggtaaagatttgccatatgttcccttctccttcccctccctattataatgctggtgttgagattcaagaacttgtttcaattagtgtaaatagtgcatatcactatgccttgagtgggttggttgtaccatttcacttttcgtatctgaatacaacgtgtagaaagtacttttattacagttattagattgtcaggatattagaaacttggctcagtaggcttcttgtttctaagtgattcccaacaaaaccaaaaaccttcagactttattgagcgttattaggacttactctcgtttttctcagcaacaaaatatgaaattatattactttagtgtaatggttgcttagttgcttgccatatagatgaggacatacttcagagatacgttggatttagaaaacctcaacaggtggtctctacttgtttgttttatgcatagctcctatttagtgttaatgagaattgtgggcactggggacataagatgcccaccccctctgaaagcattagaataatgagggagaaatgcttcaagattaatactgattacttttctaaaccacattcaatattctttttttttttgagatggagtcttgctctgtcaccaggctggagtgcagtggcgtgatctcggtttactgcagcctctgccacccagttcaagtgattctcctgcctcagcctcccggatagctgggactacaggtgcatgccatctcgcccagctaagttttgtatttttagtagagatggggtttcactatgttggccaggctggtcttgaactcctgacctcagatgatccacctgcctcgacctcccaaagtgctgggattataggcatgagccaccgcacatggcctcacattaaatattcttaaatcatttgactgcaagtttaactaaaatagattttacaaaataaaaccataaaattttcagaatttcatgtgaaaatttataaattgtgctttagcttttactattgcaaaggtttttttttttgtttttttgagtcagagtctcgctatgtcgcccacagtggagtgcagtggtgtgatctcagctcactgcaactcccatctcttgggctcaggtgattctcatgcctcagcctcctgagtagctgggactacagccgtgccatgcatggctaatttttatatttttagtagaaatggggttttgccatgttggccaggctggtctcgaactcctggcctcaagtggtccacttgccttggcctcctgaagtgctgggattacaggcatgagccaccacacctggcctcagcctcccggatagcaggcgtgagccaccacacctggcttcagcctcccagaaagcagatttttttatttactatttttgcgaaggagacaaagtcattttctagttttaaatgactaatttatttgaagtttataacaactgtacaaccttgatacttacaaatggtaactgtgtcttgggtctttgatgctttaaaacttaggagaaatatgttggtagtggtttcttatgtagaacaagtgttacaaccatcagaaggtagggatttttgaaataaaaggtaataaaaataaaagatactaaattgattgtaaagaggtgaagaattggaagatattcctaacataattctgttggaattaagaacatgtatattctagtagtcataagtctcataatttgaggtaaaagtcttaatgtagctatttaattttgaaatggtaggacctcattaaattgaaagcagatcaattgagattcttttctctttttttgtcatcaactcacaaatatgcttgtgatctagacctttaattaattaaagtgaagtcactttgtgctgcttctctattctcctagcctaatactttctttaatgaagtgaaacccataaacgttttggttttaaatggaagtagataacggtgtctttgatataatagaatgtgaatttttcctatttaatatttatgattaatattagacttaaaaaattattctataccaattctgaaatattgtcattttctcaagcttattctacttttttttccctaagcttacctttttttttgtttgtttgtttttttggagactgaatctcactctgtcccaggctggagtgcagtggcacgatcttggctcactgtaatctctccctcttgggtgattctcccacctcagcctcccgagtagctgggattacagggctgcactatgacgcctggctaatttttgtatttttagtagagatgggctttcatcatgttggcgaggctggtcttgaactcctgacctcaggtgatccgcccacctcagcctcccaaagtgctaggattacaggcgtgagtaactgcgcccagcctaaagcttatttaaaataaaatttaaaaaaaaattagttgctttgaaagacttgactatcatttaggagaaaatataaaaccaacattaatctttgtagtggcacagaatttctagtgcagttaaagtccactatcatactttttagttaatgtttattctacccatttgttgtataaattgtgcatataaaccatgtgtaactcttaatacatgtctttgcttttattcagaagctcatattgtgtctgtttttctgtgggtatagtgtatgcatttttggtgttgaattgagaaacgtttgtcttttatttttacttaaacattgaacacagatgacccatatttacaaaatgtttataaaggtatataggctatagaaggagagttaattatatttagactaagcaatttaaaatcttgtaatgaaagttagagtgctgaagtggtatcattatttgtagcacgatttgttggatgctttgtgacagatatgaaatggatagagtacacaaaaaaatttttctgacctacatccagacttatctcaaaatgactgtgttaatgtttttttggtaaattaacttggagtgattaatagatttgttggcaaaattgaagctatatagttagtgaagatagctataattttatttgacagaagtgccatttacaatttaagtctttaaatttttaaatttctcccccaagtaaagggtcctgtactgaataataatcatgggaataatttgtttgaaatgagacctaaggtggctgatagtgcaccgcttgttaggctctgtgccaacagcttcctttttattcatcacttagtgttgtagtggagtcgtggattagaatgctgatggacatgaaatgttttgactttaattattaactggctagtttttttggcaggttgaatgactaggggaattaggacaaagtaacaagtgagccagcttagaaattggcatcataggtgtagagtgtgtttaatattttccaggttatacaaacaagtgtccttttcattaatacaggaaccaattcagtatgttcatgatgtcattgaattttataaggtggaaaaatacttttcaggtaatttaatagaatatgtggcacttagaccttttattccttgtggagtaactttgaaacctgataatgtctagagatacattgaagtgattgtagcttaatattctggggtaagctagtgttgatgaatatagagtttaaactgtaaccttttttacttggctctgaatagattatagtgtcactattttattatttccttcatttctcttttagaagaagaagatggagtgtgggagaatggactttcctatgaatgccgtactctgcttttcaaagcagttcacaatctattggaacggtgtttaatgaacaggaattttgtacgtattggcaagtggtttgtaaagccttatgaaaaagatgaaaaacctataaataaaaggtaagctatcttaaattctgacgtgatatttctttagatttgttcctttttgtgtcttaacagagaatgtgggataaaacaagctaatatacagacatattccagaggttgtcagtgacagagtactagatacagtcaggttttttttttttttaaaccactttacaaacttccctttatacactttaagcattttcttactgtaggaataggctgtattttaatacagtggcctaaattttgatttgtgatgatagacttaatgtgggatgaaagcagagacttaggcttggaagtatcttttttttagtatttgtggaaatatatgcacagcactctgatattaaaattaagtaacaacacctgttaaggatagtgatctgtgagtatgttttggatcaagttaacccttcttattcccaatctctcaattccctttaattaaagtaatttaaatttgtgttttctatataagaccatttactctttgagagcttataattttcttgagcaatgaattaagcaaatttatgacactacttattagactagttgcagatagaggcacagaagacttatgatagatacctccttctcctatgcaattaaaaccttcaggttactcgcttctccgtgatttagataatataaggcatagtctctcaaaagatttaagttcccagcagtcattgagttagtgagacttcaagagagatgaaccagtggcaagtaagttgggatgtggggaagagaaaactaaagggaacttactaatttttcctgaaagatgtgagaggatgtgaagtgaacatttggttgagattgtaatcattttgaggtctttgatgtcatatatgcacatcttttttcatgtgcacctggagtttttgtttgtttgttttttcaaactttttagttttagtaagactggatgagtagataagcctggataaataaaggtgctttcattttttttcctctttgaaaattaacgtaaacctttattgttaacaaaatacttgtgtaagttcagaatgcattcagctggaaatgacagaacaacattaactacttggcttatgtagggattgatttttctcagtagcaagcagtatggaggtcgatagtttagtactggtatagctgttcaataatgtcatcaaggattcaaagttccccagagttttctctgtgccatctttacatcttcatggtcctcccgtgtgttgcacctccagacctcacagtggattccaggcaggaagagaaaggaagggaggaagtaaggaaggtgtggcacctgagtcagaaagtaaattattttctggaaactttagttgacatatctttggccatactaagagaaacaaatatcttttatttggaaacagctgctctgaacaaatgaagtttttgttagtaagaagaaagggctgatagatattagatagataccaaagatcaaagaagtggaaatggatattgggtaggcagttaacaatatctgccatatacatttatttatttattttgagacaaagtctcactctgttgcccaggctggagtgcagtggtgcaatctcagctcactgcaacctctgcttcccaggttcaagtgattctcctgcctcagtctcccaagtagctgggattataggcgtgtgccaccacacctggctaattttgtgtatttttagtagaaacggggttttgccatgttgcccaggcttgtcttgaactcctgagctcaggcaatccacccgcctcggcctcctaaagtgctgggattacaggcgtgagccactgctcccagccaggcatatagatttatgtagttttaagaagtcaaacagattaccaagatttaaaatgaaaggctgcaatcctgagccccaatgaatagatttgctcctcagaagcagccctttttaattcttctgtttcttttaagttacctgtttaaaaattttgaaagacataacatgcttattcttgagttatcatttaggattaatctagtggactttttttttttttggtcacaacagcctaccattgaaattctattgactttctattgagaggttagctatcttacttcccccgactcaacacttggatattggcacttttgcacacacttcttttccctctccttttccttttttttttttttctgatacggagtttcactcttgttgcccaggctggagcgcaatggtatgatctcggctcactgcaacctctgcctcccaggttcaagtgattctcctgcctcagcctcctgagtagctgggattacaggcgtctgccatcatacccagctaatttttgtgtttttagtagagacaggtttcgccatgttggctaggctggtcttgaactcttgacctcaagtgatccactcaccttgacctcccaaagtgctgggattacaggcatgagccgctgcacctggcttcctctccctttccttatcttgccaatatagttataagttttggtaaaaacaatatttgtttatactcttataattttataaatattatttgtaactgagccatagtatattgaaacacatttcatttcattctttttttttttttggagacagagcctcactctgtcacccaggctggagtgcagtggcgcgatctcagctcactgcaagctctgcctccctggttcacgccattctcctgcctcagcctcccgagtagctgggactacaggtgcccgccaccacgcccagctaattttttgtatttttagtagagatggggtttcaccatgtagccaggatggtctcgatctcctgaccttgtgatccgcccacctcggcctccccaagtgctgggattacaggcgtgagccacggcgcccagccttcacatttcatttcttgtacatcgttttgttttcccaggtgttaatgattatccctttttttcacttaattattaatgttatgagttagtaaacacctgcctgtactctgccactttttttgtaaataaagttttgttgtaacacagccatgctcattcattgatagattgttttatgcctgctttcacactagagcagagttaaatagttatgatagagacagatggcttgcaaagctgaaaatacttagcctgaaatattttctagctgactttttgtagtttgctgactcctgatctgtgtacttgttggtagttcatcagtagactatctattagaagtataaatcacttctccctaccttcaaggactttgtataatcttatgagtttccctttttttctcctcttgttaattaatatccctgttgttacccttcattcttcttttccgatttggattagtagttctgtagtcctgtttcacagtagtcatcttggggattctctttgcttttcccttcttgttggatccctcatttctcatttctcctttttttttttttttttgtcttatttactgttatggtggtgcccaacctgagagtagtttcctgagagtgcaaggatggtgatacttttgagatcctctgtgttggaattctgagtcaaaccgcagaattgcaggctcttaagtttctttcttttctatccttataattgatagttttgactgggtatagaatctttgattagcaaccctcttagacttctgggtactaaaatgctaactggaggttctgtgtatgtgagtagcttatgacattgcaggctttactagagtgaatgatctggggacttgactctttttattgggtgcctgtcacccacctgccagtatttgtacgctctgtcacctgcttaagtagttttcccagaggagactttcagtactctgactagagggtataagctgggctgccagtgtttagtgaacctattggggaaaggaggtttggaggtggggctcacttacatagtggttaaattttcacttaatcttttaaatacatcatctcagctgtatctgaatatctctaattctgagtccctctgtttcaaccatttcaaagagtggacctcttaagtttttcactgatctggaagaaagtggagaggctctaatatctttgaactttcattccttctgctttctttttctttcctttttttttttttttttttttttttgaaacagtctcactctgtcaggctggagtacagtggtgcaatcttggctcacttcaacctccacctcccaggttcaagcggttctcatgcctcagcctcccaagtagctgggaccacagacactagccaccacgactggctaatttttgtatttttaaggagacggggtttcgccatgttggctaggctggtcttgatctcctggcctcaagtgttctgcccacctcagcctcccaaagtgctgggattacaggtgtgagccactgtgtccagccccttctcttttcagttacacctatatatccaccttcagggatatatatatacatatatacatatatatatatatatatatgtatatgtatatgtatatgtatatatgtatatataccagtaccttcaacttctgagcctttctgggattctgtggtttgactcagtttataactttgtaagtttaaccactgcacccggctttctttatgaaaaactcttaaaaggctattgataattgaaaatataggctcacacctgtaatccaccactaaggggccgaggtgggaggatggcttgagaccaggagtttgagagcagcctgggaaacatagctagacccccgtctctctctctctctctcttttttaatgatcttattttatttatttatttgtttgtttatttttactttaagttctgcaatacatgtgcagaacgtgcaggtttgttaatagatacataagtgccgtggtggtttgctgcacctatcagcccgtcatctgggttttaagccccatatgcattaggtatttgtccttatgctctccctctccatgctccctatcccctaacaggccccagtctgtgatgttcccctccctgtgtccatgtgttctcactgttcaactcccacttttgagtgagaacatacagtgtttggttttctgttcttgtgttagtttgctgaggatgatggtttccagcttcatccatgtccctgcaaaggacataaactcattctttttgtttttgagatgaagtcttgctctatcgcccagggtggagtacagtggcatgatttcagctcactgcaacctccacctcctggattcaagcaattctcctgccttagcctcccgagtagctgggattataggcacccaccagcacgcccggctaatttttgtatttttagtagagacggggtttcaccatgttagccagactggtctcgaactcctgacctcaggtaatccgcccatgtcggcctcccaaaggcctgggattacaggcgtgagccaccatgcccagccgaactcattctttttttatggctgcagacccccgtctctttaaaaaaaaaaaaaagctgggcacagtggcacacactctgaagtgggacttcagagtcccagctactctgaagactgaggtgggaggatcacttgagctcagaagattgaggctgcattgagttaggattgtgctgttgtactccagcctgggcaacagagcaagaccctgtcttaaaaaaaaaaaattgaaattataactttttttttttgagataaggtctcttattttgtcacccaggctggagtgcagtggcacaatcatggctcattgcagcccaaactgccaggctcaagtagtcctcacacctcagcctcccatgtagctgggaccacaggtgcacgctaccaaggctggttaatttttgtagattttgtagagacaagatatcaccatgttgcctaggctggtcttgaactgagctcaagctacccaccatctttggcctcgcaaagtgctaggattacaggcatgagccagtgtacctggccaaaaatacaacttttaattggatattttcatgaatccaacagatgctgcttgttatttaaccatgtaattgagcactagtgtttttccatgggctgacccatttaggaggggaactaaattaagattgtattttattagtgaagtgttaccagaaatagtatatgctctttcgagttactcttgaaccatagttgtggtataataactgactttattctggaaagataaatgctgctcctcaaatctcttttttacaggaactttcttaccctttttccttctttggaaaagcaagtaggacaaaaatcaagcagctaagtctatctttaagttattacttcggacttcttttctgttgaattcagtggaatgatatagggaaggtagataaagattgattataaattaatgcatttctagaccattctgaaacataagtattatatagactgtttttgttgactaatcaattcacttttggtataagtattctgaaaaaagaacaagagttgtaaagaaagaaaatttatgatgtgaaactactttgacctgaacaaaggagaaaataatattgcttacctttttatcttctttttcctttctttaaaatttttaaagaaaaaaatctcattttctgataatctggacctacatgtagttgtgtgtttaacagtctttagggactgaaagagaggaaatagaatcaaattctagggatacagctaggttacctgtaaagaatcccgcaagtgtaagagtaaccacaggaacaaaccagtcttcagataattggtttaaagaatgatgaccagtgttttcttgaatagtttaggtgttttcctacattgctggggactggatcacatgacaggcattgagttttctagtgagcccacaagcaaatgggttgtagtaagtaccactgacttaatgtaggttttagtctcttctataaaagatattctgaacttgccatgtttgagagtgcatttgaaaaagattatcttgaataagaactttttttttttttaaatagagacagggtcttgctctgtgcccaagatggatggcagtagcgcaatcataactcattgcagccacaaacttctgggcctaattggttctcccacctcagcctccagagtagctgggactacaggcacacaccaaccacgcctggccaagaactttcttaagattgtgtttggttaagctttttgtcatgttgaatctgttgtagccatttagctgagtgtgcggtaaagtttgtgtatttagcaaaagttttaaatgcttctaggagggtatacagaatagaaacatactagtaaagaattctttttttagacagctagttcagtatcttacgtatatagtgacataggaggttttgttaagtggcagatgagattgtgtataggagggaaatagttaatagggaacatgtttgattttaatacatactttaatcttaccccattccctcaactatatataattgatttctatggaaaaaatatgttgttaaatcttttttgatatatttactgtatgtaaaatagttatctttaattccaattttaaaaggcaatataggccagatgtggtggctcatgcctgtaatcccagcactttgggaggccaaggcaggcagatcacttgaggtcaggagttcgagactagcctggccaacatggtgaaaccctgtctctactaaaagtacaaaaatgagccaggtatggtggcatgtgcctgtaattccagctacttgggaggctgaggcaggagaatcacttaacccgggaggtggaggttgcagtgagcagagatcgtgccactgcactccagcctgggtgacaagagtgaaactccatctcaaaaaaggcaatatagagtattacatgttatatatgtgtgtttgtatgtctatattacattatgtgtatacatatagacatgtacatataggatataataaatccttgctggatataacataaagaaaataggattaaatatttggttcaatatgttctaagcctttgtattagaataattagagccctggaattagtagtaaaaaacttagtccatagagagtgataaatttttgattttgtgggataaagcagtaaaagttcacaggaaggaaaggatggctgttgttaatggccattgtattgggcagtgtagatgtagaacattttcatcattgcagaaagttatttttttgggtggtattgcttacacaagaacctttatatttataattaaaacagtacttttggtgcttcaataaagaaattcatcgattttttttttttaaggaagtaaatgaaagaatatgctttaaatttcacccataaagctgtgtttattttctgccatatgtatggcttttacattatctcgtgctctccaaaactgattaaaaataggcaccatgagatgtaagtctcccctgaaaatgtattattaaccattagtagcgttaggatgtcctttggttaggtttctcactgtctccgaaaaggcaaatttctagagaagctaggagctattgctgttaggttttttatggactcatttcctctcttcctgtcatctaatgtactgtccagtagaagtataatgtgagccacataggtaatttaaaattttctactaggcacatttaaaaagctaaaaaaaaactaaatgtataggcaaaattaattgtaatatattttttaattcagtaagtccaaaataatatcatgtcagcatataattaactatgcagaaggttttaatgaaatagtttactttttgtactgcttttgaaattaggtgtgtgtgctgtgcttagagtatatctcagtttggattggccacattttaagtcaccaatagttatatgtgtgtattggctattgtatttacaacacagttctaggggtttaagcccagttgaacttggtagtgtttattagtgaaaggtaccttctctggtggtcagtgaacccttctggaattgtatgctaaattgtgagtatgctttagaatctcaaaggcaagaagaatcccgtaccttgtatcagtcagggtatgaactctctgctaaattaggtgtagttacttcagcagactggatgtgcctttttattgttttccctgtagcctgtctataatgttttgtccttaatgtctgtcatcaagattattatgtatcatttctgaaatcttaaatgatgatgtcactagaatttgcatggtcaattttctacattttcatgctttctagaacgtttatgagaaaaatgctaagacttctcctatttttcctccttgttgaggttttcttacaataatttttctttctttctttctttcttttttttttttttttttttttttttttggagacagggtcttgctttgtctcctaggccagagtacagtggtgtaatcttgactcactccaacctctgcctcctgggcgcaaacaattctcctgcctcagcctcccaaatactcaggacttaggagtacaccaccacacctgactaagttttgtaatttaggtagagatggggtttctctgctggccatgttgaccaggctggtctctaactcctagcctcaagtgatcctccagcctcagcctctcaaagtactgggattacaggtgtgagccaccatgcccagcctttcttaccgtaatttctttctataattcttactgtagactcttacaaatctgtccaagctcatacagctatcaagtgttggagctgcattttaggcatgaaaaatatgaggtagattatggacccctatagaccgatatgtctcctacacatgtattttttttaagttacaggaaatagtaaaaaccataatacttaaaaacaacaataaaaagcagcattttgcagaacacttgaagtggtaaaccagaataatgttgttgctaagttttgtggggtttttttggttttttttttttttttttttgagatgaaaccttgctctgtcaccaggctggagtgcagtggcgcaatctcggctcattgcaactgccacctcccaggttcaagcgattctcctgcctcagcctcccgagtagctgggactacaggcgtgtgccaccatgcccagctaatttttatgtttttagtagagtcggggtttcaccgtgttagccaggatggtcttgatttcttgacctcatgatccacccgccttggcctcccaaagtgttgggattacaggcatcagcccccgtgcctggccactttctaagtattatttactgtataatgtaagtaatatgttcactgagtgagcagaaatatgtacaggattcacaggtaagatgttaacttctggattttagtatagatcttttgttcatggagctatgttaataatacctgatactggtattatacctgtaaatttaaaaatttaaaagttactctgaaggctgtagaaatacagattaatgattcccaaacttgtctggatgtgggaatcacctggagagcttacaaaaaattattgatgcctgtgtcttaacctgggactgtaatctgggctttggaaattttagaagatcctaatgtaagacaagtttggaaacttttgaattcacggaataaaaataatctcagaattaagatggctaggggaggctgggcacagtggctcatgcttgtaatccctgcactttgggaggccaagacaggaggattgcttaagctcaggagttcaagaccagcctggacaacatagtgagacctcatctctacaaaaaataaattctaaaaattatctggacatagtggctcacacctgtagtcccacctaacttcgttggctgaggcaggaaaatcgcttgagctcaggaggtggaagctgcagtgaattctgatcatgccactgcactccagcctgagtgacagagcaaggccctgtctcaaaggaaaaaaaaaaagatgactacagtttctttttattgtggtaaaatgtacgtaacaaaacttaataatttttcagtgtacagttcagtggcattaagtacattcacattgttaaccatcaccactatctatctgcagaactttttcatcatcccaaactgaatgtgtactcataaaagagtggcagctcttcaatttttcttttcttttcttctgcttcagataaccaccattctactttgtctgtctagaaacttgactattgcaggtacctcatatgagtggaatcatgtagtatttgtccttttttgtctgggttatttcagtaagcataaaatcttcaagattcatttatgaagcatgtgatagaattccccttatttttaaggctgaatagtattccgttgtatgtatatactacattttgtttatgtattaatctgtaaatggtatttgggttgttttcaccttttggctattgtgaataatgctgctatgaacattggtctgcatatctctcatcaagtccctgctttaagttcctttgggtgtctacccagaagtggaattgctggatcatatggtaatttgaagtacaatttttggaggaatttccatactgctttccatggtggctgcactattttacattcccaaaggcaatgcagaggagtgccattttctccacatcctcatcaacacttgttatttcctgttttttttaaagctatttttatgggtgtgaggtggtatcttactgtgtttttggtttgcatttccctaatgattagtgatgtgttgagcatgttatgtgtttatcggccatttttatatcatttttggagaaacgacttttgaagtcttttgcccatttttttaattggttgatagggtgtttagagtttgaagtcagcattctctttactagtattatgattttaacacaagccatttaacctctttgtgcctcggattctctactggcaaatgggatatcatttttctgtagctgcttaatacaaatgctagaaataggtttgatgtggcactgcctaatctagcatacatatggaattgttgctgttagagcagccagctttaatctataagcacgtcttcattttctgttttagaaataatcttttgattaatttcagtacttaatttgaggaacttttttttccacgatggaagattgttcaagtttcatttataaaattctgcctcattcataactttttgttttagatattgtagtgtgagctcatggagagcaacagtattctctgcaatcctttatagtaactaataatacttcgaattgttattgtggtgacatgtttttgttttaactcacttttctgagtgttaaataccaaaaatgtttgatgggatgatacaaataacatttctccttggaaaaaaagcaagtctgaatttactatgttagtattttctaattgttttataatattctctgactagaatattgcctttaatataaggatttcggagatttgggtgtggtggtgcacacctgtagttcaagctacttaagaggctgcggcaggaggatcacttgaggttgggagtttgaggctgtagtgctccgcgactgtgcctgtgaatagccactgcactccatcctgggtaacatagggagactgccatctcttaaaaaaaatttcaggccggcacagtggctcacgcctgtaattccagcactttgggatgccaaggtgggcggatcacctgaggttaggtgttcaagaccagtctggccaatacatggcaaaaccccgtctctactaaaagaatacaaaaaaaactagccggacgcagtggcaggcgcctgtcatcccagctacttgggaggctgaggcaagagaattgcttgaacccgggaggcggagtttgcagtgagccaagatcacgccattgcactccaaccttggtgacaagagtgaaactgtctcaaaaaaaaaaaaaaaaaaaaaaatcttggctgggtgcggtggttcatgcctgtaatttatagcactttgggaggccgaggtaggcagatcacttgaggtcaggagtttgagaccagcctggccaacatggtaaaaccctgtctctactaaaaatacaaaaattagctgggcatggtcatgggtgcctgtaatcccagctactcaggaggcagaggaagaagaatcgctttaacctgggaagtggaggctgcagtgagccaaggtcgcaccactgcactccatcttgggcaacagagcaagaaacttgtatcacatatttagaatattgtttccctccagtatcacatacaaacttggtttattttaaaccactgaatgttacaataagatcagactattgtatattgggattacatgctagcagtataggaggtagtgattctttgatcatagactgctgggattgagtgttgttagtaaatagggtagtggcagataaacagtgggagctgagaccattggttacatgttttgtactttggaatactggattgctacaaagactccttggagaccaatttatccctttatatcaagaagccaaattttattttcttatttaacagataaaatggggccagatgaggttagcttatgcttgtaatctcagcactttgggaggccaaggtggagggattgcttgaggccaagagtttgaggccagcctgggcaacatagtgagcccccccgcccctgccatccctagggggaaaaaaaaaattagctgggtgtggtagcgcacacctgtagtcccagctactcaagagggtgagatgggaggatttcttgagtccagtagtttgaggctgcagcaagctacgattgtatcactgcactccagtgagaacctgtctctaaaccataaaattaaaaaatgaagtgggtaagtgctcattggaaagactgttagggaacttgaaagatgacttttatgattttatacatactagagtaaacttattttcctaaataatatttaagataggtcaaattaatgtatatttaaacatttcccatattataatattttcaggaaaatagatttttaaaatgttaaaaatgcttttaaaataatttttaaaatcttttaaaatgtttttaaaataatttttaaaattattttaaaatgctttgtcatgagaaaaatccattttaaatatctttttttgtttggagactggagggcagtggtgtcatcatagctcactgcaccctcaacctctcaggctcagatgttccttctacctcagcctcagcctctcgagtagctgggaccacaggcatgcaccacaccccacctagctaatttttaatttttttgtggagatggggtcttatgctgcctaggctggtcccaaacccctgggctcaagcccaactcctcttgcctcagcctcccaagtgctgagataacaggcatgactggctgtttttaaattctcttatttaatatttcatgtatgaaatgaaacagttgaaaactgtgtttttaagaactatactccactgattaaaggaacagtagataaaaggttataaaattcaggtctcctagccgctgtgtctttttttttttttttttttttttttttttgagatgaagtctcactctgttgcccaggctgaagtgcagtggcaagatctcaacccactgcaatctctgcctccctgggttcaagtgattctcctgcctcagcctccttagtaactgggattacaggtgtgtgccaccacacccagctaatttttgtatttttagtagaaacagaatttcaccttgttggccaggctggtctcaaattgctgggctcaaacgatccacctgccttgccctcccgaagtgctgggattacaggcctctttgtctttttttttttttttttgagatggagtcttgctctgtcacccaggctggagtgcagtggtgtgatcttggctcactgcaacctgcgtctcctgggttcaagcgattctcatgcctcagcctcctgagtagctgggattacaggcgcataccactgcacctccggctaatttttgtatttttagtagagatggggttttgccaagttggccaggctggtctcaaactcctgacctcaggtgatccacccacctcagcctcccaaagtgctgggattacaggcatgagccaccactcccagccattgtcactgctttcttaacaagaatgataaggtttttgtttgttttttgttttagttatattatttttagtttttctgtcagttacattaatttttattttattttatttttatttacttatatgttttttgagacagtcttactctgtcgcccatgctgtaatgcagtggtgtgatcttggctcactgcagcctccacatcgtggattcaagcgattcgcatgcctcagcctcccaagtagctgggattacaggcacctgccactgcgcctggctaattttttgtatttttagggagatggaggtttcaccatgttggccatgctggtcttgaactcttggccttaagtgatctgcctgccttccaagtgctgggattacagatgtgagccactgtgcctggcctaaaaaaaatttatttcgattaaaagcattttttagactagtcacatatgcagtagtggaaagaggggaaagagtagaacaaggagtttgatctgcaactaactgaacagtcaactgaggtaactcactaccttcagactagcctctgtcagttacatttgtaacttgaataacatgcttaaatttctatttcttgttctatcaagtttagacattttgtattgactccatatgtataagatacagaaattcttagctctgtattgctttttgcctcttttctaccatctattttcccacttctgttaactctagcattacttttactataatttaattttaattcactatgttctgcttatccagaagaaattcaagagggcttatacatatataaaacaggttctgagttgattaatatcatagtttaaaaaacttttaaggatgaattcttaagataaatgtgtggagaaggaataaaaagagtttattttcttagtgtacactcttatcctcctctgcgcaacttgacccttctaaattgtatcttgaagatacctctgatgtccttgggaacttttattttccaacctgtatacccagccatacctgaatttcattaaggtgtactgttttgcatatattcttgattctaggatgccttcaactgtaagacccattattgctttaaaataatgttattggttgggaggggattgcattaaatgattagtccaattaattaataaagtgagaaaacatttatagtttcttatatagaggggaaaataggcaaaaataaaaattaagtcactgttaattctgttgtccgcctttattttctttatccaaataaaactttttttttctttaaaaaaaaaaaaaagagctgggtacagtggcccacatctgtagtcccagctgctttggaggctgaggtcagaggatcccttgagcccaggagttacaagccaccctgggcaacatactgagaccctctctctttctttaaaaaagaaaaagaaaaaaaaaattgaccctactattttggtagcctatccctttccaataaacctactcttctattttaacttatttttgtggctatataataattctatgtgtgaatgtacctaactcgtttaactggttcctgtatttgcagcctttcctactataaacagtgttgtaaagaacatttcttatagctaagtctttgctcatatccatgattttttttcttctgatgaagtagaatttttgggcaaaatagggtatgcatttttgcatacttcctaataaagaaaagcaagttaacatttttggccactagtcatcactaagataaaactttttcttcttttttagtgaacacttgtcctgctccttcacctttttcttgcatggagacagcaatgtttgtaccagtgtggaaattaaccaacatcaacctgtataccttctcagtgaagagcatatcacccttgctcaacagtctaatagcccatttcaaggtagattattttattatattaggtatttgatcttttattgaaagatccttatttgacttcataattttacatttggggattgatggaattccccctgatctttagcctaatgatgattttgatgtcatttactttttccttccccattacagtgttaagtcagtgaaataaatttttaaatacaggtattaccaaaaaattcttgaccgtgaatggtgaagtagtttaaagtgttcttttagatagcataatggatttatatgtgttaatgttttcaaggttatcttgtatgtcaggtcatataagccatattttgtttgtttgtttttgtttttgttttttgagacggagtttcgctctgtcgcccaggctggtgtgcagtggcatgatcttggttcactgcaacctccacctcccggattcaagcaattctcctacctcagcctcctgagtagctggggttacaggcgcgttccaccaagcctggccaatttttgtattttttttagtagaactgggtttcatcttgttggccaggctggtcttgaacacctgacctcaagtggtccacctgcctcggcctcccaaagtgctgggattataggtgtgagtgagccaccatgtccggccagagccatgtgtaacatagctacaaagggacttttgatactatttatactatgaaaaaagttgaattctagaagaaatattttataagattgctgaattgcctctaaggcttggcagtgtgttcttattttaactttaaacctaatatttgctttttaaagtttacatggcagtacattataaatatttagatttatatatctatattgtttttcctcagattgctttttcttagaatgctttttcttagtgggagtcaaagtaaattgaaggatacacaaatattcccagcttctgttaaaaatcttaagagtttgggcagacaatttttttttttttttttttgagatgaagtctccctctgttgcccaggctagagtgcagtggtgccatcttggctcactgcagcctctgcctcccgggttcaagcagttctccagcctcagcctcccgagtagctgggattgcaggcgtgtgcaaccacacccagctaattttttttgtattttattagagacagggtttcaccatgttgaccaggctggtcttgaactcctgacctcaggtgatccacccgcctcagcctcccaaaatgctgggattacaggcgtgaaccactatgcccagcctgggcagacaaatttttaacagtttatataataaactcagtgtcatactttatcttcacagtaacgaagtataataagttgatttttctctggaatggttattactggtttccttttcttttttataattgcacgattatttgccacatttttcactgtgttcttatttggtaaaacagtcttttgttacttatttgatgtctgctttgggtttctagttatcttatgcccatttggactaaatggcactctcacaggacaggcattcaagatgtctgattcagctacaaaaaaattaattggtgaatggaaacagttctatcctatctcatgttgcttgaaggagatgtctgaagaaaaacaggaagatatggattgggaagatgattctttagctgcagtagaagttcttgttggtatggatcctgagtattattcctaaggggaaaatgcatgattgtatgtgttagttatattttgctgaataacaaacaagtctaataactcagtggctttcaacaccaaagatttattccttaatttcctgcccacattacttaagggctgcatcttagctggtttggctccatgtatctgctcattctgtaacctaggttaaatgaatatcccagtagctaggacatgctgttcttatgagaacagaagaataatagggactgaacctaaccatgtaagtgtactcagagcttctgctgggatatggtgtatgttacatctgctcacattgcattagacaaagctagttaaatggccaagccaaagtcattggggcagggaaatatattctgtctagagggaagcatgcttaggatgggacagttaattgtgaatgaattaatatttggaggctgaaaagttgacaacctgtgttgtatgatgttttaacatttggtaaaactaccacttccaataacttaagagacagaaaatgtaactaaagaatttatgactttggcatgctctgcctgccaaaagggtcagatttttttatatttttttattatttatttaatttatttttatttttttgaggtggagtctcgctctgttgcccaggctggagtgcaatggcgcgatcttggctcactgcaacctcctccgcctcccaggttcaagcgcttttcgtgcctcagtcttgagagtagctgggattacaggcgcatgccaccatgcccacctaatttttgtaatgctagtagagatggggttttgccgtgttggccaggctggtctcaaattcctgacctcaagtgatccacctaccttggcctcccagagtgctgggattactggcgtgagccaccgtgcccagcctaaaagggtcagattttttcagattggctgtattctctatgtcctctcattcagggacccaggttaacaaagtacccacatctgggacatgttaatctcatagcagaagacagaagtgagagaagctgcactgaccctgcaggcacatttaaagcttctgttaggatgtggcttatatcacatgcttacattccagagcaagtcacacagcctgacaatggagtgaagacatatactctacctcagagaggcatgagaggaggcatggagaaagtataatttaggagataattggaattagaatctaccatattgtatttaagggaatctaatggtaatgttagacgtgaagatcaccttatttcatcttttttttttttttttttttcctgagacggaatctcgctctgtcgctgctcaggctggagtgcaatggcgtgatctctgctcactgcaacctccacctcccgggctcaagcagttctcctgcctcaccctcccaagtagctgggattacaggtgcctgccaccacgcccagctaaattttgtatttttagtagagatggggtttagccatgttggccaggttgctcttgaactcctgacttcaaatgacccacctgcctcggcctcccaaagtgctaggattacaggtgtgagctaccactcctggcctgttttttttgttgttgtttgtctgttttttttttaagaaaaagattaccagtgctcactttaaataaacccattactactagagcagttgtgacagaaacagaaaaaacacacattttttaggcttttaaaatagaggcatatagaaaagtaagtagaaaatggttcataattctagtgtccagattacctttgttaaacttaaacaataaaattgaaaaagtaatacacattaagttggtcagaagtgcacataaagatttaaaaaacacatttctagaaatctaaaaaaaggaaagctgcctttttccaaatctctctcagcaaagataaccaccactgacagcttattgtggtttattgtggtttcttctaaaaaagagaaaaaaaaaaaagaaaagaaaaacttatgccaaagaagcttatatttataaaaatgtatttttatttgtataaatgtgatacctacttttccattatagtacttttgagtgaaactaattcactagtcacaaaggtaattggttttcctgtcccatttttttcctttcagctggtgtccgaatgatctacccagcatgctttgttctagtccctcagtcagacattcctactcctagccctgtgggatccactcactgttcatcttcttgcttgggtgtccaccaagtgcctgcttccacaagagatcctgctatgtcttcggttacgcttacaccacctacgtctcctgaggaagtccaaacaggtatagcagtaatttgtctcatcagctctggtaatttgttattttgtgtacagtaagtacttaagaaataatttattttgaaatagtttcaaacttcttgagaatttacaagtgtagtacaagtaatttccttagccatatttccaaactgttattatttactccatcaccctgtctgtatgatgtacattcattatcattggtctttttctgaaccatttgagaacaacctacagacatgatgtcccatcactcctgtgtactcagtgtgtttcccagaattaaggacactctcctatacaactattactcgatcctcttagtcagaaaatcagcattgatacactgccatccagtttgcattccctgttttagatattttgctttctgtatttaaaagtagcgtgcttttatttttaaaggtttatgtgtttatctataattaaaattactccaacagagcagcccattgctgtgttctaattcttagcccttaagtcctacaaaaataaacccaagcttttacagtaactgtcaatacagaactaaagcgttttagctattaaaaggggtttagttaccaaggtgcttattttcagcaaaacgccctgttactcagaagaacatacgcatatactaaagttctgacccatcgattcatgcaacagtttatatctctgccctccctccatctacctttaaaacaaaaacacagaagaactttttacaatggaggagaaacgtataaaaacacagaagagctttttacaatggaggggaaatatgctcatgctcagctgaccttacaaaaaagactgtctaatttccaactaaatgagaacactaaagtgtttggctaaaatccagcaatgattgactgacccaggtcagaggctggcagggacagaagggccagagtgctgccgctgcaggggctcatcctggcctccaaaccccaccttgatgtggaagccaggctctgtgcagcagctccatggctggtgtccagggccccttcgcactactccgaagtccttccagtctccccacctctggccagcctctgaccttgatgatgtcactctgggcatcaggatagtctggtttgcttatacagcatgatccatgggacacctccttccttgccctcagcccacctcccccgacacgccaccgtgtgctggccctgcctggctcctgagaaccccactcttggtactgagagtggtaggttacagagatgtacttgattgccacatttgcctaatgagatctggttccaaaaagtagcatgctttttatctcaaaatataaataattttaccagatagctggagcagcttgtatcacaaattaataaaaaacccaaataatgttactttaaacctacctttattctcctacagcctgtttttttgttttgttttcagttgatcctcagtctgtccagaagtgggtcaaattttcttcagtatctgatggcttcaactccgatagtactagccaccatggtgggaaaatacccagaaaattagcaaatcatgtggtggatagagtttggcaagaatgcaatatgaacagagcacagaacaagtgtgtattttcatttataagttcaaaaattgcatgttgataattacttataattagaagatatctaaagtataaacagtcatttgtttgatttttctttaactcataatgttgatctttaaaattaatttcaatgctacattgaggtttgatagaaaattttatgaattttaaagaattttgtaactttaaatcttaggaggaagtattctgcttcatcaggtggtctatgcgaagaagcgacagctgctaaagtggcatcctgggattttgttgaagccacacaaagaacaaattgcagttgtttgaggtagattatttcccgatcgattgatgcctatgtgtgatagtttgttacgccactgaatgcttatgcccactttatttgaaacagcttacatgaacatatgtcaggattttttttcaaaagaaaattcaggaaaaatatttcaggaatttgaagctgattatagaagtacatgtaaatataagctttcagttcattcactgttaccagaggcagactctgaaagttttgtttcctagtagctaaataaaagacaattttatatggagctatggtatatatagtatctataagctatacagccatataaatctcttgagaaaagcattccttcctcaatggcactacctgagaaatttatcccaagagttctttctttttttaaaaaatgaagagacagggtcttgctttgttacccaggctggagtgatcatggctcactgcaacctcaaacttctggcctcagtcgatcctcctgccccagcctcccaagtagctagggttataggcatgtgccaccacacctggctaattaaaagaaaaaaaaattcgtagagaggggatcttggtatgttgtccaggcttatttcgaactcctaacctcaaacagtcctccccttggctttccaaagtgctatgattacaggtgtgagccaccatatctggcctacagtaatctttttttattttttattttttgagatggagtcttgctctgtcccctggtctggagtgcagtggcgtgatctcggctcactgcaagctccacctcccgggttcacgccattctcctgcctcagcctcccaagtagctgggactacaggcgcccgccaccatgcccagctaattttttttttttttttaaagtagagacagggtttcactgtgttagccaggatggtctcaatctcctgacctcatgatacaatctttttttaatagtaaatacagtgttgggttttgaagagtaatttcatttctttttttttaagcttttatttttggttcagggttacatgtgcaggtttgtgaaataggtaaagtcatgtcacaagggtttgctgtatagattattttgtcactcagatactaagcctagtacccagtagttactttttctgctcctgttgctcctgccagcctccaccctcaagtagaccccagtgtctgttggacccttctttgtgtccatgagttctcatcatttagctaccacttataggtgagaacaggcagtaattggctttctgttcctgtgctaaggataatgacctccagctcatccatgttcctgcagatgacatgatctcattctttttttatggctgcacagtattccatggtgtatatgtaccacattttctttatccagtctgtcattgatgggcatttaggttgattccatgtctttgctattgtgaatagtgctgcagtggacatttgcgtatatgtgtctttatggtagaatgatttatattccctgggtatataaccagtaatggggttgctgggtcggatggtagttgtagctctttgaggaatcaccactgctttccacagtggttgaactattttcacttccatcaacagtgtataaatgtttccttctcaacctcgccagcatctgttattttttgactttttaataatagccattctgactggtgtgagatgttatctcattatggttttgatttgcatttctctaatgatcagtgatgttgagcttttttacatatgcatgttggctgcacatatgtcttcttttgaaaagttttcatgtcctttgcccactttttaacaggattttttttatatataaatttaagtttttttagatactggatattagacatttgtcagcatagtttgcaaaacttttctcccattatgtaggttatctgtttagtctgttgataatttctgtggctgtgcaaatgctctttagtttaattagatcccatctgtcagtttttgcttttgttgtgattgcttttgacatcttcgtcatgaaatttttgcccatttctgtgtccagagtggtattgtctaggttgtcttccagggtttttatagttttgggttttacatttcagtctttaatccatcttgagttgatgtttatgtattaaggaaggggtccgatttcagtcatctgcatatgactagccacttataccagcaccatttattgaatagggagtcctttccccattgcttgtttttgtgagctttgtcaaagatcagatggttgtggcagtgcagccttatttctgggctctctattctgtttcattggtctatgtgtctgttttagtaccagtaccatgctgttttggtaactgtagtcctatagtattgtttaagccaggtaacatgatgcctccagcattgttctttttgcttaggattgccttggctatttgggctctttttgaatttcatagaaatttaaaaatagtttttcctagttctgtgaagaatgtcattggtagtttgataagaatagcattgaatccaaattgctttgggcagtatggccattttaaggatattgattcttcctatccatgagcatggaatgtttttctgtttttttgcatcatctctgatttctttgagcagtgttttgtaattcttattgtagagatctttaacctttctggtaagctgtattcccagttattttactctttttgtggcagatgtgactgggattgcatttctgatttggctctcatcttggctgttgttggtatatagggatgctagtgatttttgtacagtgattttgtatcctgaaattttactgaagttgtttatcagctgaaggagcttttgggctgagactgtgaggttttccaggtctagaatcatgttgtctgccaacagggttacttttgtttcctttcttcctatttgaatgccctttatttttttctccctgattcttctggccaggactccccatactattttgaataggagtgagaggaggcattcttatcttgtgccacttttcaaggggagtgcttccagctacagtctttttttttttttttttaatgataaatacagtgatggattttgtggagtaatttcttataacattctttgggcagctgtaggtgaaatgttgaaataagattcagaaaataggattctgtaagggaagaactgtcacaagggagcaaaactcaaagcatgacaaaactgtcacgctttctaatggattatattggttgaatgattggtagaagaatagatgaacgtggaattctttagaaatttatttagtttataaaggccttttgataaggtttggttatgagaagttttaaaattatgttgcctagagtttattattttatcctgcagattaaacatagatcataggcttttgcattcaagtaaacagtaatggccttgacatccctagtcagaacttgtgatggaatagatggtcacctgtctttctcatggaagtgaaccaaacaaatggagtgcctgcaggttagggccaaggtttttcttacatttgctctgttggtttgaatatataataacagactctctcaagtgtgctgttatgtttttgcataaattgaatattcttatggaggctctttggattaaagaatacgtaatttttaaaagtctggcaactttgttgaaaatttacctctgttagagagattggaataaaaacaaggatatatttagctattgtttagcagtttaaaatagctaaaaaaaccacacctaatctgaacataatttgtataagaatgggggtcagcaaacagtgatgaattcgccatatttggcccactgcctgttttgtatggcctgtaagctgaaaatgattttttttaatttgtttgagacgatatctcgcagacaggagtgcaatggtgtgatctcggctcactgcaacctccgcctcccaggttcaagcagttctcctgcctcagccttcagaatagccaggactataggcacgcgccaccatacctggctaattttttgtattatttagtagagacggggtttcaccatgttggtcagtctgttctcaaactcctgacctcaggtgatccatctgccttggcctcccaaagtgttgggattataggtgtgagccaccatgcccagccaactgaaaatgatttttacgttttttaaaagttgaaaaaaataaagaatgttttatggtatgtgaaagttgtgtgaaattcggatttcagtattgataaataaggatttattagaacacagccacattcatttatttacatattgtctgtggtcacttttaccccacaatggcagagttgaatagttgtgacacagtctggcccccaggggataaaatatttactctctggttcactacagaaaaagtttgctaatccctggtctaagactaaaagaatgcttaaatgtaagtaagcttttcccaaactaccatttgaccgagcaatcctattactggatatatatacccagaggaatataaaacattctgtcataaagacacatgcacgggaatgttcatagcagcactattcacaataacaaagacatggaatcaacctaagtgctcatcactgacagcctggataaagaaaatgtgcatgtacaccatggaatactgtgcagccataaaaaaaaatgagatcatgtcttctgcaggaacatgaatggagctggaggtcattttccttagcaaactaatgcaggaactgaaaattaaatattgcctgttctcacttataagtgggagctaaatgatgagaactcatggacacaaagaagggaacaacagacactgggtccagtggaggctgggaggagggagaggagcagaaaaaataactattggatactagtcctttaatacctgtgtgatgaaataatctgtaaacaaacccccatgacatgagtttacctatataacaaacctgcgaatttacccctgaacctaaaataaaagttgagaaaaaaataaattaggattttctttcccactagtggaatttttatcaaatagttctgttttagttcctaaactagacttttttattctttttgaaaaggtggattttaagtattttgtctaaaatggttttagaggaaggcattaaaatatgcatgttggcaacacaggtttaaattcttggtctttaagctgaacttttatttttaaaaagttgttttctcttgtccaggcgcagtggcttatgcctgtaatcccagcactttgggttgctgaggcaggtggatcacgtgaggtcaggagttcaagaccagcctggccaacatggtgaaataccatctctattaaaaatacaaaaattagccaggcatggtggcacacgcctgtaatcccagctactcaggaggctgaggcaggagaatcgcttgaacccggaaggcagaggttgcagtgagccaagatggcgttactgcactttggtgttggtggcagagcgagactccgtctcaaaaaaaaaaaagtcatttttaaaagtattttcagaaatttctcagaggcatatagagatttaatatgctaaaattttacataatcgatacgtgtgacttgctttggttagtttgctcctttagtaaatacagcatttctaataatttacttaaaaaaattagtattacattttgtactttaggtcttctgcccaccacaaatctagcttatttcttaagtgaaggtaagacagatagacagtgagctactacatgtgtatcctctttgccatagaatatataggaggttggggggcatacattgataactgactctgttaaatcggcctctagctcgctctcaaatccatttctgctttttctctgttctgttctgtattgcagggaattaaatttcctagactcgtttgctttctggagttggctaataggaggcactaacagaagattggagggtgagaggagggaagaagccagggtctttccccagtccctttttgagccaactccagcagcagctcccttgtgtcctattaacacagccccttcctcatggtcccagttactactgagcagatcctgctatggttctagcaccatcctgagcttctgggatatggtgagactacatcatcttattgtcctttcagtgctagaagtcatagaagctccctgctattactagtctctgggtttcctcactttcctctgttttgtataaccggttctctatagtgaatttcttctgtgtgaaagataggtctggaccctgcctgataacattggcttctcttaaaaattgatttgggaagaaaaaaaattcataactgtaacagacaatttacatgaatagaaattattttaagaaatttaaagtatatgaataaagcctaagttccccttgaccatcctttctctcccccaagcctactcactctccctagaagtggctagttgccaattagatactatttctccatacttaattttatgtattctcctctcaacacataaatattattatttttttagagactagctgtgtcgcccaggctggagtgcagtgatgaaatcatggctcattatagcctcaaactcctgggctgaaacgatcctcctgcctcagtctcccaactagctagaactacaggtgtgtgccacaatgctcggataatttttaaatattttgtagagacggggtcatgctatgttgcccaggctggtcttgaactcctgggctcaagcgatcttcctgcctcagcctcccaaagtgctgagattacaggcatgagccaccatgcctggcctcacataagtattattctgatttatttttcacagctaatttttttcacttaatgtgcctcagatctttccatattagttacttatatagctctgcttcattgtttaaaaattttcctgtggctgggtgtggtggctcattcctgtaatcccagcagtttgggaggccaagggagaaggattgcttggggccaggagttcaagactagcctggacaatgtagtgataactctcttttttaaaagaaaaatgaaaaaaatgttattaatattccactgaatggaagtatcatagtttatgtaatcattctggatttgatggacatacagtttgtttccataggtgttttttgcttgtgcttgctttaaaaaaaaagtaatactgctgtaactatcaattatttagtaggtttttttgaatccttactctgtgacagaaggtgtcctaggctcagaatacactagctaacaaagctcctgctattatgaagtctgcattctcttggaagtgaggcagataatttgtttttaagaatatatatatatatatatatatatttttttttgagacagtcttgctctgttgcccaggctgaagtgcagtgatgccatctcagctcactgcaacctccgtctcctgggttgaggggattcttgtgcctcagcctcctgagtagctggtgctacaggtatataccaccacatccagattaattgttgtatttttagtagagatggggttttaccatgttggtcaggctggtctcaaactcctgacctcaaatgatccacgtaccttggcctcccaaagtgcaggaattacagacgtgagccactgtgcccaggctttagaaggattttaaatcctttttaaatttgaatgagtgctgggaaggaaataaactaggtgggtgatgtgataaagagttgtaggcgagagggctatttaagtacgtgtgacatcaaaaaaggttctaccgattttactcacactttttgcatatagaaaatgttggtttttcttgtgatttcactgatctgagaactatcctcaaaattattttttgccattataataagtgagaagcataaaattgtttgtcgcatttttcattagcgagattgaatagcgcacatttactgatattagactttagtgtggtggaatgttcataggaaaactgcacatagaaagcaggctgctcgccccgtccgggaggtgaggggcgcctctgcccggccgcccctactgggaagtgaggagcccctctgcccggccagccgccccgtccgggagggaggtgggggggtcagccccctgcccggccagccgccccgtccgggagggaggtggggaggggtcagccccccgcccggccagccaccccgtccgggagggaggtgggggggtcagccccccgcccggccagccgccccatccgggaggtgaggggcgcctctgcccggccgcccctactgggaagtgaggagcccctctgcccggccaccaccccgtctgggaggtgtacccaacagctcattgagaacgggccatgatgacaatggcggttttgtggaatagaaagaggggaaaggcggggaaaagattgagaaatcggatggttgccgtgtctgtgtagaaagaggtagacatgggagacttttcattttgttctgtactaagaaaaattcttctgccttgtgatcctgttgatctgtgaccttacccccaaccctgtgccctctgaaacatgtgctgtgtccactcagggttaaatggattaagggcagtgcaagatgtgctttgttaaacagatgcttgaaggcagcatgctcattaagagtcatcaccactccctaatctcaagtacccagggacacaaacactgaggaaggccgcagggtcctctgcctaggaaaaccagagacctttgttcacttgtttatctgctgaccttccctccactattgtcctatgaccctgccaaatacccctctgcgagaaacacccaagaatgatcaattaaaaaaaaaaaaaaaaaaaaagaaagcaggccaggtgcagtgactcacgcctgaaatcccagcactttggaaggccaaggcgggaggatcacgaggtcaaaagatcgagaccatcctggccaccatggtgaaaccccatctctactaaaagtacaaaaaaaaattagccgggcgtggtgatgcacacctgtagtcccagctacttgggaggctgaggcaggagactcgcttgaacctgggaggcagaggttgcagtgagccgagatcgtgccactgcactccagcctggcaaaagagcgagactgtctaaaaaaagaaaaataaaaagcaaactacagtataaagtgggttacagaaagtctcaatgatgtattcatatgtaaaaaattaaaggagctgcacacttaaatgtgcactatttattgtaagttatacctcaataaaaggttttctttaatcttcataaaaaaaaaaagaaaggctgctaagtaaaaagcaatacattaaatttctcatgttaacattaaagtactgcatacctaacatcaataggaaaaaataatctaaaaggattactctgttggtttgtgctttgaggacaatttcttttttttacaaagattgctcaatgtggttgtgttctagcatgaagttcagttgtttggccttgcgcagtggttcacacctgtaatcccagcactttgggaggccgaggcgggcggatcacagggtcaggagatcgagaccatcctggctaacgcagtgaaaccgtgtttctactaaaaatacaaaaaaattagccaggcttggtggtgggcgcctatagtcccagctactcgggaggctaaggcaggagaatggcgtgaacctggcaggcagagcttgcagtaagccgagattgtgccactgcactccagcctgggtgacaagagcgaggctccgtctcaaaaaaaaaaaaaagaaaaaaagaaattcaattgtactctctaaagaaactagcttttagaaagaggtctgtatagaagaaaagggctgatttaatgttgtcaaaaatttagagaactgctgctattagtatgtagccccagttaatagtttcttactcttaatagctgggtaagtgaatgtatggccatttacttttcacatcccttgtacacttgggacataactaaatagttcacctcagatgaatggagatcctatttctcctactgccttgcataaaatagactaattctcaaacttttttgtctcagaacttatttacagtcttaaaaaattaccgaagactgcaaagtacgtttattacatctatttatattttagagaaattttaaagcaccacttattaaaaacaataatttcagtgcatattaacatgaataaaatagacatccactatattttccaaaacagtagccaaaaagctaattgagtggcattgttttacagttgtgcaagtctctttaatattgagtgtagtaagatagttgaattcttatatctgcttctgcattcggcctattgctggatattgtcttggttgaagtatatgaagaaaatccagcctcatgtagctatgcaattggagaagggaagagagtattttaataactttttcagataattgtggatattcttctttgatactacaccaaaaattgacaagtggtagtttcttaagggttggttggaatgtggaatctaaagccctgtcagtggttgtacttcactaataactgaatggatctttcgattttgtaacatcatgcattggtcatttgaaaaatatcagttcactgggttatatagatctgaatgttggcacattttgttatatatactcatctctaaatatccgtgtaggatcgatattctagaaccctcacagataacaaaatctacggatgctcaagtccttcatataaaatgagttagtattcatataacccgtatgcatccttcagtatacttttttttttttttttgagatagggtctttgcctctgttgcccaggcaggagtgcagtggtgtcatcttggcttactgcaacctgcccctccctggctcgagcgattttcgtgcctcagcctcccaagtagctgggactacaggcatgcgccaccacgcccagctaactttttgtgtgtgtgtatttgtaatagagattgggtttcaccatgttggccagcctggtcttgaactcctggcctcaagtaatccacccacctcagcctcccaaagtgttggggttacaggcatgagccactgtacctggcccttcagtgtaaacaatctgtagtttgtttataatacctaatacaatgtgttacgtaaatagttgttataccgtattgtttttacaatttatattattttttattcttgtactgttaacttttcatttttgaaaaataatatttttcatctctggttggttgaatttgaggatgtggaattcagccaatgcagagtatcaaaatatttcattcattaatattgccagtgatctcacctgaaaagtatttaagtattagaaagctcaagcactgtgtcagatagttttccaaaattctaaatattgcagtggtaccaactgtattagcagtagtagtcattgtttagcagtcaagctcaaaatgattagttcttccttaaatgacaaactcattttgttcatgtttgataacctaataaacaaatctgccaaatgaccaaatatggataatcttagtttatctaccagtcctttgttcttcaaatggtgtttcatgaaaaaagctagtttcagcttgtaactcagtcgtacaagcgcttttcctcaaaatagccattgtacttcaaatctatagcagaaatgctttatatgcactacctatttctttatacagagtgtaaaaagattgtataaggattgagattaataaaaattatttttgctgtcttcatgaaggacattcttaagtgatactatcataaaaaacaacaaactgaatgtgtggtggtggagaaagcagtgactactactgctagtacagttggtaccactccctttgattcatgttcagttgctagaagttttgctgcctattgtttttgcaccatctttgtaaatttcaacataataaaaaagtcagatactgttttgatgctattatgaaaatagttttgaacccctgtagcccctgaaaaggagggttcatagaccatactttgaatttagtagacaaatatttgaataattgatgagttaatgatactgttattttttcctttttatattctttttttcagtttcttctcttgatttagaagtttggtgttctatttttgttcttttgttaattgaattaatcatttattatgcctgctttccttaaagtctaaagttagagtctacgctctttttatggaatgaacaaagaccttggaatactttaatcttgctcctcaaatctttcatgcttttttttttttttttttagcattttagttctactctgttttgttattagaaacttcaaacatggacaaaagtaagcgaattgggcaatgaattcctgtttatcaaccattcgtattcacttactgtgtttgcttcaactagaccttttctcttgctgaagatctttaaaatttgtttaatttactttatttatttatttatttattattattattatatattttttgaggtggagtctcattctgtcacccaggctggagtgcagtgacgtgatcttggctcacttgcaacctccacctcctgggttcaagtgattctcctgcctcagcctcctgagtagttgggattacaggcgcctgccaccacacccggctaattttttgtagttttagtagagacggggtttcactgtgttggctaggctggtctagaacccccgacctcaggtgttccgtccgccttggcctcccaaagtgctgggattacaggcatgagccaccatgcccagcccaatatattttattgaacttgatttatctaaaatattattttgacatacagtaattgtgatgaaacattagtgatatttggcatttctttattttataacatgtcttggaaaattggtattttacatctatagcacatctcaatttggactagccacttgtcaagtgtctaatagctacatgtaacttgtggctaccattattggatagtgcagctttataaattaggtagaaataggactgaagggctggaagatacagaaaagatgaatttctattcaatattaagaatttaccttctagcagttggagctatttgatgagggggatgcatctccttatacagtagtatggtccttgtcattgaaagtattcaaaaagaacccattcaagccaatgaggtggctcttgcctgtaatcccagctacctgggaggctgtagtgagcgctaatcgcggcactgtgttccagcctgggcaacagcatgaggaaaaaaaaagagaagggattattcatacgttgggtaggacctgctgggtttttttttttgttgttgttcttggttttttgtgtttttgaacaaatttctgtgtttaaaaaaaaaaatgctcttttacaaagttcaggctgggtgagtggctcatgcctgtaatcccagcactttgggaggctgaagtgggtagatcacttgagatcaggagtttgagaccagcctgggcaacatggcaaaaaccggtctctactaaaaaaaaaaaaaaaaaaaaaaaaaaaattttttttttatatatatatatatatataaatatatatataggnnnnnnnnnnnnnnnnnnnntattatatacacacacacatacacactatacacatatatatagtgtgtgtgtatatatatagtgtgtatgtatatatatagatatatatagtgtgtgtgtatatatatatagtgtgtgtatatctatattatatatatatataaaattagactgatgtggtggcaggtgcctgtaatcccagctactcgggaggctgaggtgggagaatcatttgaacctgagaggcagaggttacagtgagcggagatcacgccactgcactccagcctgggcaacagagcgagactgtctcaaaagttaaataaataaaattaaaagttcaaacagtacacaagaatataaaattaaaaattaacaggttcccctcttatgtatgtaggtctgcctgttgctttctttcacacaaatggaatcatgctgtatttctgcaacttattgtttttttgataaacagcctgggtgtttatccatgttagcacttacagattcattctttttaaaaagttcataatactgcattttatagatatgtaatactttatttggcaaatccttatgctatgctcttgataaaggtttttaaagcaaatcttaaatattacacttctgcagtacttcagtatgcggctctaaaaaatacgaatatcttcttacatgaatataattctaccgtcatacctaatattatgataccttgtccagattttctcagaaatgtctttttgtagatagtttatttgactaggattcaaacaaggagtaaacatttggttgttatgttttctaaatctctccttttagttgtctcctgctcccttttcatgacattgactcggttggtaaaactaggtcagttcctcctatagagtgccccacattctggattttttgttttacttgtcatgtaattttacttctttcagtgtaatttaatttcttcctttttcctttgcatttctataaatggaaggtagctgtagagctgagctatccaatactagctgtgttagtaactactattggctatttaaatttacagtaattggatttaaatacaattaaaaattcagttcctcagctgggtacagtggttcatgcctgtaatctcagcactttgggaggctctcttgagtccaggaatttgaggttacagtgtgctatgattgtactgcattccagccttttaagagacagagcaagacttgtctcttaaaaaattagttcctcaattggactagccacaattcaagtactcaagagccatatacaggctgggtgcagtggctaatgcctgtaatcccagcattttgggaggccgaggtgggtagatcttttgaggtcaagagttcaagaccagcctgaccaacatggtgaaaccccacctctactgaaaatacaaaaatcagcccagtgtggtggcgggcacctgtaatcccagctacttgggaggctgaggtgggagaatcgcttgaacgcaggagccagaggttgtggtgagctgagatcgtgccactgcactccagcctgggtgacagagtgaaactgtgtctcaaaatatatatatatatatatataaaaacatatacagaacttcccatcatcatagaaagttctagacagtgctcagtgctgatctgggggcttgattacttgattagactcaacttcaatatttttggcaagagtacttcatagatggtggctgtgttgctttgtattatgttacgtcagagagagacagtatctggttgtcccatatctagtaatgttaagattgattaggtggggatcagcctgaccctttcattgtatactttttttgtttgtttgtgtttttggtggggggtgggacagagtctcgctatgtcgcccaggctggagtgcagtggtgtgatctcagcttgctgcaacctccacctcctgggttgaagcgattcttctgcctcagcctcctgagtagctgggattacaggtgcccaccaccacgcccagctaatttttgtgtttttagtggagacggggtttcaccatgttggccaggctggtcttgaactcctgacttcatgatccacctacctcggcctcccaaagtgctgggattacaggtgtgagccactgcatctggccttattgtatagtttgtaataatgttgacaatgaataaagacaatttatcttcttcctccgaaatctctgacctctttcttgccttattgcattgggtaaaacgttcagtaaaatgttaaatgttgagagctaatattcttgctttgttcttaatcttgagaaattattcatgcttaaacatcaagtaagatattagttgtagtttttcatagatatccatcagatcaagcaaattttcttttattccttgcttgccgagtgtatataaataggggttgaatatattaatagtattaatagggttttttctatagttattgagataatatggttttcttttattctgttaatgtgatgcatgatatttttttcttttgaatgctacaccatacattcccagaattaacttcatttggtcatgatgtgttattcttttatattttgctggtttgagttgctgatattttgttaattatttacatctgtgttcttaagagataatggtctatggttttctttttgtgtaatatctttgattttaatattaggataatggtggatttctcctatgtccttttgaaacgagtttggttttttttgataactttggttcttttttttctctatgcacaataagatatctcaggctctgtacaaaaaggtgtctcggccgggcgcagtggctcacgcctgtaatcccagcactttgggaggccaaggtgggcggatcacgaggtcaagagatcgagactatcctggccaacatggtgaaaccccgtctctactaaaaatacaaaaattagctaggtgtggtggtgcacgcctgtagttccagctacttgggaggctgaggcaggaaaactgcttgaacctgggaggcggaggttgccgtgagccaagattgcaccactgcactacagcctggcaacagagtgagactcggtctcaaaaaaaaaaaagtgtctcagtatgtcttctcaacagagtttttcaaataagtgcctgtcactgctttttaatactctttctggatagctctgattcagcaaaaaagtaaaatttaaaaagtaaaacctaatgaatactgaatgtgtaaactccatatcttaccacattttaaaagtttcttggccaggcacggtggctcatgcctgtaatcccagcactttgggaggccgaggtgggcagatctcctgaggtcgggagttcaggaccagcctgaccaacatggaaaaaccccgtctctactaaaaatgcaaaattagccgggcatggtggccacatgcctgtagtcccatctgctagggaggctgaggcaggagaatcgcttgaaccccggaggtggaggttgcggtgagctgagatcatgccactgcactccagcctgggcaacaagagcgaaactccctctcaaaaaaaaaaaaaaaaaaagtttcttagtgtaaaaataatgttatgtgtatatatatctctcattgagtggaaatctcagtgcgcactgaaagaaatcttttttttgtttgtttttgtttttgttttttttgagatggagtcttgctctgtcacccaggctggagtgcagtggcgtgatctcggctcactgcaacctctgcctcctgggttcaagctattctcctgcctcagcctctcgagtaggtgggactacaggcgcgtgccaccacacctggctaattttttattttttgtaaggacggggttttaccatgttggccaagctggtctcgaactcctcacctcaggtgatccgcccacctcatcctcccaaagtgctgggattgcaggtgtcagccaccatgcccagcctagaaatcttaaacttaacaaaattgtttgatttttaggtgtatcatttaagttcttcgttttagaattgcttcaaattatgaggaagaaattattttaggcattttctttcccttttctagtcagtttattctttttgtagtgctaagtatttggagaaggtaggtatggtgtgaggcccatcaatcagtcaattctagcactttccagactgatgtaacttctatttagtagagtagaatacgctttctggccagttgctgtaggattgtaggtgatgactaagcttagccaagccattaatttataataattactaacaggaaatatcaggtacatttaaaaatgagtaaatttcaagccttgttataccttttaaccttaactagaatcttacctctatatttaaattagatactaaaatatttaaatcatgtaagacataatctttggctgtctgatcacatggctattaaatgagcatgagataattggcttttatgaatgtttctgcatgcccttatattttatttaggtcacgagcaaagtatttttttcccctttcaaattcaaattattttacttttagtattacatgtgaaaaagaaatgataaccgaagtgtctaatactattaactggtattatacttcgccataatagtgatactgtaaatatgaaacctttattttcacttttcaggcacaaaaatctcaagtcaagaaatgctggacaacaaggacaggcaccatctttaggtcagcaacaacaaatacttcctaagcacaagaccaatgagaagcaagaaaagagtgaaaagccacagaaacgccccttgactccttttcaccatcgtgtgtctgttagtgatgatgttggcatggacgcagattcagccagccaaagacttgtgatctctgctccagacagtcaagtgagattttcaaatatccgaactaatgatgtagcaaagactcctcagatgcatggcaccgaaatggcaaattcacctcaaccacccccacttagtcctcacccttgtgatgtggttgatgaaggagtgactaaaacaccttcaactcctcagagtcaacatttttatcaaatgccaacaccagatcccttggttccttctaaaccaatggaagataggatagacagtttgtcccagtctttcccacctcaatatcaggaagctgtagaacctacagtatatgttggtacagcagtaaacttggaagaagatgaagccaatatagcctggaagtattacaagttcccaaagaaaaaagatgtagagtttttaccacctcaacttccaagtgataaattcaaggatgatccagttggaccttttggacaggaaagtgtaacatcagttacagagtatgtattttttttaatagtcaccattataatttaagggtggaagtgatgcaagttcttaatactaggactcagtattggattcaaggtaggatttacaagaataaattcattgagtattaactttgcattattcctttactgtgttttttcctcagggaacttcttcattatgaaataactttagccacaaaaagtggagaaaataatgtgtaaacacttgtacatcagccaacttaaggattttacatacagttagaattcccatgtactgtttttcttcttccagtcttccttccactgtcctgaatttggtaccttttttttttttttgagacagagtctctgtcacccaggctagagtgtagaggcacgatctaggcccactgaaatttccgcctctgggttcaagcgaccctcctgcctcagcctcccgagtagctgggattacaggtgtgagccaccacacccagctaatttttgtatttttagtagagatggggtttcaccatgctggctaggctggtctcgaactcctgacctcaagtgatccacccacctcggcctcctgaagtgttgggattacaggcatgagccaccgcacctggcctcaatttggtacttattatttcagtacatgtttttatacgtgtagctctagttattcattttaattgctttatggtatttccttatgaatatatagtaaatacctaaactcttaaagatggatatgttggttattttcagtttttcaccctaacattttccattttgtttggtacacatttccttgtttacttgtataagaatttttttaggaaatacatctaaaagccattttcaacatggctatgtccattttcaacattaagggttgttgcccagttgcagttcagcaactggtatatagtttaaaccctcatgaaccagcagtgtatgagaatggctgttgcactatattttcctctatagttggtcttacaagatttaatttcagtaatttacagcatgcaaaatgtcatctcattgtctaaatatgtgtcttccagatttctagtgagattgagcatcatttaaaatgttttgggtgtatttaggtttcctgttctgtgacttgcctagtcatcgtattttttagtccatttttcttttttttctgatgtattatttgcatgctctgggtattaatcctgcattagttttatgtgctataggtttcttcctccattggtggtttgccttctttgtccactgtattaatgttatactttgggcagaagaaggcttttttccaggtatcccttgactttctatgttgttattaatacatttatagtctgtctaataagccttttacatataaatttttctaaaaggtgaaaatcaaccagtaaaatacgattatgctcaatagaactgtctacctatttattagtacaaggccaaggaatgtacaaagattacgattccttccttatcagatcattgtcagtgaattaccttttttttagtgaattacttgcttattgcttaaatgctactaataggttaaataatgtcttagactttatttgcttaaaatgtcacattttcattatcgatttatgtttattttttaatgtagctttttttctcaacatcagattgctccagataatgtaactattatatggagtttaatactttcttatttctgttataatgtgaaccagttgctttctagacttgttttcagctctctaggatttcattttgattagactcaagttaataccacaattttttataactagtggcttctttttggttttgcctttattttcttggtgaatatctttagctccctcggggggagggggcggcggggggaagagtgggagataaatttggcatcctttgtatttctgaaaatgacctgatttttttgccctcatgcttggattgataatttggctacatgttggtttcataattgaaaataatttcccccttgaactcataggcattgctttactgtcttctggtatcttcagaagaaatgtgtaataatgagtttcattcttgctcatttaaaaaaacgcgatctcttctgtgaggcttttaaggtcttctcttagctttagaaatgtcacaagaatctgtgtagcaggtataatgatcttttttccagtccttgtgctgggcacttgaaaggctaactcaattttttttttttttttttttttttttgagacagagcctcgctctgtggcccaggctggagtacagttgcgcgatccctgctcactgcaagctccgcctcctggttcacaccattctcctgcctcagcctcctgagtagctgggactacaggcgcccaccaccactcctggctaattttttatattttttagtagagacgggggtttcaccgtgttagccaggatggtctcgatctcctgacctcatgatccgcccgccccggcctcccaaagtgctgggattacaggcgtgagccactgcgcacagcttttttttttttttttttttgagacagtctcgctctttcctccaggctggagtgcagtggcgtgatctcggctcactggaagctctgccttccgggttcaggccattttcctgtctcagcctcccgagtagctgggactataggtgcgcaccagcacactctgctaattttttatgttttttattttttgagacgtagtctcgttctctcgcccaggctggagtgaagtggcgcgatcttggctcactgcaagttccgcctcccgggttcacgccattttcctgcctcagcctcccaagtagctggggctacaggcgcctgccaccatgcccggctaattttttgtatttttagtagagacggggtttcaccgtgttagccaggatggtctggatctcccgacctcgtgatccgcccgcctcggcctcctaaagtgctgggattacaggcgtgaaccaccacgcccggccaaggtctaactcagtttgaaggcctttgttctgccatttggaaattctctatttcttaggtaataccatctcctaaaaaattctttttaaaacttccatgattcagatggtgctctgttttctcaggggattctcaactttcttgaattctgaatttttctttctcatgttttaaaaacattctcaactgattttttttaaaaataacattccgttgtttgatgttctgtgattttatttttctctagaattactttattttggtcttgttctttactcggattcttcttgtcgtatttctggttgttttttgtttttttgtttttgagatggagtcttgctctcttgtccaggctggagtgcagtggcgctatctcggctcactgcaacctccgcctcccaggtccaagcagcccttctgcctcagcctccagaggaactgggactataggcacgtgccaccacgcctgtctgattttttgtatttttagcagagacggggtttcaccttgttagccaggatggtcttgatctcctgacctcgtgatctgcctgccttgacctcccaaagtgctgggattacaggcatgagccaccacgcccgacttgattgttactattattttaattttatttttttgagatggagtctcattctgtctcctaagctggagtgcaatggtgtgatctgagctcactgcaacctccacctcccgggttcaagcgtttctcctgcctcagcctcccaagtagctgggactataagtgcgtgccaccatgcccggctaatttttgtatttttaatagagacggggtttcaccatgttggtcaggctggtctcgaactccttacctcaagtgatccactggcctcggcctcccaaagtgctgggattacagacaggcatgagccaccacacctggcctgtctagacgtattttaatgtgagagaatagatagactgattggaaatgttgtatataggtagagcttgttgactggtggtccttgctcattcaataaatactttagtatgtaatgtgtataggtgtcagataattcgctttatgataactggatggggaatttttggaagggaaggcaaccattcctaaaattccagaatgaaaaggatgttatacttattttgacaggtagtttattcattttccttaaaaaggaatctttcttgttgtcccattttcagctctttttctcacttttgtttttcttctccttcctgtctccccttctcctttttctttttccctccccccccccttttttttttttttactgctccttgcagagcagggctacacccataggcagtgtgaccaaagtaaccccttcttctcatttctgtccggattttttctcacttttccaggcagttagactctcctgttgtttatgtagttgggctataatcccttcttttgcatattgtaggctgtgaactttttctgctgtattttatcttattttgagcttccctgagacttagtgaaacatctggtccatttatagcctctctctcatttttcctactgttagagatttattctctgttaaaatacctagccgagtgctctggttgtgtcaggaggattgcttgatcccaggagttccgggctgctgtgcactatgccgattaagtgtctgcatcaagttcagcatcagtatggtgacctccaggttgcctgacgactggtgaaccagcctaggatggaaatgggcaggtcaaaactcctatgctgatagtggtgggattgcacctgtgaatagccactgtactccagcctgggcagcagtgagaccctgtctcttaaaaaataatagtaaattaaaatgcttttatcgtcattttagcagataagtcctgtgcttcatctggccctttgaatctaaaagtattttagtatgattttattttgttttattttattttatttattttgagacagagtcttactgtgtcattcaggctggagcgcattggcgcagtctcggctcactgcaacttccacctcccaggttcacgcgattcttgtgcctcaacctccagaatagctgggattacaggcgtgcaccaccacgatcagataatttttgtatttttagtagagatcaggtttcaccatgttggcgaggctggtcttgaactcctgatctcaagtgatcagtctgtgtcagcctccccaagtgctgggattacagacacgagccactctgcccatctatgattttatttttaattaaaattaatctggattgttaattaagagatatcagtatactcttagggattgtggaagacagtgagcttatttaatagtcagcaggtctcttgaaagtaaatgatatcttagggctgggcgtggtgggtcacgcctgtaatcccagcactttgggaggccacgcgggtggatcacctgaagtcaggagttccagaccagcctggccaacatggtgaaaccctgtctctactaaaaatacaaaaattagctgggtgtggtggcgtgcgcctgtaatcccagatacttggaggctaaggagaatcgtttgaacaaggaggcggaagttaacagtgagcagagatcactccactgcactccagcctgggcgacagagcgagactccgtctcaaaaaaaaaaaaaaaaaaaagtaaatgatgtcttagaaacaagccttaaaagatcttaatcttactcttgctaaatgtagtataagtctaagccagcctcagctcttggcctgagattactagtctccttgtttctattctacatgtattctctacacagcagtgagggtaatcattgcaagtaaaatattgtcttacttatttgcttaaatctctcccatagtttccctttacacttagagtaaaatccagaccctttctcctgatctgtaagattgtatgcagtctcttgcctccctagttcttcacccatgttacctactggtatcctacttgtctcctgatttagctacaccagcatccttgataaattattcaaaaagccaagctcattcctcatggccttttagaattggattataaagagggtgaactgcttatcccttcttatcattcagtgctgctcaaaagttatcttctcagggaagattttcctcaccattttatctaaactatggtctttctctcccaaatcactgcctatcctgtatgctgcttttaatttcttcttagcatatatctgaaattatattatgtatttgctaatggtcttttccctattagaatgtaagctctatgagggcaaggactcttgtcttgtttactgctgtattcttctagcataaacacacacacccccttagaacaattctggatacacaatagaaattcagcaaatgtttgggtgaatgaaatggccctaaaatactattttaaaacttgttttctttccaggttatattttcttatttaatgtgtgtaaaaatgtggtggtatgaagttttttggttttaaaaccttcaatagtgagtttttgtgggcacattgtattcataagagctgttaattctagccataactttaaataaatgtattggttgcttgtgtacatgactatctgtaagtaaaatgaaggtctcttagaagttaatacagtttaaccttaaaatctgttctaaaattatttgacatttttctcactgaataagaatgagaaggaggaagcatagtgtagaaaagtagcgtgcagggtagagtggtactggattgtaattatgtaagttaaggaaataacatgctttgcctattccttgtcaccctttttttctgccttatagacaagggaaaaaaaagattgaataaaagagttttaattttaatcatatgtcttatgtgaatattgttttggttatactagttactgaaatgtgtatcatgtcacagttcactttttgctttttttttttttttttttttgagttttgctgttgttgctcaggctggagtgcaatggcacaatcttggctcactgcaacctctgcctcctggcttcaagcaattctcctgcctcaccctcccaagtagctgggattacaggcatgcaccatcacgcctgactaattttttgtatttagtagagacgaggtgtcaccatgttggtcaggctggtctcgaactcctgacctcaggtgatccacctgcctcagcctcacaaagtgctgggattacaggtgtgaggcactgcacctggccacaatttgcttttagatataagccttgtttttgtagtatgataatagattagatgataaggtaaatatccagaaggtgaaccatcaaaggcttagctgctatgttaactaagaagcatttatggaatataaattgttctatagttggtaggttaaaagtttgcttttaaaaataatcatctggatgattctatccttttcctggaattattgttctgtgtagtatttctcaactggggcaattttatatccctccagccccatccccaggtaacatttgccaatgtgtagagacatttttggttatcaccttggggtgtgctactggcacctagtaggtagaaattagagatgctgctaaatatcttacagtgcacaggataatctcccataacaaaaaattatccagctcgaagtgttagaagtgttaaggtactttaatataatgaataacttgtaacagaaaattgaattctaaagtaatagttattagaaagatcagcgtgtttactgattgacttcattggggagattccccatactatttcagtcactccaaactagagtgagatacttgacatggtcttttatatgctgaaacaaaaatgcttttttttcttatagtgaaaaggattttgttggaataattggataatttattacctgctgttaatattgcttcagatatgatgtgacaaggatcaaaataatagttgtctccttgtagaaagtggtacagccaattgacaaagttagatgatgttccctgtcattaaaataaattccatgaattactgttattctcttttgatggcttttttttttttttttttttgagatggagttttgcttttgttgcccgggctggagtgcagtggcgcaatctcggctcactgcaacctccgcctcccaggttcaagtgattctcctgccttggcctcccgagtagctgggattacaggcgtgtgccaccacacctggcaaatttttgtattttcagtagagacgggtttcgccatgttggccaggctggtcttgaactccctacctcaggtgatccgcccacctcagcctcccaaagtgctgggattacaggagtgagccaccgtgcccagccctcttttgatggcatttaaacaaccctcttaaattctttctggaagcacttacaattttaaagatgtaatatgatcaaacacctctttagtcatagagtaattcattcagaagcctggtttgtttatattagtaaattggtgaatttctgtcacctagtcattgtaaatatctattattatttttccattctttgagttttgaaagtgcatttaaatgtttagcagttaattttaataaagttaattacagggctgttgcaagtcctctgcattttgtatctcttcttaggagtattatttttctttttaaattcatattcttaaaaggtatttttaaaatcagtttcaataaaactgaagtttctcttacgcaggatgctgtggggcactgttagtgtataaaataaatttactcttgaccataaatgaaattgtagtctaatggaaaatagcatattatctgatagaggtataaataaaatatagtacagacacagagtggggaataatttaattccatttatgaagctccagaagctttatgtagtttggtatggttagattataggggtgctccttagtagtttggtgtgtcatgatgagaaatgagacctgaaaagcgtaggactatagaatggaatagcagaatagtattcataagtttgtatattatccttgagatgatggagggactattgcaagtattgagtgagataaaatgacaagttttagaaaataaggattttggaaaaactcaccaagtaatgttattgaaaggttgcttgaaatgaaaagatatgtctgtgtgaaaggagatcagtttggacaactcatatagaaagtgatgtgaggccgacactgggaaattagaagtagcagggatgtatgaatgttatagatgctgtggaatatattttgaagaactttgcagccagttaaacagtaaagtaggagaataacaggagagtttaaggccaagcgtatttagttcatgaggtagaaagatgagaaagaataggtttgaaggtgtctgtaccattgtttttacccactttaggctaaatcttaccaaacttaatttttctgatttttttaaagtagcgtttctaagtagaagtaccttggaataactattgaaatacctaggctgggcgcagtgactcacgcctgtaatcccagcactttgggaggccgaggtgggtggatcacgaggtcaggagtttgagaccagcttggccaacatggtgaaaccctgtctctactaaaaatacaaaaaattagctgggcgtggtggcaggcgcctgtaatcccagctattcaggaggctgaggtaggagaatcgcttaaacctgggagccagaggttgcagtgagccaagaccacgccactgcactccatcctgagcaacagagcaagactccatctccaaaaaataaaacaacaaaaaacaaaactattgatacaccttatgaaagtaaggtcttgctaaataatgaaggtctggctaaataataatggcatatccacttaaataagcaaaggaaatctgtataggctgatatgagaagctctgtatgtagatgaggaaccaaagtacatatgtgcatacatatatgctggcatatacctaggtttttttccaccttaattagatgatagaaatagtacttgttatcttgaaggagagagattgatacttaggcttttcatctttttgtactacatgactttagctatgtacatgtaatgtgagtacatcgtaaacatgtgaatgcagtttgaggtgcctgctgagagattccatcaggcggttgggatcatgtctgaaacttaatagaggggattgctgataacccagttagagtagatatacaatgcaaaaggacaagaatgcatcagtagaaacagagaactagtggatttataatagtggaacttttacaggtatgtgacttcatagaaaattacggtaggagaaattcaaagctttgttttatttgtgttaagtgaaactccattttctgtttggtgtaaataaatgtttccattgattgctattgaaaggtggcactgtccttccatagtagtgggttagtgaaagaaattaatactcttgatttttattttttctttttatgagagaggatcttgctctgttacccaggctatggtgcagtggcatgatcatggctcactgcagccttgaactcctgggctcaagccatccatcctccttagcctcccaagaagctgagactacagacatgtgacaataccgcttggctaattaaaaacatttttttttagccaggattttagacaggatctcgctatgttgtccaggctggtcttgaactcctggtctccggtgatgctactaccttggcctcccaaagcgctgggattacagatgtgagccactgcacccagccctcttgatttttctgattagcagtttcaggtggtgatggctacctaactagtatagcattatagaatttatcatttctgagtaccttttttattcttagactttcatgtgtagcaattttatgtttaacttttcattgactatgtttgtaaaagtaaaatttctctaatttgttagaatttacttgtggggaaggagaggttggagtggaacatagcataacccatatataagatacacgtggcaaatatctttttttctaattctttttagtttatctattagttaatgatagcatgtatttcagaatagaggctaagaaccatatagattttaaagatagcaaaatttctggcaagaaacattatatctttttttcatgggtttagcacttagttttagaagaatttgtgattgtttagtctgtgattctgattcagagggaaacctgtctaaaccctgagcaaagaaagaactgtatttgagcatagttctttacatgttttattctgtagccaaagtatatcaggatatcttagccatgatattcatcaatagaattaactcctatgttgtgttagtggtataccagatttgtatgtatatagttgtagaatacattatttgatctctaaaacatagttctgaatgcctttgattcacagaaagaagtctgtgatgaaataaacttgttttgatttttctgtactctaaatcttttaagtaagtcttctatatttgctgttttattttaatgcaaataaagctttcctttgacagtgaccttggctcagtttagggattgattctgaatataggagacggtaaaaaaaaaaaaaaaaaaaaaagtaccatttaaaaagtgggagattttaggctgggctcagtagctcacacctgtaatcccagcactttgggaggcaaacatgggaggatcacttgagcccaggagttcaagaccagcctgggcaatatagtgagatcctgtctctacaaaaaataaaaaactagccaagtgtggtggtacacacctgtagtcccagctactcaggaggccgaagagggaggatactttgaactctggaggtggaggttgtagtgagctgagaccgcaccactgcattccagcctgggtgacagcaagaccttgtctcaaaaaaaaaaaaaaaaaaaaaaaggcggtgggaagattttgacattattgcattcatttgtttcttaactttccgtctgtagcttatctgcttctataattgtcatcttaaaaactgtcatacctcatctggaagaatttttattgaataaaggcataacagcatatgctaccataagctatgttaaattctatatgagtacatttcaggatagtatgttattgtcatagtaaaaggaaagagttgcaattaatgaataatataatgctttgggccttgcagcacttcctgttcatggctgtacctgatctttttgcagtttgtctgtatttagctttatgtctaattgaaactgtgtctgtagttaattatttggctgtatgtgaaagttcgtttgaggaaaggagagggttattcgtattctaaaagtgtatgtgtactatataattgatgttgacagtatggtaattagagtttttttatctggcatctcttaaaagtaacaatttttaattctattatcagctttaaatatagaatgtataatgtaaatgaatttatattttaaaatttattgtgtcttgatactcttgaaattgactacatttaaattctttgcacatgctaatgtctgtgagaatgattcaataaaataacaaacagtcatatttaggtaatgcatttggtttactcattttttattttaatagagccctgtgcagtagagttggtttttttaataatgttactgcacagtagtctagcaactacttatgtaaacagtgtgaaggtttttatacttctgccagaggacaacgtaatatgaaacaccgagttttatttgtctctacagagagtagtagtgtctttcaggctgggggaagggagatttcttatactttattccctaaggatagttatttgaatataaatacttaaaatcttttcatttctgactttgccactatgtgacctcagcaaagcccttgattttacataatttccacatcaaagtcagggataataccctttgcttcttatcttaaaatattattttaagtattaaataagaaaagtacatatcaaagtagttagaattactattttaaaaagatttgcattagtgaatatttggtagacaattcagctaaccgttatttagagtctaatgtggtgaggtaaaaaactacacttgatactcagctgtttatagaacagaactatcctgatgattaattataaaacatatccccaatgacagtgtgctagcattatattcccacagcagaaagtttttgtatgcttgggattttagtttttgcaataaatctggggcgtatttggaataataatgatatgtatttgagcatttgatagcatgtttagaaatcagtttttgttttgatggcctactttgccccgagtttgtaagagatcaagtgctactagtgttaggcattagtgaatagatgaatgagataagatttgcctgtgagtcaaagaatgtacgatctgcaaataccttcattgctaccagaccttacatatcttacaatttttgtcttagtactcagagtagataagcagtggcattggtaccttctagtgtgtaaaaattgtttatttcaaagtacaagatagtgtattttagtagtactaatgcaaaaacatctcagtctgtgatttttagatttcatttattcactagcaagtattgacacctattatgtaccaggtactctaggcatctgtgctaaattagtgaacaaaggttagacccctgtccttgtggagcttttatgttctagtgtgagtgacagtcaactatgaatataataaattatgtaatatgttaaaagataaatgctatgcaggaaaatagagcagggtaagggggattattattgaggcaagtgggcatgggcatattgctatttaaaataaagtagttatgggctcataggtgacatttaagcaaagacttgaaggaagtgagcgagttggccatgcagatatttggaaggagaatgttccccataaaagaaatagccaggaatgggtctggaacccattgaggaacataaaggaagcccttggaagcagtataagagaggactagaatagtaaaagatgaagaggagaagaacaagatgatgggaagttttcataggatggtataaggactttggtttttttctcagagtgaaatagtcattgcaagattctggccatgatctgactgcaagcttggctgctagctactgttaggacaacctgagaaccttagctttgtaaacccgagagaataggaatttgagagtctaaacatgtcttatgcaaaccagaagctaatgattctgtgttcacactcaccgagcagtcgggtcttcagagagaaaaaactcctgatgctttccagggttctttggtatagatcagcttgcttcttgttgtggcatccctcttttatccttagatttcagctttctgtggtctgtcagtttccactagctcatctttccaacttccttgttgtcttctcttttattctgtcatctcctgtcattttattggttattttaggagaataaagagaaacaatttcttagttgctgtgttgaaccagaagactaataacttaaaaattgatgtgccaatgtgattagaaaactcagatacttgcactgaaacttcactttccattgtgaaacatcttgccagaattaatagtaataatgctattttcatgaaacacaaatcaggccttcaaaaatttaaaacttaaagtatatctactcatggcagtaaaaaaaaaatacataatcactttccttgtataaatgtataaattgtttaaaagtattttactcacttttataaagctcccactttgagtcactgtactggagcagtttagatttaagagcccctttcagggaatggatttgtacaaaatagtgtgcttgaggacttgagaaccgtgagttacctaaaccgtgaattacctaaagacaacatattttggtagaaagatcatatagttaggaaacttggattttggccccatttctctatggctaaattttagacttcaataaattatttaatattttcatgcctcctcatttctgaaataagggattgtaggttagataatctttaagtaattctaaaaacattatgatacttaacgtcattttggaaatttttaatgcttatgtggataattaattttttttaatttttttatgcaggttaatggtgcaatgtaagaaacctttaaaagtttctgatgaattagtgcagcaatatcaaattaaaaaccagtgtctttcagcaatagcatctgatgcagaacaagaacctaaaattgatccatatgcatttgttgaaggagatgaggaattcctttttcctgataaaaaagatagacaaaatagtgagagagaagctggaaaaaaacacaaggtaagagaaatcacagtacaccaaagggtcactgttgattttgtagcactgcatatagtaacactcttactaccacagttatctcacttcttttgtcttagaatagaaagagtaatcatttatttagaaaaacttatttttgcccggctgcggtggctcatgcctgtaataccagcacttggggaggccgaggcaggcagatcacctgaggacaggagtttgagaccagcttggccaacatggtgaaaccctgtctctaataaaaatacaaaaagtagctgggtgtggtggtgtgcgccttgtaatcccagctattcgggaggctgaggcaggagaatcccttgaacccaggaggcagaggttgcagtgagccaagatcaggctactgcactccagcttgggtgacagagcgagactccgtctcaaaaagaaaaaaagaaaaatgtatttttttgaatgggtaaatcaagcacatggtaccaattatagctgacctctgataatgaaaatattttgttgtttaaaagtttctgggttggataaagggcatattaaacttgtcataattgaaatcaggacatttaggtaggctattttgacagtgattttaaaatatgttgtaagtgaattaccagttttcaaagatacaataaaatatacatcactgagtttaaaaaatatgtgctatttttgaatatgtgattcaggaacttacagtgcacctagaagtaaaaatgaagtgcaagatatatagttattagaataaaatttaaaaatcaaatatatgagaatttgttaagattaagataactttgctacacaggaattatgtcttatatacaaaatatgaaaataggctagacacagtggcccacgcttgtaatcccagcactttgggaggctgaggtgggtggatcactaggtctggagttcgagagcagcctggccaagatggtgaaaccccatctctactaaaatcacaaaaattagctgggtgcgatggcgggcgcctgtagtcccagctactcaggaggctgacacaggagaatcgcttgaacccaggaggcagaagttgcagtgagctgagatcatgccagtgaacttctgcctggtgacagagcaatactccgtttaaaaaaaaaaaaaattgaaatctgtaaagttatgaaaaggatccaataatacgtgtgagtttttttttttgtttgtttgtttgttttgagacggagtttcgctcttgttgcccaggctggagtgcaaagttatgatcttaggtcactgcaaccttcgcctccctgattcaagtgattctcctgcctcagcctccctagtagctgagattacaggcatgcgccactacgctcggctaattttgtgtattttcagtagagacgagattctgtctctaatacactctcaacctaggagcaagcatctacgtactagcgcagctaccacatgttacggtcctaaaccaatccccctcctctccatgttggtcaggctggtcttgaactgctgacctcaagtgatccgcccgcctcggcctcccaaagtgctgggattacaggcgtgagccaccggtgcctggcccccaataatatgtttaatacaaaattagtttcacaaagttttacttagccctactatatgccaggtacttgaaattttgtctttttggaagtatgagagtagtggtagttgggaaggctgcaggtataatagaaagaacgtgaaccggctgggtgctgtgtctcacgcctgtaatcccagcactttgggaggctgaggcgggcagatcacctgagatcaggagagcgagatcagcctggccaacatggcgaaaccccatctctgctaaaaatacaaaaattagccaggtgtggtggtgcatgcctgtaatctcagctgcttgggaggctgaggcgggagaatctcttgaacccaggagggggaggttgcagtgagccaagatcatgccactgcactctagcgtgggtgacagagtgagactctgtctcaaaaaaaaaaaaaaaaaaagaaagaaagaaagaaagaacatggactttggaatttgacagatttaggataaaatttcagctctcactgtttatcagccatattttctggggcacattagagtctctacttttgtctataagataaacataccacaggccaggcgtggtggctcatacttataatcccagcactttgggaggctgaggtgggcggatcacaaggtcaagagattgagaccatcctggccaatgtggtgaaaccacatctctactaaaaatacaaaaattagctgggcgtggtggcatgtgtctgtagtcctagctacttgggaagctgaggcaggagaatcacttgaacctaggaggcagaggttgcagtgagccgagatcgtgccactgtactacagcctggtgatagagcgagagtccatctcaaaaaaaaagtaataataagcatactacttacttgttaactgtaagaatcagtgataatgtatgttaaacacttagctggatgcctgacacacagctcctcaataattggtagattttattgttggtaaattatatatttcagcctaacatgaaatatttgtttgcaggtagaagatgggacatctagtgtaacagtgttatcacatgaagaagatgctatgtcattatttagtccctctatcaagcaaggtaaaatctttatttcctaatgaaaatattgcattccaggattgttactacagactgatctgatattgttggacttctaatgttcctttttgtataattcattatgtttcatagaaaggaatctttcttaaatgatgggtttattggttatcttttattggaagaagcaagttcaggtgatagaatttgtgtttttaattgttgcagcctctttcctgtttttacatataaaaatagttttctattaaaaactcagttttatgtaatagatttctcacccccttctactgggaattacgtgaaaggaagtaaaagaatgaaggcacatattgactggaaagtgattgagaaaaggccattgttatactatgccaaggctatggttatactctccaggaaaaacacacttgaaaaaaatgggagaaagatactgatgtccagttggttgacagtagagtgtttcatcatcataactccaagtgtttgctctctgaagacactactttcaagcctatagcaatgggggttacaattcgaagactatcagttctcttcatacctgtctccattgtttaaattataattgaaaaatggatctgggcaccgtggctcacgcccgtaatcccagcactttgggaggccaaggtgggtggatcacttgaggtcaggagttcaagaccagcctgtccaacatggtgaaacaccatccctactaaaaaaatacaaaaattaggccgggcacagtggctcacacctgtaatctcagcactttgggaggccgtggcgggcggatcacgaggtcaagagattgagaccatcctggccaacatggtgaaaccccgtctctactaaaaaaatagaaaaattagctgggcatggaggcacgcgcctatggttccagctactcgggaggctgaggcaggagaatgcttgaacctgggaggcagaggttgcagtgtgccgagatcatgtcactgtactccagcctggcgacagagcgagactctgtctcaaacaaacaaacaaacaaaaattagctgggcgtggtggtgcatgcatgtagtcccagcaacttgggaggctgaggcagcagaatcgcatgaacccaggaggcagaggttgtggtgagccaagttgggctgggcacaatggcttacacctgtaaggccgaggcaggtggatcacctgaggtcaggaggtgaagaccagcctggccaacaaggtgaaaccctgtctctactaaaaatacaaaaataaagcatgtgtggtgccaggtgcctgtaatcccagctacttgggaggctgaggcaggagaatcgcttgaacccaagaggcagagattgcagtgagccgagattgtgccactgcactgcagcctgggtgacagagcgagactctgtctcaaaaaataaataaataaataaaaattgaaaaatgatttagaataagctcaactatgattgtgttgtgacatagaataaataggagtaaaatgttttaaagttttcacctgtaaaatgaggagataaggtcattgcctaaggtccttcagatctaaaaccacaatttctaaattaaactttactggaattttgctgtcattttcttcccacacacacaagttaagagagctgttctgaggccactaattcaacaaatacttagttagcacctgttatgtgtaggtactgtttgggtattggggacacagtggtcaagactccactttgaatatgtctgacttaaactccttgtgaatggaatagagagacatagtatagtaattcatttacaaaacccatttaacttgtaaaataatttttttaattgacaagtaaaaattatatatatttatggtatacaacatgatgttttgggggggagtgtgtatatatatatatatatatatatacacagtgcgccaagtgtgtgtgtgtatatatatatatagtgagaccctatacatatatacacacatactaaaaaatatatatatatttacatttttttaacattttactcatattctgtgtcacaacacagttacagtttatcttattctaaatcatttttcagttataatttaaacaatggagactggtatgaggagaattgttagtctcctattgtaaccccacaactataagcttgaaagtactgtcaagtcttcagtgagcaaacacttggaattattttacatatatatgtgtgagtgtgtatatatatgtgtgtgtgtatatgtgtgtgtatgtatatatagtggaatgggtagatcaagctgtttaacatatgcattaccttacataccttttttgtgcgtgtgggtgagaatacttaaaatctactttcagcaatttgcaagtatacaatatgttattattcactatgatgtacagcaaaatccatttaacttttgatgtgggcaaagtaagtcatcttctggtgtgtgttttcgatgacaaagttttaatatttggaataaatagagggtcagtctgtggataaccaaaaataagaaaaaaatctatctgaacaatgaacaaatggtctaggtagcttgaaaattcaacagtttggattctttgccggagtgatctacagattcagagcaatccctatcaaaattccaatgacacttttcacagtaatagaaaaaacaatcctaaaatgtgtatagggtcacaaaaggccctgaatggctaaagcagtcttgagcaaaaagaacaaagttggtggcatcacactacctgatttgaaagtctgctgcaaggccaagtgtcatggcccatgcctataatctcagtattttgggaggccacagtaggagaattgcttgaggccaggagttcaagaccaccttggccaacgtagtgagaccctatctgtgtaaaaacaataaataggccaggtgcagtggctcatgcctgtaatccgagcactttgggaggccaaggtgggcagatcacctgaggtcaggagtttgagaccagcctggtcaacatggcaaaactccgtttctactaaaaatacaaaattagccaggtgtggtggcgtgcacctgtaatcccatctatttgggaggctgaggcagaattgcttgaatctaggagtcggaggttgcagtgagccaggatcgctccattgcactccagcctgggtgacaagagtgaaactccatctccaatcaatcaatcaatcaaatgttaaatattttaaaaattaaaatatatggctgggcgtggtggctcacgcctgtaatcccaacactttgggaggccaaggcaggtggatcatgaggtcaggagattgagaccatcctggctaacacagtgaaaccccgtctctactaataatacaaaaaatcagccgggtgtggtggcacacacctgtagtcccagctacttgggagctgaggcaggagaatcgcttgaatccgggagacagaggttgcagtgagccgagatcacgccactgcactccagcctgggcgacagagcgagactctgtctcaaaaaaaaaaaaaaagctggattcatggaagtagaaagtaaagtggtgattaccagagactgggggtaggggaatggggatggccaggggacacaaaatttcagttgggaggaataagttcaagagatctattgtaaattgtggttactacaattaataatagattgtatatttgaaaattcagagtagattttaagtgttcccaacataaaaaaaagtacctgtatatgaggtaatgaatatgttcagtagcttgatttagtcatttcacaatacatacattaaaaaaaaaaacgaaaaaactcggaaacaaattgggttgtttgggctacttacctatgctaggatgttccctgggatataggaaacatgtaagccccttcttgtgcctgtagttcagctttctcaaaatgtgagacatatgctacattctggagtatctccaaggtggagcttcaaaatcttggtttttagtaagtatcttagatgatttttacttttaaaatttcaaaggcacaactctagtgaatctttagaactgacacaccagagacactggggaagtgacttttatctttctgaaaacgaggactctcaagtcagttaacagagaatgatttggaaggttatgtatcaaattgtttttcttgtgcaggaatatattgggagtttaattttcattgtaattggtatcatgtttttgttaccctaaaacagggcgagagggtaggaaaataaaattgtagtacggtaactaagcggtaatatttatctagtacttaagcacctagtactgggcgaagcacattaccaacattctattacattttattcttggtattgaggcacagagacattaagtaatttgtcgagggtcatactgttagtggtggagctgggattcagattaaagtctgtctggcccaagagtcagctcttgatcattgttctgttcttcgtttacatttcagaaagatagaaaaatacaggccaggtgaggtggctcacacctgtaatcccagcacttcagaaacagaggtgggcagattgcttgagcccagaagctcaagaccagtctgggcaatatggcaaaaccccaactcgaggaaaaaaaaaaaaattaactgggcatagggtcacgtgcctgtagtcccagctactggggtgggaggattgcttgaacccgagaggtcaaggctacagtgaggtgtgattgcaccactgcatttcagcctggtggtgacagagcgagaccccgtctcaaaaaaaagaaaaaaaaattacaagtatgtgtatgtgtatttaattgtttttctaatagtatttatatttttatttgatgcattaattattcatgtagagtacttagctattttatggattacctgaccttatagtgagcttcctgggaaagatataatcatttatttataacttttttttctataaaaacactttctcgattttaaacaataaagtacaatttcttgttgcataatccccttatgaccttaaagttatatgtctaatttaaaaagaatagtacttatgtggtcattagtagcaggtttttttttgttttttgtttttgtttttaagatggagtctcgctctgtctcccaggctggagtgcaatggtgctatctcggctcactgcaacctctgcctcctgggttcaagcagttctccgtctcatcctcccaagtagctgggattacatgcgcctgccaccacactcagctgatttttgtagttttagtagagacggggtttcaccatcttggccaggctggtcctgaactcctgacctcgtgatccaccctcctcggcctcccaaagtgctgggattacaggcatagtagtagcagttttaattttatttttctgattgacttttgtagatgctccacgccctactagtcatgcccgtcctccatcaacaagtttgatttatgactcagacctggctgtctcttatactgaccttgataatctcttcaattctgatgaagatgaactaacagtgagtatctcattaatgaataggattataatttgttttccttgattttattatttttttattttttagaagtgatttgtgagtttaatactatgttttagccctgaacaataggaaatatagtaaaacctcattcattgatttcttttttaaatctcatgtttgagtagtcttgccatagtgtcatctataaactttgagggttttgtttctccttttgtttttacatttgggggacacatgattaaccttaatttgagctctgccgtatgttctgttttgtagttttaggaagcagaattattttcctatttgattctgtagtttgagaaatgactctggaatttactcattcagagaacacatacataattgacattaaagttatttgctttgtcaatttattaaggaataccagctcttttgaatttgttttgcatcacagctattataagacagatacatgatataacaataaaagaggaaaaaaataatatttaatctttaacacccatttgcagagaaaggtgaagataaaagaaattaaagcttaaaatgagattccctagaatgtcaagtctctgtcaaattaatgaattgggtgctgcattatcataaaagggaattccttttcatctgcataaaggtagcttggaaacttctatggtacatttgatctttcctttcctatataatatgcatttagtcctctctcaacatatatatctctatatgtgtgtatatgtgtgtgtgtacatatacatatatatatattgcagatacataaacttttactgtgtatcccataatgtagtacattttagggcaccctttactaggcaactatatccttgaatgctttggcacattcatactttctctctactaccattcctgtatcagctgtggttcctctgaaataaaagattgtagtcagaacgtggtctacatattaatatttatcacagactgtctaacagaagacatggaacaaatgttagctctgaaaacactggtaagagcttggagatagtaaaacttgtttgttcaatctactaaaagttaggaactctattgctttgtcattagatcttctgaagtttgtacttagttttacctgttaacagtatttttgcaggaatagggagactattaaaacaaggtgaaagtataaataagaatttagataggtgagtgattgattatataggaaactttaatgtgttcaacttaaggagacaaatgctttctctgcaagtatcttttaccaagaagcatttctaatgttaattacaaccccttcttattgcaggttttcttatttttatttattttaagacaagagtctcattgtattgcccatgctggagtgcagtggtgcagtcctggctcactgcaacctctgcctcccaggctcaagcaattcttgtgcctcagcctcccgagtagctggaattacaggcatgccccacccagctaattttttgtatttttagtagagatgaggtttcaccatgttggccaggctggtctcaaactcctggcctcaaattgatctgcctgcctcagcctcccaaagtgctgggattacaggtgtgagctaccatgtccggcctcttattactgggttttaagttaaggttaaccttacttctgtgtattttgaaagtattggtcattttctttggaggaactttttccttttaatttggaggcttaccaaataaattaatctggagtcagtgattaagaaatattttatatctttcaacactagtatgtatttggctgtatcacagattcaaaatactacttttaatgaatgggctttactgttaagttatatctgaatgattactattttgagatcacattggatgtaaaattttagataaatatgtgctttttttaaatagcctggatctaaaaaatcagcaaatggatcagatgataaagccagctgcaaggaatcaaagacaggaaatctggacccgttatcttgcataagtaagcttccctcatctgtgctcgagataaatttgcgaacttttaatctcaacaaagctccccactccttttggtttaaacacagattcgcctatttttagtcatgttaaaatgtatgtttttattaaatataggcactgcagatcttcataaaatgtatcctacaccaccatcattggaacaacatattatgggattttccccaatgaatatgaataataaagaatatggtagtatggatacaacacctggaggaactgttctagaaggaaatagttctagtataggagcgcagttcaaaattgaggttgatgagggattctgtagccccaaaccttctgaaattaaagtaagtatgttttttctagaaaaataattcacttcctatattttcttatagaattaatttgttgctatagtcaaaaattattttatagtggttgcggttttgtagctaagttgaggactgaattattgttgtcactattaagaatgcatttaagaaaataatagaattgtatttagattttattctgtttaaagaaaggaaaaaaggtccagagcctgtttgtttatttattttttcctcctagaagataagatactgaaaacctaccatctttatattgtaggatttttcttatgtctataagcctgaaaattgtcaaattctagtgggatgttccatgtttgcacctctaaaaactctaccaagccaatatctgccccctatcaaattgccagaagagtgtatttaccgtcagagttggactgttggaaaattggaattgctttcttcagggccttcaatgccattcatcaaagaggggtatgatttatgttgttacaatagtatgtgactgcttatacagctttaatttttttttcatagatttacctggtatgctggaaaaataaaattggtttttgaaaattctaaaaattatttctggttaatcaattatagtgattggctgggagcagtgaatcacgcctgtaattcccatactttgggaggccaaggcaggcgtatcccttgaggtcaggagtttgagatcagcctggccaacatacgaaacctcgtctctactaaaaatacaaaaattagccaagcgtggtggcgcatgcttgtagtcccagctacttgggaggctgaggcacaagaatggcttgaacctgggagtcaggcattgcagggagccgagatcgcaccagtgcactccagcctgggcaagagtgagactttgtctcaaaaaaaaaaaaaaaaaggttaattgggtatggataaactattaggaaacttaagactattatgcttgatttgtattccgaagcaccttttcttttgggctgcaattttaaattgctcccatttttacatttgccatcttttccacacttttcacattttaacatctctgacttggtcagtttcaactcaaggctaaaagaaatctgaatctgagatgtcttataagtggtagcattttaaaattaccatttttccctttttacacatgagcatctctaaaatcatttttctttttttatagtcagtagcatcttagaatcaaggaaatataagtatttctagtaaacaaaatttatagatagtaaatatggatgtctaggtatgcattagtgtatagagtgcttattaatgatttttgaacttgttaattgatccttagtcaacaacaatcacttagagtagatatgttaaccagaaataagaattgactgtgcttgtaattcttgcaatacttgtcctttcataattttctatgtaattgaaaaacatttgggacgtttttagttgtatttcacattactaatatgttcctttatatatatatttgatcttcttttaccctggtgatgatagtgatggaagtaatatggatcaagaatatggcactgcttatacacctcaaactcatacttcttttgggatgcctcctagcagtgcacctcctagtaacagcggagcaggaattcttccttctccatccacccctcggtttccaactccaaggactccaaggactcctcggactcctcgtggagctggtggacctgctagtgctcaaggttcagtcaaatatgaaaattcagacttgtattcaccagcttctaccccatctacatgcagaccccttaattctgttgaacctgcaactgtcccttccatccctgaagcacacagtctttatgtaaacctcatcctttcagaatcagttatgaatttgtttaaagactgtaactttgatagttgttgcatctgtgtttgcaacatgaacatcaagggtgccgatgttggagtttacattccagatccaacgcaggaagcacaatataggtgtacctgtggcttcagtgctgtcatgaacagaaaatttggaaacaattcaggattatttcttgaagatgaactagatatcataggacgcaatacagactgtggcaaagaagcagaaaaacgttttgaagctctcagggctacctctgctgaacatgttaatggaggactaaaggaatctgaaaaattatctgatgatttgatattattgctacaagatcagtgcactaatttattttcaccctttggagcagcagaccaagatccttttcctaaaagtggtgtaattagcaattgggtacgtgttgaagagcgtgactgttgcaatgactgctaccttgcattagaacatgggcgtcagttcatggataacatgtcaggaggaaaagttgatgaagcacttgtgaaaagttcatgcttacacccctggtccaaaagaaacggtaaagtatgccaataaaatacttttttgtttgcttatttccctttagttacattcttaggaaaaagtaataaaggcagtttcccatgtggcaaatacatttaaagttggacttaaaactctttatggatgatgtttttaaagggagaatttcttagcagtttagtttaatttcaccaataaaagtatggttattataaatctgtaattatatacttatgtaggaatatgaaaggcacattccatatatttattagcataacattgctagtggtctgctttattcaacattctttcactcattaagtatttactgggcaccttgtatgtgccaggtattagcctagattcactgttgaacaaagcacacatattctttgccctttttgaatctataatttagtggagaaaataggaaataaacaaaaaagcatataatagatagtaagaagtaatttggaggaaaagcagagtaaaacagaacaagacaccacatatgtactattttagatgtatggtcagataagatactactgaggagatagcatatgggaaaactcctacataacatagaatatgagctatgtagttaaatgagggaagagtgtttcaggcagtgcaaagaccctgagggagtattttgcttttacatgtttgaggaacattaaggtgactgatgctgctggaatgctttgtgtgatagggagactggaaggagatgaaatttaggaggtagccattcaccagcatcatttagagtcttatagaccatgtaaggcctttgtggtttatactaaatgtgatgggaagctattgaacagttttgacaaggaaagtaacatgatccttattctgattgttttttaagagatctctcagtctggcacagtggctcatgcctgtaatcccagcactttgggaggctgaggtaggcaggtcacctgaggtcaggagttcgagacctgcctgaccaacatagtgaaatcccgtctttactaaaaatttaaaattagctgggcttggtggtgggcgcctataatcccagctactcgggaggctaaggcaggataattacttgaacctgggaggcggaagttgcagtgagccaagatcgcactactgcactccagcctgggcaacaggagtgaaactcccatctaaaagaaaaaaaaaatggctgggtgcggtggctcatgcgtctaatcccagcactttgggagactgaggtgggcagatcatgaggccaggagtttgagaccagcctgcccaatatggtgaaaaatacaaaaattagccagcatggtggggcgtgcctgtggtcccagctgctcaggaggccaaggcagaggagttgcttgaacctggggggcggaggttgtgttgagctgagataatgccactgcactccagcctgggcaacagagcaagacactctgttgctattgtgtggaaaatagcgttggggtttggaagtagtgaaagtgagaacagaagcaggataaatcagttggaaggcagtttcagtagcttaggtgaaagatgatggtagcttagacaagataagaggccagcgagatgtaagtaataggttttaggttatttgggaaatagaacctacagggtttgccaaaagacgtgtaaggaaagatgaggcatcaataatagcttgagcacctgggtgaatggtagtactaactacagaggagggaaacacgggggagtaaatcagatacacatttggagataatatgttttaaattcagaggaatgattgggtctggagatagaaaaattttgtgtgtgagttattatgaaaagctgtggatctggatgaaataaactgtagagtaattgtagatagagtagtacaaggatggagctgacatttataagtggggagggagaaaaggcaccaggaaaggaaattgagaaggaggttggaggaaaaccaagggagcatggtatcctagaaatcaggtatagggaatttttgtttgtttgtttttgttttgagacagagtctcgctctgtcaccaggctggagtgcagtggcgtgatctcggcccactgcaacctccacctcccgggttcaagcaattctcctgcctcagcctcccaagtggctgggactacaggtgcacgccaccacacccggctaattttttgtattttagtagagacgaggtttcactgtgttgcccaggctggtctcgaactcctgagctcaggcaatccacctgcctcggcctcccaaagtgctgggattacaggtgtgagccaccgtgcctggcccgggaatatttagaagagagtgatcatctctatcaaatacttcgatacattaaggtgaaaactgagacaggctattggatgtgaccaaatagaagttggtggtcaccttgataggcagtttcagtcaatctgattggagtgggttcacaaaagaacgggatgagaagcaaacttagacaattttctggggacttttgctgtaaatagcagagaaattgcataatagggttaaaagagaggtttattattattttattaaaggtgcattgggagtgatcctatagaaaggaattttttttaattgacagatatggcttatggctgtaatcccagcatttgggaggctgaggcaggcagatcatttgagcccaggagttcaagaccagcctggtgaacatggcaaaacccatctctactaaaaatacaaaaattagctgggtgtggtagcatgcacctgtagtctcagctacttgggaggctgaggtgggagtatagcttgaacctaggaggtggaggattcggtgaaccatgattgtaccactgcactccagcctatttgacagagtgagatttttctcaaaaagaaaaaaatggccatgtttgcagggttgagtaatcatgatagtacagatggaatgttatatggcttctgaaaatgaattacagttatgtataacaaatagatgaatcttagtgatactattgaggagaggaagagggaacaagtcccagaagattacatatagtcagataccctttaaaaatacctctttaatgtattaccgttaataaagttttgaaacaagcacaactaaatgtattatttacatgcacataaaattgagaatattggttaattcttgaaatttcacatgtgtccaaaaatgaccaagagatagggatagggagaaacatttaataagatcgtttttggtaatgttctagttcttgggcagtgagattacagttgttcattttattattaaagaaaatttttgaaatgtaagaggacaacacatggaccagtgattaagttcatgtatatgacagtatcagcatttatccaattattcattctcagggaccaaatttaaaaagggaaagacacaaataaatatcataggtattcaaaaaaaaggaaagattattttaagccatatagagtagttaagatcataggctgtggactcagactgcctgggtttgaaacatgactctagcactatatactaccatgactctagcactatatactacctgctaccttgggccaagttagttaacctttctgtgccttgatttcttaaaatagggtcaataatagatttactttacagggtattgagagaatcaaatgaaatacagagcagttgatccgcccaccttggccccccacaaagtgctgggattccaggcatgagccacccaggagtttgagaccagcctgaccaacctagtgaaaccccatctctactaaaaatacaaaaattagctgggcatggtggcgcatgcctataatcccagctactcgggaggctaaggcaggagaattgcttgaccccatgaggtggatattgcagtgagcccgagatcctgccattgtactccagcccaggcgacaagagtgaaactcggtctgaaaaaaaataaaaaaaataaaaagcagttttggaggttgcaatgagcctgagatcctgccatttcgctccagcccggcaacaagagtgaaactcggtctgaagaaaaaaaaaaaaaggcagtttttggcacatagtaagaactcagatgttagtagtggtaatgacagcagcaggaggattagtggcactctttataattattttgtttttaagaaccaacttatttgccaaataatggaaaatattgagctttacctggtatatgttttttgaataacagtaagcactgatgtaaacagaaagctgcagacttgaaaatgaatttcttaacaacttgtccaaagaaaataatttagtacaagaaagagagaaatggggctgggcaccatggctcacctctgtaatcccagcattttgggaggctgaggcgggagtattgcttgagaccaggagtttgagagaagaaagaaaagcctttatatttcaattaaaaattttcagtattaaaaacaaataatgggccgggcacggtggctcatgcctgtaatcccagcactttgggaggccgaggcaagtggatcacaaggtcagatcaagaacatcctggctaacacggtaaaaccccgtctctactaaaactacaaaaaattagccaggcgtggtggcgggcacctgtagtcccagctactcgggaggctgaggcaggagaatggtgtgaacccgggagggggagcttacagtgagcagagatggtgccaccgcactccagcctgggcgacagagagagactccgtctcaagaaaaataataatgttggaaaacataaatgtgcaatattagaatactttgattaaattatagcagcatcatgaaatggtggcaagctcctgcattagagcccttggcatgtttcctccctcttggatactcgttttccagatatttatgtggataactctgtctcctttaaatcttgtcagatatcatcttctcattataaaaatgcaaacccttcttcttgttctccatcttgctttttttccatagtgtggactattaccttctaacataataaaatttattaattgttgtttcttacccccattaagtacactctttgcaaagttctgtgtaaaggcaaagatttttgtctataatctaaacacctagaataatgaacacagtagatgatcaggatattaaaatagatgtttggatttgtttatttagttttaacatcttgaaagaaggttatgtttgaatgaatttaaaagtctacaaagtatagtttgtatatatatgtattttttctgttttttttgtttctttgtttttgagacggagtctcactctgttgcccaggctggagtgcagtggcgcgatctcggctcactgcaagctccgcctaccgggatcacgccattctcctgcctcagcctctccagtagctgggactacaggtgcccgccacatgcccagctaattttttgtatttttagtagagacgggtttcaacgtgttagccagaatggtctcgatctcctgacctcgtgatccacctgcctcggcctcccaaagtgctgggattacaagtgtgagccaccgcacccagccagtatagtttgtatattttaatgacaacattaattttgttgaagatagacaaagctctgttctaattataaaaaatacatacttgctgaacaaaaattaagaataccatacaattcacccatttaaaatgtacagttggctgctttttagtatgcagagttggacagtcatcaacacagtgggttttaaaacattttcatattaaaccccctacccgttagcagtcactccctttttccgtccaaccttctttcctagctatagacaaccactaagtctattttctgtctctctagatttgccgcttttggatattgcatatcaatcgaattatatactgtatggtcttcagtgactggcttttttcgctttccataatgttttcaaggttcatctatgctatagcacatattagtactttattgccaaataatattccattgtatgaagataccgtattttatttatccattcattagttgatggatatttagattttttccactttttggctattatgaataaagctcccatgaacatttgtgtacaagtttttatatggacatgtttttattactcttaagtggattcactgagtcatattctgtttaatctttatttatttattttttttttgagacggagtctcgctcttgttgcccaggctggggtgcagtggcgcaatcttggctcactgcaacctccacctcccaggttcaagcaattctcccgcctcagcctcccaagtaactgggattacaggctcctgccaccatacccagctaatttttgtatttttagtagaaatggggtttcaccatgttggccaggctggtctcaaactcctgacctcaggtgacctgcctgcctcggcctcccaaagtgctgggattacaggcatgagccattgcgcttggcctttgttttgttttgagacagagtctcactctgtcatccaggctggagtgcagtggggtacgatcttggctcattgcaaccaccaactcccaggttcaagtgattcttgtgcctcagcctccctggtagctgggattacaagcatgcaccaccacacctgactggtttaatcttttgaggaaccgccagattgttttccatagcagctgcaccattttacataactaccagcaatatatgagggtttcacttacacttgtcacattgtttttcttattatagtcatcttataatcaaagtatctcattgtgatactttgtgtgaagtagtatctcattgtggtttcatctgcatttccctaatgactaataatgttgaagattgtttcatgtgcttgttgtccatttgtatatcttctttggagaaatgacttttcagattttttgcccgtttttaaaattaggtttttatgtattgttgaatcctgagttctttatatatcttggatacaaggatataagcccccttatcacatgtgtgatttgcatatattttctcctgtactctggattgtcttttcattttttttttttttaagatacggggtcttgctactttgcccaggctggtctcaaactcttggattcaagggatcctcccgctgcagcctccccaagtagctaggactgcaggggcctactatcacactcagcttcttttcactttcctttttttcatatctccataggatgtgaaatctttttactttcttgatggtattctttgaagcacaaacatttttaattttgatgaagtccaatttattttttctcttgttgcttgtgcttttgatgtctaggtcaggacctaacccaaggtcttgaaaatttactcctattacttttttgaaataactttgtagttttagctcttatatttagatctctgatccattctgaattttttgtgtatagtatatggaagggttctgacttcattcttttgcatgtggatatctagttgtcccagaatcatctatggaaaaatgttatctttaagttgtcttggtacctttgtcaaaaatcaatttatcataagcatgaggtttgatttctggattttcagtttatttctattgattgattatcctccatgatcactcctttttttttaacttttaggttatgggtacatgtgccaggtttgttatattaagtaaaaggtaaacttgtgtcctgggggtcagcatacagattattttgtcatgcaggtaataagcatagtacttgataggtatttttttgtgatcatctttatttatttatttttgagaaagggtctcgctctgttgtccaggctgaagtgcagtgttacgctatcatggctcactgtaaccttgacctcatgggttcaagtgatcctcccacttcagtctcctgagtagctgggaccacaggcgtgtggcaccatacccagctaactttttgtagagacagggttttgccatgttgcgcaggctgcctgtgacctcctaagctcgagcagtctgactgcctcagtctcccaaagtgctgcaattacaggcatgagccaccacccaagcccggcccgttagcattttcaactactaagtagtattctactatgtatacaaaagtttatttaagcatattacatattaagtattgtatttggaacttagttttatctagttccgtacacttttttttgtttttgtttttgttttttgagacaacaggctctcactttgtcacccaagctggagtgcaatgccatgatctcggctcactgcaacccctgccttctgggtttaagcgattctcctgccttagcctcccgagtagctgggattacaggcatgtgccaccatgcctggctaagttttatattttttggtagagacagggtttcactgtgttggccaggctggtctcaaactcctgacctcaaacagtccacccgccttggcctcccaaagtgctggaattacaggtgtgagccactgggcccagccactacactttttaggtataggaaattggggccaataacgataaactaggcaaaggtaataacgaattaaaattgaataatttaatataactgtgctcaaacaggtttagtggtacaactggaccattctgggggccacatttattatatcaatatcttttagtgatttttcctttagccatttgacatttatgaggagcacctttcatacccattctgatagttggtcagaaatgcaggtcataatttgataatttataaatatttaagatgtataagcttataaaatatttatggataatatactttttagcagtgtgagcaagttactgtataatttctgtattttagaattgttaaagtctactttttttttcaaattaaactttaataattatgaccagtctttattcactttaccatagtagtgctaatgatgggatataatttcaatgtgaggcagacttctttctggtaaaatacctacagcaccaaaacagccaacataaatgcaaaaagaaagaaatttatttgattaatttataaattgattaatcagctaatgaatgactttttatggaaataagttacagtaactttttattgtgtgtcttcttggttgtaagaatctagaagaacctttttacagatcatcttgtagaacttaatgcaattctctgcacaagtaagggtttaatcttcttgatgctgaagacctgaacttccctatatgtgttttgtattatcttaaaattttatttgtgttggcaatagcaattcttaattacttgttttttttaaaatgcttgtagatgtgagtatgcagtgctcacaggatatacttcgaatgctcctctctcttcagccagttcttcaggatgccattcagaaaaaaagaacagtaagaccttggggtgttcagggtcctctcacttggcaacaatttcataaaatggctggccgaggctcttatggtaagtaatttatagtgatatataatgactaattttatatcagtcctcagatttctgtgcccaactagaataagcacattagttttctttaaatatatttgtgatatattcttaaggccactgtggtccaatcctagctttttttcccaccatttccaacattcagcttactcaactctccaactccacttcaaaaggagtggcttctcttaggtctgttcttacacatagggggctttccctcaagattttacatgaagaaagggacatactgcttagattttttttttaaaggcaaaaaaaatacttttgttatttattttacaaaattaaatgaaaaagggaggtggagtgggaaatgagggttatactagtgataaaaggccccctaaggtcttcatttaaaaagaattacaactaagaagaaatttgctggttgtgaccagagtagcaaatgaattctcataataggtatgcagatttattgtcagctgtgatgaaaatgccattccaaatatttgaattatttgttgaagattgtctctgaaaggtgggccgtaattggagtttttcagatatatttggaatgatacgtcttgaaatctttgacttttgtgtatggatttggaatgtattacatatgaaagtagtagatttgcctatattttccttttctccctcttttaatggctaaataatttaaatctcattacaaaactaatattctgtgaaaaatgcaggtcaatgaaaatatattttattttattttattttatttatttggttttttttggagacagagtctcgctttgtcgcccaggctggagtgcactggcgccgtcttggctcaccgtaacctccgcctcctgggttcacacaattctcctggcttagcctcccgaacagctgggagtatgggtgcacgccaccatgcccggctcatttttttacttttagtagagacagggtttcatcacgttggccgggctggtttcaaactcctggcctcaggtgatctgcctgcctcagcctccctaagtgctgggattacaggcatgagccactgtgcccggccagaaaatatattttagtataaacttttacattattttaaaaactaagatggtagccggcgtggtggctcacgcctgtaatcttagcacttttgaaggccaaggcaggtgcatcacctgaagttgggagttcttcaagaccagcctgaccaacgtggagaaaccccgtctctactaaaaatacaaaataagccgggcatggtggtgcgtgtctgtaatcccagctacttgagaggctgtggcaggagaagaagaatcacttgaacccgggaggcgcaggttgccgccagccgaggttgccatgagccgagatcgcgccattgtactccagcctaggcaacaaaagcgaaactccatctcaaaaaaaaaaaaaaaaaagtagatatttatttatttatttctgtaccttaactgattttggagatcatttctatctgcacatatagagattatctttttttatggctatatgtattccattgttccttacatatgataatatattttaccagtgcagtgtttatgaacatacaaattgttaccaccattatcattacagctacttttcagtaatgcacagatccctggctttaaagcatgggtgtatttttattttatttattattattatttttgagatttgttctgtcaccctggctggagtacagtggcacaatcatggctcactgcagccataacctcctgggtccaagtgatcctctcacctcagcctgccaagtagctggtactacaggtgctcaccaccacacccagctaatttttgtatattttgtagagatgaggttttgccatgttgcccaggctggtctccaactcctgggccctagtgatctgcccaactcaccctcccaaagggctaggattataagcacccagacgtgtatttcaagaaaaaaaaaaaaaaaaacctaaataactatctgtaatgccttttttttttttttttttttttttgagacagtctcactctcttgcccagactggagtgcagtggcatgatctcagctcactgcaccctctgcctcccaggttcaagcagttctcatgcatcagcctcacgagtagctgggattacaggcatgcattaaccacacctggctaatttttgtatttttactagagatgggattttgccatcttgcccagtctgttcttgaactgcttgcctcaagtgatccacctacctaggcctcccaaagtgctgagattacaggcgtgagccaccatgcccagcccctgtaatatcagtttgaattcccaccagttaaagtgcctgttttcccaaagccttgcctagtaggatgctgattcagtggatgaaaaatggttatttcccattatagtttgagagattaaatagtacagactgtggggatagatttcttgggtttaaattcctactctgctacttcttgtgaaatgctagagaaattgcttaacttcctcatttatgttttctcatctctaaaatgaagttaataatagtttctgccttatgttttttgtgaggattaaatgagttagtacatgcaaagagctttgaacagtacctagcacatagaattatcattgtttgctattattaattttaaattgcttttttaatgagaaagagcatctttttatgtgttagagatagttttgttttgtaatctccatgttcttaacccatttttctattaggttgttggtcattttcttttaaaaatttttttattatggtaagaacactcaccaggcatgacgactcacgcctgtaatcccagcactttgggaggccgaggtgggcagatcacttgaggtcaggagtttgaaaccagcctggccaacatggtgaaaccccatctctaccaaaaattcaaaaattatcccggtatggtgatgtgtgcctataatcccagctactcaggaggctgaggtgagataattgcttgaacccaggaggtggaggttggagtgagtggagatcgcaccactgcactgcagcctaggcaacagagcaagactgtctcaaaaacaaaacaaaaaaaaactaaaagaaagaacacttaacatgagatctgcgctcttagtaaggttttttcttttttctattttttaaattatattatttttaaatgtataaataaggatggtgtctcactatgttgcctaggcctcaaactcctgggctcaagtaatcctcccacctcagtctcccaaggtgctgagattacaggcatgagccacagcacctggcctacagtgtatttttatgccaattttttttttgtttgtttttgagatggagttttgctctttttgcctgggctgacgtgcactggtgcaatctcagctcaccgcaacctccaccccctgggttcaagcaattctgcttcagcctcctgagtagctgggattacaggcatgcaccaccatgcccggctaattttgtatttttaatagagacaggctttctccatgttggtcaggctggtcttaaactcccagcctcaggtgatctgcccacctcggcctcccaaagtgctgaaattacaggtgtgagccactgcacccagccccatgccaaaaatttaaatgcagaccagacgtggtggctcctgcacgtaatcccagcactttgggaggctgaggaaggaggatcacttgagctcaggagtttgagtccaccctgggcaacacagcaagatcccatctctacaaaaactttaaaaattagctaagcatagtggcacacacctgtagtcccagctattcgggaagctgaggacagaggattgcttgagcccagcaggttaatgctgcagtaaggcgtgattgttccactgcagtctaatctgggcaatagagcaagaccctgtctcaaaaaaataagtaaataaaaagacttgtttaggaaattccttaatgttgaaaagtcttgaccactggcattaagtatttttgtctctaataaaatattttcactaataatgacttcattaacttttgacatttaaataaaaaggaggccgggcatggtggctcacacctgtaatcccagcactttgggaggccgaggtgggcggacacaaggtcaggagctcgagaccatcctggctaacacggtgaaacctcgtctctactaaaaaatacaaaaaattagccaggcgtggtggcaggcacttgcagtcccagctactcaggaggctgaggcaggaaaatggcgtgaacgcgggaggcggagcttgcagtgagccgagatggcgccactgcactccagtctgggcgacagagcgagactctgtctcaaaaaataaataaataaataaataaataaaaaggagacatgtcttgtttttaagtgttttcttaaaatacatctttcttatttaggaactgatgaatccccagaaccactgccaatccccacatttttgttgggttatgattatgattatctggtgctttctccatttgctcttccttattgggagagacttatgctggaaccctatggatctcaaagagatatagcctatgttgtactgtgtccagaaaatgaagccttgttaaatggagcaaaaagcttttttagagatcttactgcaatatatgaggtaggtgtttaaaaagagatgacattttaaaactaccttacgatttgtattgttgtatatacagcatactgggcagttcagttgattgggacacagtgatgatgtcagattagatgtttatttctcatactagccagttacattctttgctgagtttgacccagtctgttagatgtgtatgccgtgggtcagagtggctatccccctataggaggaagaaacattgagggcatatagatatatatcccttttaatgtggctttttctaaaacaaagggtaacaatgttaaatagccaggaaaaaagttacatttacaaaaattctagtctttattctctaggatttcaggtagtgacactaggcctcactttcctcatatgtaaaataaatctatgctagatatcactaaggtccatttcaggtctgaaattcttgcctcttcttttaagttataattctcacatatccatcaccaggcgcaataattgtaaattataagtgttatgggacataaagtcttactttattattccctcctttttccacaaaggcttcgaaatttagtctttaaattttgattccttatacaatctgaatgttagtgtatgttagtttagcttccttttaaaattttccacataattacaaggtatttgtagtgtgtttttaataaataaacatttcccaaagggtgttatttggaatatcagtccggtaaaatcctctcagagaaaaagttccatagttaaataggcttggggaaacattgtatattatattaccttttagagatttacaattcatattaggtttttaaaggctttgaaattcttacagtaaagaactcttctaagtttgcttaatccaatgttttaaatttatttaacattgggcttctaataacaaaaatcagtgactcacagaactagagggagaaggtgtataaatatatttgtataacaatttttattttgctttgatttagggatatttgtattcataattcatgaattggtgttaatgtatacctaaaatgactgcatttttatgctcacttatgtctgcattctgcaagcttttattcaaacaaaatggttctagtactattgttatctaggtgttttttcattagagatattttaattttgaaaaaaaattaatgaatttctaatgtaaaaatgaaaaagacctatggcaccatttcacccttgatatgtttatttttttggcctacttctaaaaacacccttgatatttttatcataactgttaattgcaaatggttaagcttattttaagtagctttcatggttggttttataatgtgtatctaaatacaataataaatttactaattctgctttctgtatgtatatttgtagtcctgtcgattaggtcaacatagacctgtttctcgactgttaacagatgggatcatgagagttggatctactgcatcaaagaaactatcagaaaagttggtagcagaatggttttctcaggcagctgatggtaacaatgaagcattttctaaactcaagctttatgcacaagtctgcagatatgacctaggtattgaatttgtatttattgtataaggctggtgttagcaaaatgtggcctgctccaccagctgtttttgtagataaaattttattggaacacagccatcctcatttatgtattttctctggctgcttttgtgctacaacattggagctgagtagttttcatagagactgtgtggctgcaaagacaaaaatatttattatctgaccctttacagaacaagtttgctgatccctaatgagggatcccatcaggtaggaagaaattatgggttataaataaattttctgttgcctctgtagggtctgatgttttaataacttgaagattcttcatttgttacagtttagagataaaataatttatagttaatctctaccaaaccaagaaatagttctttgttgtagctaagaaaacgacagctgtttaagacttgcttgttacatactttttttctttcattctacccgtgcctaactgtattgcttataaatactcttgaaaataaagatcagtggacttcctttagacttaatccaaagagatgcagaaccaaaatattgaatctcattagacattcctataatttgaaccccataacattataccattttatattttaattagctgtcaatgtagtcaatatttatttgatttgtgatttagaaaccctttgaatagtttgatgaatattgctagataccttttttacatttaattatacttagaaaatagaattttgttacactttcatagtaatcatttctttaattttgagtgaaaattctggctttttcaattccattttaaatatgtttcttcagtctctaggggaaaatagaaagcaagtgtaggtcacaccattagcaagcaatttcggggctataattaccaagaaaacatcaactggattatgattctgtttacacagtagaatttaaaaaaaccagtcagtgaaataaagaattaaatttcgtacctgtttttattctttaggtccttatcttgcttccctgccattggacagctctctactttcccagccaaatttagttgcccctacaagtcagtctttgattactccacctcagatgacaaatactggaaatgctaatactccatctgccaccttagcatctgcagcgagcagcactatgacagtgacttcaggtgttgccatatctacttcagttgccacagctaattcaactttgaccacagcttcaacttcatcttcatcatcctccaacttgaatagtggagtatcatcaaataaactaccttcgtttccaccctttggcagtatgaacagtaatgctgcaggatccatgtctacacaagcaaatacagttcagagtggtcagctaggagggcaacagacatcagctctacagacagctgggatttctggagaatcatcttcacttcccactcagccgcatcctgatgtgtctgaaaggtacctttaaaaatactgatttttgcagaaatataaaaactatgatgctgcttctttctttttttttcttgagacacagtctcactcttttgcgcaggctgtactgcagtggtgggatctgcactcactgcaacctctgcctcccgagttcaagtgattctcctccctcagcctccctagtagctggaattacaggcatgtgccaccacgcctggctaatttttgtatttttagtagagacagggttttgccatgttgaccaggctggtctcaaacttctgacctcaggtgatccacccaccatggcttcccaaagtgctgggattacagacgtgagccaccacgcccagccatgctgctttttttctaaataagacgttttgaatgagcataaagtgcttttttatcttagtcttgaaattttagtttgtatctttttttaagacaaggtctcactctgtcacccaggctggagtatagtggcgtgatcacggctcactgcagcctcgacctcctgggctcaggtgatcctcccacctcagcctcctgagtagctgggacttacaggcatgcaccaccatgcccagctacttttttgtagagatgtggtttcaccctgttgccctggctggtctggaactcttggactcagcaatctgcctgcctcagcctcccaaagtgctgggattacaggcatgagctatcgcacccggcctagtgttgaatattttatgtataaaattataatgaggactttacttcataaagtatcatagaattctagaatctgagggtgggaattaagagcttgaaaaccatatagtccagatacccatatgacatttgagtcttctgtggcataattgtcaagtagatttgcctgtgcaaatcactctggtgattgagaagtcactattgacccactctatttagaggctttagagttgtactgaggtttgaatctcagctctgccatttacctgctttgtgacttcggggaaactctaactttctgagcatgttttcttatctgtaagatgagagtaatatgatataatatacattaagtactttacacagtgattccaagttatttatagtgacaagaatgattatgacagctctcattccttttttgatgaaggttttgatcttcccttttgatttataggccaagttggccagagcttaattatatctgtcagctacccaggatgcagttgtgcccaaaattatactcatatgtgggtaaaaacaaaccattatcgagattgatacactcatcttgaacatatgaatagatttgaagtgtaaaaaaatcaaatcacccatcaaagaatgaaacttgtacaccattgaagctgtaaagtatgaaataaatgtatatagtctaaaaatgggaccaggtgaagtggctcatgcctgtaatcctagcactttgagaggctaaggcaggagggttgcttgagaccaagagttcaagaccaacctggtcaacatagtgagactcccatctcaaaaaaaagatatatatatacacatatatagagagagagagtctgaaaatgtactagaacattaaataagtctggaaacgtggtttctttctggcctagctctacctgtagccacctttataaatttggtaagctatttgagatagcctcagacaaagagacctatctttgtctcagttttatcccttaaactctaagccatcttttgtatctaatacccttaccctatggttttaagaattttttttcttttctttctttttttttttttttttttttttttttggtaaatttaaggcaagacctcttaaggcaagtgtctttatacactgtgaaattgtatgtacaatgtttatggttcattttggcgagaaagaaatgtccttcatttttagagaggctttctgacacctttcaccaaaaaagagggaggagggggatattaagaacctgcttagatgctaccccaagcatatacagtacaactttttgtctcatttctaccttaaattttagcacgatggatcgggataaagtgggaatccccacagatggtgattcacatgcagtcacgtatccacctgcaattgttgtttatataattgatccttttacatacgaaaatacagacgagagcactaactcttctagtgtgtggacattggggctacttcgatgctttctagaaatggtccagactcttcctcctcatatcaagagtactgtttctgtacaggtaagagtgatagatgttgtgagttaaaattatgtaaaacagtttaatgttgtcagaagtttcagatactacttttctgtattcaaattgattatctaaaagccaagttctattatattgattttactttaatatcataatataaatcttagagaatttataaaagataaactttatagtcatatgacagtaataatacagaataaaaaaattccattaagtacattaaatgtttctcctgtgttacttttataagccaatttttaaattcatgagcctaaatagaaaaatgtagcatgtacctaaacaagacaggttgcaagaaaaggagaaagcaattaaccatattaagttgttagaagaaattttgaatttattttatagacttcaacaggactagtcaatggcattattaatataattgttatatagaaaattttacagttttttgttgttgttttttttctgagacagagtctcgctctgtcgccagactggagtgcagtggcgtgatctcggctcactgcaacctccagctcccaggttcaagagattctcctgcctcagcctcctgagtagctgggactacaggcgcatgccaccacacccagctcatttttgtgtttttagtagagacagggtttcaccatgttggccaggatggtctctatctcttgacctggtgatctgcccacctcggcctcccaaagtgctgggattacaggtgtgagccaccacacctggccagaaagttttataggttttaaatagtcctttaattcagaacccattggtaaaattggctacttattaaaagcctacataatagataagaaaacaatcgttaaattttcatttaaattaggttttgtgtaaattttctagtaaaaagtttttagagttttagacccacagttcctgttattctcttttggaagtttaacatttgtaatatttgcctatacttcttagattattccttgtcagtacctgttgcaacctgtgaagcatgaagatagagaaatctatccccagcatttaaaatccctggctttttcggcctttacccagtgtcggaggccacttccaacatcaaccaatgtgaaaacattgactggctttggtccaggtttagccatggaaactgcccttagaagtcctgatgtaagtatatgtttttcatgaccgaagttcaatgactatacataccttttttttttttttttttttttgagatggagccttgctttgtcacccaggctggagtgcagtggggcaatctcagctcaccacaacctctgcctcctgggttcaagcgattctcctgcctcagcctcctgagtagctgggattacaggcatgcgccaccttgcccagctaattttgtgtgtgggaggagtttcaccatgttggccaggttggtttcgaactcctgacctcaggtgatcgcccacctgtgcttcccaaagtgctgggattacaggcacgagccaccgtgccctgccaacatttttatgatactatgcaaaactaagtgcaatttttggcttagctgtcattttccaattatcttataattgggtagataagaattacattttaaatgcaatatttctctaagattgtatagtatgataataccttaattttttattttatagagaccagagtgtattcgactttatgcacctccttttattctggctccagtgaaggacaaacagacagagctaggagaaacatttggagaagctggacagaaatataatgttctttttgtgggatactgtttatcacatgatcaaaggtggattcttgcatcttgcacagatctatatggagaacttttagaaacttgtatcattaacatcgatgttccaaataggtatttgtatttccctaaatatatcatatcattccatttgtaacattttgtttcatttttaatgaatagaaaaccagtttgaaggttttatatatattaaaatattaagatgtggggttgtgggtgctttttacttttttctttagtgaatgtttatattgtataactaacataattaaaaataattttgattaatctattatatgaacaaaaaagattaaggtcactaacttctgtgtcataaagcttgaggcaattattttagctgaacatttttgaaagatgtaaaaaaatggtctagtaaagtatctatagaacatttaaacttttctcatgtaccatctaagatatagcccctaataaactgagtaagttaacttcatttactaaaattggcgatttaaaattttatcatttaaatgttaggatgtagccgggtgtggtggtggttgcctataatcccagctactcaggaggctgaggcaggagaatcacttgaatctctgggaggcggaggttgcagtgagccaagatcacgccattgcattccagcctgagtgacaagaatgagactctgtctcaaaaaaaaaaaaagtttggttgtcttcagaatatgatgaccattttagaattcttggcagtaaatatcacgcccagttatttacgaaggatataactaataggtcacaacaggtgagcctcattttgagttatcacttaataaacatttcaagcctttagtagagacttgaaacatgttttcaaggctagtgaacgctgtacaggagaacctgaaaagcaaattcgtgaaatgatttttagttttaagatttgggttctggccagacgtggtggctcctgcttgtaatcccagcactttgggaggctgagacaaggcggatcacttgagtccaggagttcgagaccagcctgggcaacatggcgaaaccccgtctctacaaaaatacaaatattagctgggcatagtggcccacctgtagtcacagctactcgggagactgaggcagaaggatcacttgagcccaggaagtcgaggctgcagtgagctgagattgcaccactgcactttaacgtgggcgacagagtaagaccctgtctcaaaaaaaaaaaaaaaaaaaagatttgggttctatcgtttattttcttccttattatataaaagcttgttttttaggtgagaagttaaatatatgcagaaatatctaatgattattaggtctttaatggtgctggggaagcagaagatagaaacattaattttatattattgattataaacattaacaagtatgttaagctttatattataaaccttagaacagtgcttcgtatcttatttccttgatacaattttgatttttttaattggatatttatactgattaagtgaactcgggaaagaatatgctaatctgtgaagtatgagaaagtagagaaaaaaaataccacccttttcattatcaaaatagtattatcattttactaccttgataaagtagaagtgagataatggttaagaggggcaatgatggggctgggcatggtgactcatgcctctaatctcagcactttggaggccaaggcaggtggatcacctgaggtcaggagttcgagaccagcctgactgacatggtgaaaccctgactctactaaaaatactaaaaatacaaaaaaattagccaggcatggtggcatatgcctttaatcccagctacttgggaggctgaggcaggagaatcacttgaacccaggaggcggaggttgcagtgagccgagattgtgctattgcactctagcctgggcatcaagagcgaaagtctgtcttaaagaaaaaaaaaaaagaggggcagtgatggagtcagagagacctgggctcaaatcccaaacctgccactactgaccttggaaaaactacccttatgcagctgagatacagcttacttatctgtaaagtctagaggataattttatttgtctcatagagttgttaggatgaaatgaggtattacatgtaaattgattgggcacaatggatggtacatagtaagtgctcagtaagtcatagccactgttggctgggcacggttgcttatgcctgtaatcccaacactttgggagggcaaggtgggcggatcacctgaggtcaggagtttgagaccagcctggccaacataatgaaaccccgtctatactaaaaatacaaaaattaggcctcgcatggtggctcacgcctgtaatcccagcactttgggaggccaaggtgggcaggtcacgaggtcaagagatcaagaccatcctggccaacatgctgaaaccctgtctctactaaaaatacaaaaattagctgggtgtggtcgtacacgcctgtagtcccagctacttgggaggctgaggcaggagaatcccttgaacccaggaagcgaaggttgcagtgagccgagatcacaccactgcactccagcctggcaacagagcgagactcttgtctcaaaaataaccaaaaaacaaaaattagtggggtgtggtcgcacgcgcctgtagtcccagctactcaggaggctgaggcgggagaatagcttgaacccaggaggtggaaattgccatgagccgagaccataccattgcactctagcctgggtgatagagttagactccgtgtcaaaaaaataataagtaatagccagctgggcgcggtggctcacgcctgtaatcccagcactttgggaggccgaggcgggcggatcacaaggtcaggagatcgagaccatcctggctaacacagtgaaaccccatctctactaaaaatacaaaacattagctgggcgtagtggcgggcgcctgtagtcccagctactcgggaggctgaggcaggagaatggcgtgaaatcaggaggcggaacttgcagtgagctgagatcgcaccactgcactccagcctgagtgacagagtgagactccgtctcaaaagaaaaaaaagtaatagccactgttgctcagccaaagagtgcttatgttgcatatttggctagtgaaggacatgtatgcagaaaacatgtaacaatgttgtttggactgagaagtgtggtgttttggtcagtcttcaacttatagtatagaacagggattgcttactgcagcccatggaccaaatctggctatttccatttgaagtattggctctttaaaaaaagtttgctgggtcaagcagggtggctcacgcctgtaatcctagcactttgtgaggccaaggcgggcggatcacgaggtcaggagttctagaccagcctggccaagatagtgaaaccccatctctactaaaaatacaaaaattagccgggtgtggtggcgggcgcctgtaatcccagctactcgggaagctgaggcaggagaatcacttgaacccaggaggcggaggttgcagtgagcagagatcatgccactgcactctagcctaggcgacagagcaagactccgtctcaaaaaaaaaaataaaaagtttactgggccaggcgcagtggctcatgtctgtaatctcaacactttgggatgctgagacaggatcacctgaggtcgggagttgagaccagcctggccaacatggtgaaaccccctctctgctaaaaatacaaaaattagctagacgtggtggtgtgtgcctgtaatctcagctgctcggaaggctgaggcaggagaatcacttgagcccgggaggcagaggttgcagtgagccgagattgtgccactgcactccagcctgggcgacagagtgagactccatcaaaaaaacaaaaaatccctggcgtagagcagtattgctgatgaattgaggtgttttatagacaaatttttttaaaaatttatatattataatgtgaaatagaaaagcaaactcagatgccaaacctatgattttatgaatattctcgcttaggacttacgtaaaggttttgtgaagcactaaaattaaggagatctgtttttcacaaatttgagctctcttaaaatgtcgggatggcacggtggctcacacctgtaatccagcactttgaggggacgaggcaggcagatcacgaggtcaggagctcgagaccatcctggctaacgcggtgaaaccccgtctctactaaaaatacaaaaaattagctgggtgtgttggcacacacctgtagttgtagctattcatgaggctgaggcaggagaatcacttaaacccgtgaaggtggaggttgcagtgagccgagatcgcaccactgcactccatccagcctgggtgacagagtgagactccatctcaaaaaaacaacaacagcaaaatcatataaattttagaaatatttatgacactctctttattcacacaatagggctcgtcggaaaaaaagttctgctagaaaatttggtctacagaaactttgggagtggtgcttaggacttgtacaaatgagttcattgccatggagagttgtaattggtcgtctaggaaggattggtcatggagaattgaaaggtaaaattgtgcttttattagtatttatatttccgttttatgtaaattcacacacagttctgaccacgtctaggtatatatgttgaataaaatgcaaaggttatcaaataaggaaccacatatgtctaggccacaaatggcttaattcaaattttaaaaagacattttactcttattttaactttaatatcagtcttattactgctgttcttaattgttttctgttttttccactttctgattgttatttaactcatcctctgttgagcagataccaattgaatttggtgtatcctaatattagggggataaagaatgttcagtagcatcagcagtaagaattttggcttgatgatgactcgtgttggaggaatacactaatttaaaagccattaactatttttatattttaactttaacttggttctacaggatattaataatgctgttactttgattttttttttttttttttttttttttactgttgatacccacagattggagctgtttgctgagtcgtcgaaacttgcagtctctaagtaaaaggctcaaagacatgtgtagaatgtgtggtatatctgctgcagactcccctagcattctcagtgcttgcttggtggcaatggagccgcaaggctcttttgttattatgccaggttagctatctttagtttatatcagatttaattctttatgcagttaagtttttaagtattatatacaatttattcttcgtttattaaaagaaaaaatgtctttcattttcagattctgtgtcaactggttctgtatttggaagaagcacgactctaaatatgcagacatctcagctaaataccccacaggatacatcatgtactcatatacttgtgtttcctacttctgcttctgtgcaagtagcttcagctacttataccactgaaaatttggatttagctttcaatcccaacaatggtacgtaatttgttccattttggtagtctgaagaataccccccaaaataaattcatgtccaatacctgaaacgtgtgaatgttaccttgttttaccaaaaaatgattttgcagatgtgataagttaaggatcttgagatggagagattatcctcaattacgcaggtgggcccttaatgcgataacatgtgttcttataagaaggaggcagaaggaggtttgactacatagaagagaagaaagccatgtggtggaaacagtgggaagcaaagtcaaagggagaagatgctatgttgctgactttgaagatggtgaaagagcccatgagccaaagaatatagttctagactctgaaaaagacaaggaaacagattatccctttcagccttgccaacatcctgattgcagtccaacgaaactgatttcagacttctggcctccagaactgtaagaaaataaatatgtgttgtttttaagccaacagtttgtggtaacttattaaagtggcaacaggaaactaatacaatcattctttcaccttgttgatatcagaactggtgctgtgaattatcccataaatctttactttttaaaaattttttgagacagagtctcactcactctgtctcccaagctggagtgcagtggtacgatctcagcctactgtagccttcacctcctgggttcaagcgatgctcgtgcctcagcttctcgagtagctgggattgcaggcacatgccaccatgcctggctaatttttgtatttttggtagagatggggtttcaccatgttggccaggctggtctcaaactcctgacctcaaatgatccacccaccttggcctcccaaagtgcggggattataaacatgagccaccatgcccagccatctttacttattttaaaaggcaatagttggtcacaaaatatttgtataggtttacccttgtgcttttgaggtacctgtacatgaactcattttatatatctcttatgttgatttgccaaaataatgtaatttatataaactgccaaagtagggacgtagcttttccaggtgaatttatagattgcattttagtagaagagaaaataaagaagattttattgttattctgagctaccttaaaaactctcacatctctaaagtcacaagtatggttattatgctctcttgttttcgtgtgttatataataactcgaatattttacttaataaagaacatggtattattcgtaaatacagtaatcctccttatctttggttttgctttacatgatttcagttgcccatgggtacagtacaataagatagtttgaaagagagagagagagaccacattcacataccttttattatagtaccttgctataattgttctaatattctcgttgttaatctcttactgtacctaatttatcattgaaactccatcataggtgtgtacgtaaaggaaaaaccagtatataggatttggtactatccttggtttcaggaatctatgtgggtatgggggtgggtcttgggacatattccccatggataagggggaatactgtagtcccactttaaacacattttcattttgtttgtactatgtttgctttgtattagtttcctattgctgctctaacaaagtactacacatttagtggcttaaaacaacacgcatttattttatcttacagttctggaagtcagaagtccaaaatcagtctcactgggccaaagtcaaaatatcagcaggattgattactttctggaggtcctaagggaaaatgtttccttgcctttgtcagtttctacaggctacttgcattccttggctcatggtcccttcctctatcctggatgccagcagtatagtgtcatcacatctccttcactggctctaaccctactgcctccctcttattaggacccctgtgattacattggacccacccggataatccagaataatctccccatctcaagatccttagcttgatcacatctgcaaagtcttttatggtaacatattcttagattcctgggattaggatgtggacatctttggggggccattattcagactaccacatgcttgtttatgcataattatttgtacggcttttagcacaatacttggcacatggtagacactcagtaaatgttggttaaattaacccattttggttaaaatttcatttattttgaccctttcctgtgaatgaccataggatatggaaaatggagttttaaatttcttttctttctcctgtttagatggagcagatggaatgggtatctttgatttgttagacacaggagatgatcttgaccctgatatcattaatatccttcctgcttctccaactggttctcctgtacattctccaggatctcattacccccatggaggtgatgcgggcaaggtaactgtgttacaagttttagtttttctcggccgggcgcagtggcttacgcctaaaatcccagcactttgggagggcgaagcaggtggatcacgaggtcaggagtttgagaccagcctggccaatatggtgaaaccccatctctactaaaaatgtaaaaaatagccgggtaaggtggcacgcacctgtagtcccagctactcaggaggatgaggcaagagaatcacttgaacctgggaggcagaggttgtagtgagccgagatcatccaattgccattccttaacttagtaatggattaatatatgaaatgcaatactatttttccttggaaattagcaagagttgacattaattaacagtacattcatgcatttctacatcatggacatcagtactttgaattgcacatttttaagagaatctctaaggctctactttccctgaatccgtattttctagaccatttggcattagtcatttttttgtagtttttgtggcagttcaccatagctttttactcagatgtaggatcacagtatctttcagaatcactatatataactctaagagcagccattcatatcagggctgtgacaaggaatataataaaaatattaattttctcataagaccagataaaacactgaccatctactccccctttttatctttagcagttatggaagcaggctgtcttgtccttatatttgaagtaaaaacgaactgggcttcagttaataacacctctctatttgaaattatatatactgggctgggcgcggtggctcacgtctgtaatcccagcactttgggaggctgaggcaggcggatcacgaggtcaggagattgagaccatcctggctaacacagtgaaaccccatctctactaaaaatacaaaacttagccaggtgtggcaggcgtctgtactcccagctactcaggaggctgagacaggagaatggtgtgaacccgggaggtggagcttgcagtgagccgagatcgcaccactgcattccagcctaagcgacagagcgagactccatctcaaaaaaaaagaaaagaaattatatatactggtgatttgattattgtagtatgcataggtataaaatttacccttttaaagtaaggaaggatctttccagtcttactttgcattccttcctcctttttgtaactgcaaagaaattagataggaaatacatataacaaaaagcaccagtaatcccaccaccttaataaaaccatttttacttttaagcaaattatcttctttccacatacgtttatgttgcaattttcaataagtataatgaggttttaaatattgcatttttgctataccctaatttatgtccttcccaaaatattggacatgtaagatttttttttgttatagataatgatgtaatgaacgttttcatgcatattatttttattttatctatttttaaataccaagaaatacattaactaatccaaaggatatgcatgtgacttggtagttgtcccttcatgttgccataataattttcacaacactattaactgcattttatagatagtgctagattaacaaagctaaattgaatccaccttttgattggggtgtggttttcaggacttaaaggaatattagcaaaaaagttaaagatgtcattgaaaattttgtattttttactcatctgtgaagttttacaaactttcccgtgaacttggcataataatacagacttgttaaacagttggcatatcatgcaatccttaaaatatgttctattaatgcttttacttataatactcctaagtacatagaaactggttttttttcaatatccttcagtattttattaaatcgatgtcataagataatgagactgattgctatgagccattctgtgtttatatctggtacttagttacactgagtgaactaatatacttttaattttgtctttttaagggtcagagtactgatcggctactatcaacagaacctcatgaggaagtacctaatattcttcagcaaccattggcccttggttactttgtatcaactgccaaagcaggtccattacctgactggttctggtcagcatgtcctcaagcacaatatcagtgtcccctttttcttaaggtattgccatttctgtcccagttcctaaataattctgattgacagcctaagtcctgagaaatatagaagtggcttttttaagtcttatagcttgtctaagttcttaaatgcactgccatatgtgactctttaaacaagatcacgaaggcacggtggctcacgcctgtaatgccagcactttgagaggccgaggcaggcagattacctcaggtcaggagtttgagaccagcctggccaacatggcgaaacctcgtctctactgaaaatacaagaattagccaggtgtggtggcgggcgcctgtagtcccagctactcgggaggctaaggcaggagaatcgcttgaacctgggaggcagaggttgcagtgagccgagatcgtaccacttcactccagcctgggtgacaatatctgagactctgtctcaaaaaaaaaaaaaacaactagtttttaaatttatatttttagaactttattcctaagtcaaactcctagggcccttgttgttagtgtagattgagtatcccttattcgaaatgcttgggaccagaattgtttccatttttggattttttcaaattggagatgctcaatctgtttcaactgcatatatggaaatttagagctgagagaaactttatattacctctgtctaaccttctcattttctaggtgagcatatttaagttcagaaaaactcacctgtttaaagtcataaattggtaatagactcaagactgaaacctgggtcttttaatgattattatgttattctttgaattacatcatactgcactgctgttatgctgcattattttggggaataaaagatttataatcttgggctgggcgcagtggctcatgcctgtaatcccagcactttgggaggctgaggcaggtggatcacaaagtcagcagttcgagaccagtctggccaacatggtgagaccccgtttctactaaaactacaaaaaaattagccaggcgtggtggcacgtgcaaattagctatttgggagactgaggcaggagaatcacttgaacccggcaggtaaaggttgcagtgagccgagatcgcgccactgcactccagcctgggtgacagagtgagattccatctcaaaacaaacaaacaaaaaaaagatttataatctttgtaatacttgatttttagtttcatttactacttaaaaaagtttttctagctgtgtgtagattgctgtgttaaaaaaaaactgagtggtttttaaatacagtaatgagactctcagattcatcgtgatttattacaacaaactcaggctgggcacagcgattcacccctataatcccagcactttgggtggtcgaggcaggaggatcacttgaggccaggagtttgtgatcagcctggacaacatagtgaaattttgtctctctaaaaagtttttaatattaggcatggtggcatgtgcctatagtcctaataacatgaaaagctggggcaggagggaggatcgcatgagcacaagaggttgaggctgcagtgagccatgatcatgccactgcactccagctaggtgacaggagaccctctctcaaaaaaacaaaaccgaatttgttagtaagcaatgtaacatgaagtggagataagtcacaaaatgagatataaaagccctatacagaattatattactgctgctaatattgttccagaataacaaatttagatgtgactcacttattctttttttttttttgagacggagtctcgctctgtcgcccaggctggagtgcagtggcgggatctcggctcactgcaagctccgcctcccgggttcacgccattctcctgcctcagcctcccaagtagctgggactacaggcgcccgccactacgcccggctaattttttgtatttttttagtagagatggggtttcaccgttttagccgggatggtctcgatctcctgacctcgtgatccgcccgcctcggcctcccaaagtgctgggattacaggcgtgagccaccgcgcccggccgtgactcacttattcttatgtaaaaccaccggaagttgactgtttttaatccacaagtcatgctaatttaaatacttgctgccgggtgcagtggctcacacctgtaaacccagcactttgggaggctgaggcaggcagatcacctgaggtcagggattttctatatactagtagtctttggtgtctccacaaaacaaaggattctttggtcctttgggagggtgctacacatgctatctgtcctcttttctagtcataatacatgtatgcacactaaagtctgaaaaacagaggtaaataagatagtttacctagcatttcccaaacttattaatacacaaggaaaggattatttaacacctgttaatagtttattatcttagtgtttcaggggatgtgttcaggaaacacaactttacaaaaagtccaagggactatctagagcttttcctactcagtatttatttgcagaaaggatagtataaagcgggcattcacccttagatacattgtaacaagattaggacttctggttatgaactatcacctaaggcataatttaccatactttttgttcacttttttttttcatatatcttattttagttttatactgtaggcagtaaagccacctggtttgtttctctttgcttggaaatataatgggttgttagctagatccctttttatcataggaatagagtactggtactaattacattttaaaaatttgtagtgatttgcagtgtgagacttgcttataactccataaatcaagagtttgtagacagttgaaacatagctatttttggttatattcctaaatgtactacatgagtttctatatgtattgcagttgcagaggagagaacacctaaatataaaatagtaccttatacagtgtacagaatgagatctaccaagagttactgcagtgaacatcaccattgttttatcatagctttttaatactatattgacttataaaaaaaatgactcatttaattggagtgtggagtagtttattcctttctcccactattcattgccatatctaaatgagtgtgccagtttttacctaccctctattatgaaattgagtgggcaaagcaggcatctgtgcactgtattacttagagtgttctcagttcaaccgaagatagcttgtttaaggtttattgtgctgtaaccaaactatttgcttatgcttattcctgttacttttttcagtgctagacgtaggtatgtctgcgtagtcataaagggtgtcatatatcttaaggacagactactcaggtttaactactcaatttagtgcctccttaaacatttactttgcacatctaggcaaattagacttagcaggtaattagaaattctttttctaaggattattgtatggtctcaaaaacaataaagctaaagaaaaggaaatagattcaaagtaagttttgcacttaaaaatcacttctggctaggcacagtggctcatgcgtgtaatcccagcactttgggaggccaaggcaggaggattgtttgaggccaggagttcaagaccagcctggtcaacagaacaagaacctgcccctacttaaaaaaaaaaaaaaaaacatttctataatgaattagttaaaagagaacaagcatttttatagtggctttcattcataacataggactaaaatgtatttcatcattttataagatatattgggagaataaggtaaaactaaatagcagattattttctgtttggctgactgattgattacctgttaccttcttaggcctctttgcacctccacgtgccttcagtgcaatctgacgagctgcttcacagtaaacactcccacccacttgactcaaatcagacttcagatgtcctcaggtacaactcttttaccattaacagtttgtcactgcaactttaaaagaatataatgttgattcttatatatttttctcatttttggcaagaatttacagttgtgtaccagtggatctctagataaacactgctattctaacttgagtaatctacttttgagaataatttttatggaaattgcttctttcccctcaaggactctctgttacactcttttttaaggtgactttgagtcttaaatgccataattgaaaactgcttccaaaatctaggttggaaataaataaatgacttatgcagtttatttgcttttcaggtttgttttggaacagtacaatgcactctcctggctaacctgtgaccctgcaacccaggacagacgctcatgtctcccaattcattttgtggtgctgaatcagttatataactttattatgaatatgctgtgatcttcatttgatggaactgtgcaagaaaagaacaaggaaaaatggatgtttcgctgcaggattaagttacaattatcttctcagtgaaggtcatttgtgatggggtctaattcttattacttcaacaaatattgttttgacttggggggaggggctataaccctgctatttttcattgactctattgaactctttaggatgatgactgatcatacaaaacgtattataacattttcgtagcaaaattaaccttttttttttccagtcacagtatttgtgaaaagtaatgagccatagtacccagtcatgttaaatgaatattaaaagcatggagaggaaacatgaggaacaatgaatttcaacatatggcttcagaacatgaagatgttcttgtatggattatagtatctagtattcaaaaatgcctgcatctcttctcttatttattgtaagtttttaaatgtataaattgtcttatatttcttaacctcttttataaaaattttcctagaaggtttatactgccttcttgctttaaagcaattggtctaaaatatatgtaatcgtcttaattaaaaagttgcagtagggttgcttttagagtattatttttttgtaagggggtgggtgggacagtaaatttgtattgtctcgatgtacagtttaacggggatagagggggaataatgtccataccattgtgtgtggaggatttacagctaagctgtagttgcagagtacatgtacagtaatgaagttcactgtgtttataaattgaaaaggtaccaggtcttacagcattttatatatcacatctttacagaataacatgatggcaatatacaagtggtattgttaggtggtttaacttagaataaaatgagaattcttcagttatattttgtactatggtttagggctatgactaatatttcaggccatttccggtgaaagaaacttagttttacaagaaaaaccatttgctactgaatgcttaaactaattttagtgtttaatgttacatgcttaaatttttttcagttttaacagtggcatatttaggcatggaaatattattatgaaatttattttcaggatctgctataaggttgaaatttagcccagctctaggcattttacaaattatttttcaagcagtcattcttgattgtttgacttttttttttaaattaaagattgggaatgtatgtgagagtatgcatatgtatgggtgtgtgtgtgtgcgcgcaatcaaactgtggtgtaaatagattctcagtgaattctggtattcagactctattccactagtgaaagaaccattttttaaacttcccttgccttttttatttatttaattttcttggtttggagatgtcagtcccaaacaccagagtctgtacttttctataacacagctcagattaaggtagggcatatgccaaggaggttctcacctccctaaagaagggacttgaattttagggactttaattcacccctccttcaatacaactttcccccttcttgtttgcacatgccaagataactgcttttatgcaggctgtacccccttgaaaaatcctttctacagtgctgctcacaaaagagcccaagttcgcctcctacctgcattgctgacttgaattcacagtcgccgagtctacctagctttcttggaagcagtctagcaaaatttctatttgtacgttcactaattatctacaaggacaaaatcagttgtatttacaaaactctacttcagtgtttgttttagtttttttttttactgaaacttgtttttgtgaatactctgtgcttagaattaaatatcactttcttatgaacaacataacttcttcagattgtgtatatgaaaacattagcaagtcttgttttttctatgaagcaaacacaattggtgacaaaggttgtcaatcatttcttcaaaattataatgcagttctaatggtcagcatattttgatattaaatttaaagatcacctctctgcatttgtttttaaattatgctaatacaccacacattatgttggtatgttttgttctgtactttctttaaaaaaaaaaaaaaaacttgtctgagatttgaaggaaaatgtgcttatttggaatttccataaaaagagtatcctttttatacacttaatagtgactttacaaaataaaagttatattctcagttgtttaaaatcactaacctatgataaccacacctcaatttgaaagtagatttaaaattattccctgacaggttatttaatatggagccataaggagggaacccagtacacaattattttttatttgggaatcagggaatagttcccaaatatacaggatttattgataagattttttttcttcccttcatatatccattcaaactcaatggaaagttattaaataaccattagaaaagctcagtagacttatttgagaaattaagccttgtgcaggatgatggatttgacttactaatgtactgtcacagacaaatatgggtagttttgtttaaataggtaagcaaaatattatactttatagcagtggattaccaacaccttgacttctttgttacagtgctaacatctttttttttgtgcaggtatccatgattattaagcagggtggaagttcagtattttgtcatttaaaaagattagttatataatgtctgcttccagccagtgagaaacatctagccatacctttcttatgcaagccattgagttatcaggactgtgaattaacactgtatgaataaatttctgtacaccttattgtttggccagaaggccaccaagtgtacttatatgtaatccttaaattttaaagtagctgtaatttttaaatatttctaaacttttcttaaaccactaaaattaagctcttactacttagtcaactatcctcagctgtattcgtactcaattgtcagtatggcacagattactgtattaaaatattctcctttcgtcttcatatttaccttctgaggtaattttttaacttaatgtgttactacaaagatttgcagatctttaatcaagcactatgttaatactgtaatatcagaatactatgttgcattatttaaaatgttcaaattgaatagattaaaaagtttttaaatgctattgcatcatataatttgctattcatccactatggcattgcatatcaatcagttaatacacttaatgttgcatgagtgatattttggtctgggtttcctcttaagattttagtttgtctgaattaaggaaaaatgtttttaatatacattcttattttgtcccacccctccagaaataagctggaaatcttaactttttggggggtcttttttggtgttttaatgggcccagaactgtggtttaaatttttatgtatgtattttcttttttgtggagtataaatttaaaaactggatttgggacctaaaatactcctcaggttgatgtattcatgaagttttaaaacatctttagttttcaaagtaaactggatatgtggaccttaaagttattgagtttaagctacaaattgtaacgtcattactggacatgtcagcatcaaccctctcaaaatagcttggtcactttatgaaggggcgttttaaagttgttgtttagcagtgacatttaatatggtccaattgcttttctttttaacgtgacaaaaagagaataaggaacaaacactattgctgccgaatgccataacactgagttgtacaaattgtgattgaggaaatgaaaaggtttatactttttaaaaaaaaaaaaacaaaaacaaaaaacaaaacttcaaatggaataaattattcatgaagccttcattgttgtgtcttattctgttgaaaatatttccatattaaatttgtgcaaaattagtagcaatatttttgtgtcattataaatggaaagggacagcctagaaactgattaatggtcttttaatttttctgaagtattttattttaaaaaggattttaatcacatacaaatgtacagtatgtagaataattgtatatttgtatacctaccaattccttgtaggctggccagttaggtattgtctagtccaaacaagctaccttcaaatatttaaagcttagctgtatcctatttttatttgatcataagaacaatgttcagaagtgagtaatccatcaaaaatagttctgcccatgttctgtaagcacacatttaaaatatttttgtccagacttaagccaagtaaggacatacctcaaaattattgtgatcattttgaaatagtttttgctgcaaaaattttaaaaatcctttaaaaggagttgtatgttgtttgaaccgcctatcctcggttattttctgtctgacagatctttaatcaagcactattatattacctctggtttgtttctatctttttttttttttttactatagtcttatgtatagcgaaaaactgcaaatcaagcttttttttaaagggggtattcacttgtaaaaccacacacatggatatttttattttaaacttcaaaatatatgaaagtttaggaaacgggaaaaatcacataattcagctacagccacaatggagcaccaatatgtattagtacattgataattttggtacatttgaaaatttggaataccaaacattcatagctcactgcagccttgaactcctgggctcaagcagtcctccttgcctcagcctccttagtagctgggacttcaggtgcatgccaacacacctggctagttttattttttgtagagatgggatctcgctatgttgcccgagtctcaaactcctggcctcaagccatcctctcgctttggcctcccaaagcattgagattacagtcatgagttgctgccatacctggctaaatctaactgttttgagtgtattcctgaggtgtctattctgttattctgcttttgccaatatcttcctgtctactgtaggggagttatcaatcctggactgaagattaagaacctctacccttagtgtactatagctataaccagaaattctgcttgagattaatagaaattgatactgttagagctgggttttgttttgtcttttccttctagagcaacccaacagaaccgtcaagaatgaccttctgtttagtttaaagtctaggccgggcacggtggttcacgcctgttttcctagcactttgggaggctgaggtgggcgtatcacctgaggttgggagttggagaccatcctgaccaatatggtgaaacccgtctactaaaaatacaaaaattagccaggctgtgttggcatgcacctgtaatctcagctacttgggaggctgaggcgggagaatcacttgaacccaggaggcaaggttgcagtgagccgagatcacaccgctgccctccagccttggtgacagagtgagaagatcctgtctcaaaaaaaaaaaaaaaaaaaaagtttaaaggctgatgctttaaagacttccttattttgctcctacctactacagagaaaaaaattagaagtgataaatttaaatcatgccacgtgtccaagccatataatgtcttacagatttgcattcggaatgtgtgagtttaagtcttggttttgtcgttttctttttgtttggagcatatctgatcagtaagaccaacagttaccttctacaaaagccacttggtccctagagaacaaccatttgtcccttgtcactgtgcatgacactaccatctatcctgttgtgcaaaccataaactcttccttgcaaccattcatcaaaaactatcagttttgtgtactatcaaatatgttcatttctatttctgctgtcctgatcttagtctaaattagcattatccattgctatataacattagataaaactaccttatctgagtggaccattgcaatagacaggtactcctatctgatctctacactcactgtggtccttggtagctgaaaacctttagtagctgctgcttgctctaaagatgaatacagtctcaaaatgggcctctatgttttcctccttgctttttagtcatttgagttccttgaaagacccatgggtattttttgccttaaagcttccacctgatttccacattacacccttgcttcagatcaggctcccttgttacacactcttattgtaataccctatatggagcctttgttgtgtttttttcttttttttttttctttttgagacagagtctcgctctgttgcccaggctggagtgcagtggcgtgatctctgctcactgcaacctccgcctcccgggttcaagcaattctcctgcttcagcctcccaagtagctgggactaggcgcacggtgcaatacccggctaattttttgtattttagtagagatggggtttggccacgttggccaggctggtcttgaactcctgccctcaggtgatctgcccgcctcaacctccctaagtgctgggattacaggcatgagccacctgcacctggcctgtagtgtttttcttagtttacaattgtatgatttttattttatttatttttgagacaatttcactcttgtcgcccaggctggagtgcaatggcacgatcttggctcattgcaacctccacctcccgagtacaagcaattctcctggctcagcctccccgagtagctgggattacaggtgcctgccaccactccctgctaatttttttgtatttttagtagagatggggtttcaccatgttggccagactggtcccaaacttctgatctcaggtgatccacctgcctcagcctcccaaagtgctgggattacaggcgtgagccaccacacccggtcaattgtatgattatttgtcatcaccagacaactctatgagggcagaaattagatctattttgctcatcattgtatctccagagtccaacacaatgcccagcattggagtaaggtatttaaatattttaaaaaaattttttttgagagacagggtctccctctgtcacccaggctggggtgcagtggcaccctcatggctcactctaacagcctcctgggctcaagcagtcagaactacaggtatgtgctaccacacctagctaatttttgtattttttttatggagatggaggtctcgccatgttgcccaggctggtcctggcctcaagcagtcctcccatcttggcctcccaaagtgctgggattacaggcgtgagccactgtgcctggccaacttgagtatttttgaataaaagcatttttgaattgagtttttgtgataaaacacctcaaactacagaactttgctgaagtgtgttttgcaaatacttttaatgaagttataaaattctaactactttggactcgttttaatattagaagtagtttaggatcataggattaggattcctcagttgttaggtttgccacatttgtgaacttgggcaaaacacttaacctcttgaagtcacaagttgttcatttgtaaaagaacataactatatctttctaattagctttgttaacctcaaaggaaattgcaaaaattttgaaaattataaaatattagctggatgtggtggtgcacacctgtagccccagttacttggggaggctgaggtgggagcatcactcgagcctagaaagtcgagggtgtagtgggccatgatcgtgcaactgcactccgcctgggcgatggagtgagaccctgtctcaaaaaaaatttataaaagtgtgagagatgattgtttaatacttacgctctctagaagagccaaattcagaataaactaaggtttacaagagaatgtctacttggaaacatgaacataataggtggataattaaaggcaacaaaaaggacttttaaatatgttccaataagagtacagatgggtaagataacaaaaagtatttagacctgactggactcagtggctcatgcctgtaatcccagcactttgggaggccaaggcgggaggatcacttgaggtcaggagttcaagaccagcctggacgacacggtgaaaccccgactctactaaaaatacaaaaaaaatttagccgggcatggtggcaggcccctgtagtcccagctattcagaaagcgatggcaagggaatcgcttgtacccaggagctggaggttgcagtgagccgagatcgagccactgcgctccagcctgagcgacagaccgagactccgtctcaaaaaaaaaaaaaaaaaattatttagatctattcagatttacctcctttctgtccctagccccacccctccacccccagctcagcttgggtcttcaagctctaaataacatgcttatgatagaattcaaaccaaagatagttaacagatttcaaggagctagttagttgctcaagtctctggatccacaagaattacatcttgggtgctgaaggaacttgcagatatgatttcagaaatggtgtgggaaatggaaaggtcctgccaaagtgaaaatgagcaactttctcagttttagtttttttaatgtaggtcccagaaattcttttttttttttttttttttttttttgagatggagtctcactctgttgcccaggctggagtgcggtggcgcaacctcagctcgctgcaacctccacctcctgggttcaagagatcctcctgcctcagcctcgagtagctgggattacaggtgcccgccaacacgccccgctaatttttttgtgtttttagtacagacagggtttcaccatgcttgccaggctgggtttgaactcctgacctcaagtgatccgcccgcctcagcctcccaaagtgctaggattacagaagtgagccaccgcgcccagccaggtcccagaaattctaacaaatttacctaactttaccaacaagttaattagaaactggcatagtttcactaaaacactgtttgtttgtacaataaaataatctactatacactagttatgagatacaaatctcgagccaggcgtggtggctcacgcctgttatcccagcattttggaaggccgaggcaggtggatcacttgaggtcaggggttcgagaccagcctgggaaannnnnnnnnnnnnnnnnnnnnnnnnnnnnnnnnnnnnnnnnnnnnnnnnnnnnnnnnnnnnnnnnnnnnnnnnnnnnnnnnnnnnnnnnnnnnnnnnnnnnnnnnnnnnnnnnnnnnnnnnnnnnnnnnnnnnnnnnnnnnnnnnnnnnnnnnnnnnnnnnnnnnnnnnnnnnnnnnnnnnnnnnnnnnnnnnnnnnnnnnnnnnnnnnnnnnnnnnnnnnnnnnnnnnnnnnnnnnnnnnnnnnnnnnnnnnnnnnnnnnnnnnnnnnnnnnnnnnnnnnnnnnnnnnnnnnnnnnnnnnnnnnnnnnnnnnnnnnnnnnnnnnnnnnnnnnnnnnnnnnnnnnnnnnnnnnnnnnnnnnnnnnnnncactccagcctgggggacagagcgagactccgtctctctaaaaaaaaaaaaaaaaaagagagatacaaacctctgaccttaagccttcagtatatttggaaacacacttgtatgaacataattagttcgacaagtcctataaagtgctatgaataacaatgcagtacatacctaaaagagagtaactggaatcaatctcttattttatttattattattattactttttagagacggagtctcgctctgtcgcccaggctggagtgagtggcgcaatctcggctcactgcaagctccgcctcccgggttcacaccattctgcctcagcctcttgagtagctgggactacaggcgcctgccaccacgccaggctaatttttttgtatttttagtagagatggggtttcactatgttagccaggatggcctcgatctcctgacctcgtgattggcccacctcagccttccaaagtgctgggattacaggcgtgagccaccatgcctggccctcatcttttattttgacagtattgataaactaattatgagaatgaacattcagcaggttatttagtaaaattccatggtatcttttttttttttaacttttaggtttaggggtacatgtggaggcttgttatataagtaaacttgtgtcatgggggtttgttgtacagattatttcatcacccaggtattaaacctagtttccaatagttatttttccttctccttagcctccttccacccccaccctccaccctcaagtagaccctattgtctgttgttcccttctttgtgtccatgagttctcatcattcagctaccacttttaagtgagaacacgtggtatttggtgttctgttcctgtattagcttactaaggataacagcctccagctccatccatgttcctgcagaagacatgatctcattcttttttatggctgcacagtattccatggtatatatgtacacattttctttatccaatctgtcattggtgggcatttagatttaattctatgtctttgctactgtgaattgtgctgcaatgaacatgcacgtgcatgtgtctttatggtagaatggtttatattcctctggatatataaccagtaatgacatcgatgggtcaaatggtatttcgagctctttgaggaattgccacactacttttcacattgttgaactaatttatactcctaccaacagtgtgtaagtgttgccttttctctgcaaccttgccagcatctgttcttctttggcattaaaaaaaaaaaaaaaaattgcaaccgggcacagtggctcatgcctctaatcccagcactttgggaaaccaagacgggtggatcactgggagttggagaccagcccgcccaatatggtgaaaccctgtatttactaaaaatacaaaaaaaaattagccgggcatggtggtgagcgcctgtaatcccagctactcaggaggctgaggcagaagaattgcttgaacccgggaggtggaggttgcagcaatctgagattgcgccactgcactccagcctgggtgacagagcgagactccatctcaaaaaaaaaaaaaaaaaaaaaaaaaaaaggctgggcgcggtggctcacgcctggactcccagcactttgggaggccgaggcgggcggatcacgaggtcaggagatcgagtccatcctggccaacatggtaaaaccccgtctctactaaaaatacaaaaaattagccggtcgtggtggcaggcgcctgtagtcccagctacttgagaggctgaagcaggagaatggcgtgaatgccggaggtggagcttgccagtgagtcgagatcgtgccactgcactccatcctgggcgacagagcgagactccatctcaaaaaaaaaaaaatttgatagtcttctttgtatgtttctgattgtagtatatgtgctgccaaagcgagcactatttttttgactttttaaaaatactcattctgactggtgtgagatatctcattgtggttttgatttgcatttttctaatactcagagatatttacctgtttttcatacacttgttggccgcctgtatgtcttcttttgaaaagtggatgtttatgttctttgcccacttttttttttttttttttgagacggcgtctcgctctgtcacccagggtggagtgcagtggcgtgatcttggctcactgaaacctccgcctcccgggttcaagcaattctcctgcctcaacctcccgagtagctgggattacaggtgcacgccaccatgctattttttttttttttttttttttggatttttagtaaagacggggcttcaccatgttggccaggcttgtgtcaaactgctgaccttgtgatccacctgcctcgacctcccaaagtgctgggattacaggcgtgagccacagtgcccggcctctttgcccactttttaatggggctgtctttttttttttttttttgatggagtttcgctcttgttgcccaggctggagttcaatggcacaatctcggctcaccacaacctctccctcccgggttcaagcgattttcctgcctcagcctcctgagtagctggaattacaggcatgcgccactatacccgactaattttgtatttttagtagagacaggatttctccatgttggtcaggctggtcttgaactctcgacctcaggtgatccgcccgccttggcctcccaaagtgctgggattacagccatgagccactgtgcctggccagggctgtctttctcttctacatttttttaaagtttcttatagatgccggatgttacacatttgtcagaagtcacagaagacacaaatggaaaaacatcccatgctgatggatgggaagaatcaatatcattaaaatagccatactttccaaagcaatttacagattcagtgctattcctatcaaactaccaatgacattcttcacagaactagaaaaagctattgtaaaatttgtatggaaccaaaaaagagcccgtatagctgaggtaatcctaagcaaaaagaacaaagctggaggcctcatgttacccaacttcaaactatgctacggggctacagtaaccaaaatagcatggtactggtacaaagacagccacatagaccaatggaacagaatagagagcccagaaaaaaggccacacatctacgaccatctgatctttaacaaagctgacaaaaataagcaatggggaaaagactccctattcaataaatggtgctgggataattggctagtcctatgcagaagattgaagctggacccattccttacaccatataaaaaatcaactcaagttggattaaagacttaaatgtaaacccccaaattgtaaaaatcctggaacacaacctaggcaataccattctggacataggaacaggaaaagattttataacaaagacacaaaaaccaattgtaacaaaagcaaaaattgacaaatgggatctaattaaacttaagagcttctgcacagcaaaagaaactatcaacagagtaaacagacaacctgcagaatgggagaatatttgcaaactatgcatcgtggtatctttatgcttgaatcattaattcaacaaagtaagttaagtgtcgtactgtgcctttggcaaggaactaaaatatggtccctgctctcaaaatacttccttttttttttttcttttgagacggagtctcactctgtcccccaggctggaatgcagtgacacgatctcagctcactgcaagctccgcctcctgggttcatgccattctcctgcctcagcctcccgagtagctgggactacaggcgcccgccaccacacccggctaattttttgtatttttagtagagacagggtttcactgtgttagccaggatggtcttgatctcctgacctcatgatccacccatctcggcctcccaaagtgctgggattacaggggtgaaccaccgtgcccggccctctcaaaatactttttagtgggagagacagagaagttctaacaattacaatataatgtgttaagtagtatagctgaaagaagcaaaaggtgccttgagagcatagaatagggatacctgataagttaaagggtaggtggtttgtcagggaaaggtctcttagcaagggaacactggaggtgagacttaaaggacacttaggagtttgcattaaaaaagagaatgaaaagcattctagacaggaggaactgtgatgagaaggtccaagaatattgagaaggatttgagacataaacagttccaactgactaaaatgacaccatggtgggatacggcaggactccaagctagagttttaagtcagaccataaaaatctgtttttgggttgggcgcagtggctcaagcctgtaatctcagcactttgggaggc

SEQ ID NO: 2883 - DNA, 10130 bp, Homo sapiens
gtttctctctctggtcggaggcggcggtaatggcggatggtgggttgtggcgccggcggcggctgctgtgagggacgatgagtgcctccttcgtgccgaacggggccagcctggaagattgtcactgtaacctcttctgcctggctgacttgacaggaattaagtggaaaaaatatgtatggcaaggcccaacttctgcccctattctgtttcctgtgacagaagaagaccccattttgagcagttttagtcgctgccttaaggcagatgtacttggtgtttggcggcgagatcaaagacctggaagaagagaattgtggatattttggtggggtgaagaccccagttttgctgaccttattcaccatgacttatcagaagaagaagatggagtgtgggagaatggactttcctatgaatgccgtactctgcttttcaaagcagttcacaatctattggaacggtgtttaatgaacaggaattttgtacgtattggcaagtggtttgtaaagccttatgaaaaagatgaaaaacctataaataaaagtgaacacttgtcctgctccttcacctttttcttgcatggagacagcaatgtttgtaccagtgtggaaattaaccaacatcaacctgtataccttctcagtgaagagcatatcacccttgctcaacagtctaatagcccatttcaagttatcttatgcccatttggactaaatggcactctcacaggacaggcattcaagatgtctgattcagctacaaaaaaattaattggtgaatggaaacagttctatcctatctcatgttgcttgaaggagatgtctgaagaaaaacaggaagatatggattgggaagatgattctttagctgcagtagaagttcttgttgctggtgtccgaatgatctacccagcatgctttgttctagtccctcagtcagacattcctactcctagccctgtgggatccactcactgttcatcttcttgcttgggtgtccaccaagtgcctgcttccacaagagatcctgctatgtcttcggttacgcttacaccacctacgtctcctgaggaagtccaaacagttgatcctcagtctgtccagaagtgggtcaaattttcttcagtatctgatggcttcaactccgatagtactagccaccatggtgggaaaatacccagaaaattagcaaatcatgtggtggatagagtttggcaagaatgcaatatgaacagagcacagaacaagaggaagtattctgcttcatcaggtggtctatgcgaagaagcgacagctgctaaagtggcatcctgggattttgttgaagccacacaaagaacaaattgcagttgtttgaggcacaaaaatctcaagtcaagaaatgctggacaacaaggacaggcaccatctttaggtcagcaacaacaaatacttcctaagcacaagaccaatgagaagcaagaaaagagtgaaaagccacagaaacgccccttgactccttttcaccatcgtgtgtctgttagtgatgatgttggcatggacgcagattcagccagccaaagacttgtgatctctgctccagacagtcaagtgagattttcaaatatccgaactaatgatgtagcaaagactcctcagatgcatggcaccgaaatggcaaattcacctcaaccacccccacttagtcctcacccttgtgatgtggttgatgaaggagtgactaaaacaccttcaactcctcagagtcaacatttttatcaaatgccaacaccagatcccttggttccttctaaaccaatggaagataggatagacagtttgtcccagtctttcccacctcaatatcaggaagctgtagaacctacagtatatgttggtacagcagtaaacttggaagaagatgaagccaatatagcctggaagtattacaagttcccaaagaaaaaagatgtagagtttttaccacctcaacttccaagtgataaattcaaggatgatccagttggaccttttggacaggaaagtgtaacatcagttacagagttaatggtgcaatgtaagaaacctttaaaagtttctgatgaattagtgcagcaatatcaaattaaaaaccagtgtctttcagcaatagcatctgatgcagaacaagaacctaaaattgatccatatgcatttgttgaaggagatgaggaattcctttttcctgataaaaaagatagacaaaatagtgagagagaagctggaaaaaaacacaaggtagaagatgggacatctagtgtaacagtgttatcacatgaagaagatgctatgtcattatttagtccctctatcaagcaagatgctccacgccctactagtcatgcccgtcctccatcaacaagtttgatttatgactcagacctggctgtctcttatactgaccttgataatctcttcaattctgatgaagatgaactaacacctggatctaaaaaatcagcaaatggatcagatgataaagccagctgcaaggaatcaaagacaggaaatctggacccgttatcttgcataagcactgcagatcttcataaaatgtatcctacaccaccatcattggaacaacatattatgggattttccccaatgaatatgaataataaagaatatggtagtatggatacaacacctggaggaactgttctagaaggaaatagttctagtataggagcgcagttcaaaattgaggttgatgagggattctgtagccccaaaccttctgaaattaaagatttttcttatgtctataagcctgaaaattgtcaaattctagtgggatgttccatgtttgcacctctaaaaactctaccaagccaatatctgccccctatcaaattgccagaagagtgtatttaccgtcagagttggactgttggaaaattggaattgctttcttcagggccttcaatgccattcatcaaagagggtgatggaagtaatatggatcaagaatatggcactgcttatacacctcaaactcatacttcttttgggatgcctcctagcagtgcacctcctagtaacagcggagcaggaattcttccttctccatccacccctcggtttccaactccaaggactccaaggactcctcggactcctcgtggagctggtggacctgctagtgctcaaggttcagtcaaatatgaaaattcagacttgtattcaccagcttctaccccatctacatgcagaccccttaattctgttgaacctgcaactgtcccttccatccctgaagcacacagtctttatgtaaacctcatcctttcagaatcagttatgaatttgtttaaagactgtaactttgatagttgttgcatctgtgtttgcaacatgaacatcaagggtgccgatgttggagtttacattccagatccaacgcaggaagcacaatataggtgtacctgtggcttcagtgctgtcatgaacagaaaatttggaaacaattcaggattatttcttgaagatgaactagatatcataggacgcaatacagactgtggcaaagaagcagaaaaacgttttgaagctctcagggctacctctgctgaacatgttaatggaggactaaaggaatctgaaaaattatctgatgatttgatattattgctacaagatcagtgcactaatttattttcaccctttggagcagcagaccaagatccttttcctaaaagtggtgtaattagcaattgggtacgtgttgaagagcgtgactgttgcaatgactgctaccttgcattagaacatgggcgtcagttcatggataacatgtcaggaggaaaagttgatgaagcacttgtgaaaagttcatgcttacacccctggtccaaaagaaacgatgtgagtatgcagtgctcacaggatatacttcgaatgctcctctctcttcagccagttcttcaggatgccattcagaaaaaaagaacagtaagaccttggggtgttcagggtcctctcacttggcaacaatttcataaaatggctggccgaggctcttatggaactgatgaatccccagaaccactgccaatccccacatttttgttgggttatgattatgattatctggtgctttctccatttgctcttccttattgggagagacttatgctggaaccctatggatctcaaagagatatagcctatgttgtactgtgtccagaaaatgaagccttgttaaatggagcaaaaagcttttttagagatcttactgcaatatatgagtcctgtcgattaggtcaacatagacctgtttctcgactgttaacagatgggatcatgagagttggatctactgcatcaaagaaactatcagaaaagttggtagcagaatggttttctcaggcagctgatggtaacaatgaagcattttctaaactcaagctttatgcacaagtctgcagatatgacctaggtccttatcttgcttccctgccattggacagctctctactttcccagccaaatttagttgcccctacaagtcagtctttgattactccacctcagatgacaaatactggaaatgctaatactccatctgccaccttagcatctgcagcgagcagcactatgacagtgacttcaggtgttgccatatctacttcagttgccacagctaattcaactttgaccacagcttcaacttcatcttcatcatcctccaacttgaatagtggagtatcatcaaataaactaccttcgtttccaccctttggcagtatgaacagtaatgctgcaggatccatgtctacacaagcaaatacagttcagagtggtcagctaggagggcaacagacatcagctctacagacagctgggatttctggagaatcatcttcacttcccactcagccgcatcctgatgtgtctgaaagcacgatggatcgggataaagtgggaatccccacagatggtgattcacatgcagtcacgtatccacctgcaattgttgtttatataattgatccttttacatacgaaaatacagacgagagcactaactcttctagtgtgtggacattggggctacttcgatgctttctagaaatggtccagactcttcctcctcatatcaagagtactgtttctgtacagattattccttgtcagtacctgttgcaacctgtgaagcatgaagatagagaaatctatccccagcatttaaaatccctggctttttcggcctttacccagtgtcggaggccacttccaacatcaaccaatgtgaaaacattgactggctttggtccaggtttagccatggaaactgcccttagaagtcctgatagaccagagtgtattcgactttatgcacctccttttattctggctccagtgaaggacaaacagacagagctaggagaaacatttggagaagctggacagaaatataatgttctttttgtgggatactgtttatcacatgatcaaaggtggattcttgcatcttgcacagatctatatggagaacttttagaaacttgtatcattaacatcgatgttccaaatagggctcgtcggaaaaaaagttctgctagaaaatttggtctacagaaactttgggagtggtgcttaggacttgtacaaatgagttcattgccatggagagttgtaattggtcgtctaggaaggattggtcatggagaattgaaagattggagctgtttgctgagtcgtcgaaacttgcagtctctaagtaaaaggctcaaagacatgtgtagaatgtgtggtatatctgctgcagactcccctagcattctcagtgcttgcttggtggcaatggagccgcaaggctcttttgttattatgccagattctgtgtcaactggttctgtatttggaagaagcacgactctaaatatgcagacatctcagctaaataccccacaggatacatcatgtactcatatacttgtgtttcctacttctgcttctgtgcaagtagcttcagctacttataccactgaaaatttggatttagctttcaatcccaacaatgatggagcagatggaatgggtatctttgatttgttagacacaggagatgatcttgaccctgatatcattaatatccttcctgcttctccaactggttctcctgtacattctccaggatctcattacccccatggaggtgatgcgggcaagggtcagagtactgatcggctactatcaacagaacctcatgaggaagtacctaatattcttcagcaaccattggcccttggttactttgtatcaactgccaaagcaggtccattacctgactggttctggtcagcatgtcctcaagcacaatatcagtgtcccctttttcttaaggcctctttgcacctccacgtgccttcagtgcaatctgacgagctgcttcacagtaaacactcccacccacttgactcaaatcagacttcagatgtcctcaggtttgttttggaacagtacaatgcactctcctggctaacctgtgaccctgcaacccaggacagacgctcatgtctcccaattcattttgtggtgctgaatcagttatataactttattatgaatatgctgtgatcttcatttgatggaactgtgcaagaaaagaacaaggaaaaatggatgtttcgctgcaggattaagttacaattatcttctcagtgaaggtcatttgtgatggggtctaattcttattacttcaacaaatattgttttgacttggggggaggggctataaccctgctatttttcattgactctattgaactctttaggatgatgactgatcatacaaaacgtattataacattttcgtagcaaaattaaccttttttttttccagtcacagtatttgtgaaaagtaatgagccatagtacccagtcatgttaaatgaatattaaaagcatggagaggaaacatgaggaacaatgaatttcaacatatggcttcagaacatgaagatgttcttgtatggattatagtatctagtattcaaaaatgcctgcatctctgccttcttgctttaaagcaattggtctaaaatatatgtaatcgtcttaattaaaaagttgcagtagggttgcttttagagtattatttttttgtaagggggtgggtgggacagtaaatttgtattgtctcgatgtacagtttaacggggatagagggggaataatgtccataccattgtgtgtggaggatttacagctaagctgtagttgcagagtacatgtacagtaatgaagttcactgtgtttataaattgaaaaggtaccaggtcttacagcattttatatatcacatctttacagaataacatgatggcaatatacaagtggtattgttaggtggtttaacttagaataaaatgagaattcttcagttatattttgtactatggtttagggctatgactaatatttcaggccatttccggtgaaagaaacttagttttacaagaaaaaccatttgctactgaatgcttaaactaattttagtgtttaatgttacatgcttaaatttttttcagttttaacagtggcatatttaggcatggaaatattattatgaaatttattttcaggatctgctataaggttgaaatttagcccagctctaggcattttacaaattatttttcaagcagtcattcttgattgtttgacttttttttttaaattaaagattgggaatgtatgtgagagtatgcatatgtatgggtgtgtgtgtgtgcgcgcaatcaaactgtggtgtaaatagattctcagtgaattctggtattcagactctattccactagtgaaagaaccattttttaaacttcccttgccttttttatttatttaattttcttggtttggagatgtcagtcccaaacaccagagtctgtacttttctataacacagctcagattaaggtagggcatatgccaaggaggttctcacctccctaaagaagggacttgaattttagggactttaattcacccctccttcaatacaactttcccccttcttgtttgcacatgccaagataactgcttttatgcaggctgtacccccttgaaaaatcctttctacagtgctgctcacaaaagagcccaagttcgcctcctacctgcattgctgacttgaattcacagtcgccgagtctacctagctttcttggaagcagtctagcaaaatttctatttgtacgttcactaattatctacaaggacaaaatcagttgtatttacaaaactctacttcagtgtttgttttagtttttttttttactgaaacttgtttttgtgaatactctgtgcttagaattaaatatcactttcttatgaacaacataacttcttcagattgtgtatatgaaaacattagcaagtcttgttttttctatgaagcaaacacaattggtgacaaaggttgtcaatcatttcttcaaaattataatgcagttctaatggtcagcatattttgatattaaatttaaagatcacctctctgcatttgtttttaaattatgctaatacaccacacattatgttggtatgttttgttctgtactttctttaaaaaaaaaaaaaaaacttgtctgagatttgaaggaaaatgtgcttatttggaatttccataaaaagagtatcctttttatacacttaatagtgactttacaaaataaaagttatattctcagttgtttaaaatcactaacctatgataaccacacctcaatttgaaagtagatttaaaattattccctgacaggttatttaatatggagccataaggagggaacccagtacacaattattttttatttgggaatcagggaatagttcccaaatatacaggatttattgataagattttttttcttcccttcatatatccattcaaactcaatggaaagttattaaataaccattagttatataatgtctgcttccagccagtgagaaacatctagccatacctttcttatgcaagccattgagttatcaggactgtgaattaacactgtatgaataaatttctgtacaccttattgtttggccagaaggccaccaagtgtacttatatgtaatccttaaattttaaagtagctgtaatttttaaatatttctaaacttttcttaaaccactaaaattaagctcttactacttagtcaactatcctcagctgtattcgtactcaattgtcagtatggcacagattactgtattaaaatattctcctttcgtcttcatatttaccttctgaggtaattttttaacttaatgtgttactacaaagatttgcagatctttaatcaagcactatgttaatactgtaatatcagaatactatgttgcattatttaaaatgttcaaattgaatagattaaaaagtttttaaatgctattgcatcatataatttgctattcatccactatggcattgcatatcaatcagttaatacacttaatgttgcatgagtgatattttggtctgggtttcctcttaagattttagtttgtctgaattaaggaaaaatgtttttaatatacattcttattttgtcccacccctccagaaataagctggaaatcttaactttttggggggtcttttttggtgttttaatgggcccagaactgtggtttaaatttttatgtatgtattttcttttttgtggagtataaatttaaaaactggatttgggacctaaaatactcctcaggttgatgtattcatgaagttttaaaacatctttagttttcaaagtaaactggatatgtggaccttaaagttattgagtttaagctacaaattgtaacgtcattactggacatgtcagcatcaaccctctcaaaatagcttggtcactttatgaaggggcgttttaaagttgttgtttagcagtgacatttaatatggtccaattgcttttctttttaacgtgacaaaaagagaataaggaacaaacactattgctgccgaatgccataacactgagttgtacaaattgtgattgaggaaatgaaaaggtttatactttttaaaaaaaaaaaaacaaaaacaaaaaacaaaacttcaaatggaataaattattcatgaagccttcatt

SEQ ID NO: 2884 - protein, 2162 aa, Homo sapiens
MSASFVPNGASLEDCHCNLFCLADLTGIKWKKYVWQGPTSAPILFPVTEEDPILSSFSRCLKADVLGVWRRDQRPGRRELWIFWWGEDPSFADLIHHDLSEEEDGVWENGLSYECRTLLFKAVHNLLERCLMNRNFVRIGKWFVKPYEKDEKPINKSEHLSCSFTFFLHGDSNVCTSVEINQHQPVYLLSEEHITLAQQSNSPFQVILCPFQGTLTGQAFKMSDSATKKLIGEWKQFYPISCCLKEMSEEKQEDMDWEDDSLAAVEVLVAGVRMIYPACFVLVPQSDIPTPSPVGSTHCSSSCLGVHQVPASTRDPAMSSVTLTPPTSPEEVQTVDPQSVQKWVKFSSVSDGFNSDSTSHHGGKIPRKLANHVVDRVWQECNMNRAQNKRKYSASSGGLCEEATAAKVASWDFVEATQRTNCSCLRHKNLKSRNAGQQGQAPSLGQQQQILPKHKTNEKQEKSEKPQKRPLTPFHHRVSVSDDVGMDADSASQRLVISAPDSQVRFSNIRTNDVAKTPQMHGTEMANSPQPPPLSPHPCDVVDEGVTKTPSTPQSQHFYQMPTPDPLVPSKPMEDRIDSLSQSFPPQYQEAVEPTVYVGTAVNLEEDEANIAWKYYKFPKKKDVEFLPPQLPSDKFKDDPVGPFGQESVTSVTELMVQCKKPLKVSDELVQQYQIKNQCLSAIASDAEQEPKIDPYAFVEGDEEFLFPDKKDRQNSEAGKKHKVEDGTSSVTVLSHEEDAMSLFSPSIKQDAPRPTSHARPPSTSLIYDSDLAVSYTDLDNLFNSDEDELTPGSKKSANGSDDKASCKESKTGNLDPLSCISTADLHKMYPTPPSLEQHIMGFSPMNMNNKEYGSMDTTPGGTVLEGNSSSIGAQFKIEVDEGFCSPKPSEIKDFSYVYKPENCQILVGCSMFAPLKTLPSQYLPPIKLPEECIYRQSWTVGKLELLSSGPSMPFIKEGDGSNMDQEYGTAYTPQTHTSFGMPPSSAPPSNSGAGILPSPSTPRFPTPRTPRTPRTPRGAGGPASAQGSVKYENSDKPASTPSTCRPLNSVEPATVPSIPEAHSLYVNLILSESVMNLFKDCNFDSCCICVCNMNIKGADVGVYIPDPTQEAQYRCTCGFSAVMNRKFGNNSGLFLEDELDIIGRNTDCGKEAEKRFEALRATSAEHVNGGLKESEKLSDDLILLLQDQCTNLFSPFGAADQDPFPKSGVISNWVRVEERDCCNDCYLALEHGRQFMDNMSGGKVDEALVKSSCLHPWSKRNDVSMQCSQDILRMLLSLQPVLQDAIQKKRTVRPWGVQGPLTWQQFHKMAGRGSYGTDESPEPLPIPTFLLGYDYDYLVLSPFALPYWERLMLEPYGSQRDIAYVVLCPENEALLNGAKSFFRDLTAIYESCRLGQHRPVSRLLTDGIMRVGSTASKKLSEKLVAEWFSQAADGNNEAFSKLKLYAQVCRYDLGPYLASLPLDSSLLSQPNLVAPTSQSLITPPQMTNTGNANTPSATLASAASSTMTVTSGVAISTSVATANSTLTTASTSSSSSSNLNSGVSSNKLPSFPPFGSMNSNAAGSMSTQANTVQSGQLGGQQTSALQTAGISGESSSLPTQPHPDVSESTMDRDKVGIPTDGDSHAVTYPPAIVVYIIDPFTYENTDESTNSSSVWTLGLLRCFLEMVQTLPPHIKSTVSVQIIPCQYLLQPVKHEDREIYPQHLKSLAFSAFTQCRRPLPTSTNVKTLTGFGPGLAMALRSPDRPECIRLYAPPFILAPVKDKQTELGETFGEAGQKYNVLFVGYCLSHDQRWILASCTDLYGELLETCIINIDVPNRARRKKSSARKFGLQKLWEWCLGLVQMSSLPWRVVIGRLGRIGHGELKDWSCLLSRRNLQSLSKRLKDMCRMCGISAADSPSILSACLVAMEPQGSFVIMPDSVSTGSVFGRSTTLNMQTSQLNTPQDTSCTHILVFPTSASVQVASATYTTENLDLAFNPNNDGADGMGIFDLLDTGDDLDPDIINILPDTGSPVHSPGSHYPHGGDAGKGQSTDRLLSTEFEVPNILQQPLALGYFVSTAKAGPLPDWFWSACPQAQYQCPLFLKASLHLHVPSVQSDELLHSKHSHPLDSNQTSDVLRFVLEQYNALSWLTCDPATQDRRSCLPIHFVVLNQLYNFIMNML

SEQ ID NO: 2885 - DNA, 1193 bp, Homo sapiens
gtttctctctctggtcggaggcggcggtaatggcggatggtgggttgtggcgccggcggcggctgctgtgagggacgatgagtgcctccttcgtgccgaacggggccagcctggaagattgtcactgtaacctcttctgcctggctgacttgacaggaattaagtggaaaaaatatgtatggcaaggcccaacttctgcccctattctgtttcctgtgacagaagaagaccccattttgagcagttttagtcgctgccttaaggcagatgtacttggtgtttggcggcgagatcaaagacctggaagaagagaattgtggatattttggtggggtgaagaccccagttttgctgaccttattcaccatgacttatcagaagaagaagatggagtgtgggagaatggactttcctatgaatgccgtactctgcttttcaaagcagttcacaatctattggaacggtgtttaatgaacaggaattttgtacgtattggcaagtggtttgtaaagccttatgaaaaagatgaaaaacctataaataaaagtgaacacttgtcctgctccttcacctttttcttgcatggagacagcaatgtttgtaccagtgtggaaattaaccaacatcaacctgtataccttctcagtgaagagcatatcacccttgctcaacagtctaatagcccatttcaagttatcttatgcccatttggactaaatggcactctcacaggacaggcattcaagatgtctgattcagctacaaaaaaattaattggtgaatggaaacagttctatcctatctcatgttgcttgaaggagatgtctgaagaaaaacaggaagatatggattgggaagatgattctttagctgcagtagaagttcttgttgctggtgtccgaatgatctacccagcatgctttgttctagtccctcagtcagacattcctactcctagccctgtgggatccactcactgttcatcttcttgcttgggtgtccaccaagtgcctgcttccacaagagatcctgctatgtcttcggttacgcttacaccacctacgtctcctgaggaagtccaaacaggaggaagtattctgcttcatcaggtggtctatgcgaagaagcgacagctgctaaagtggcatcctgggattttgttgaagccacacaaagaacaaattgcagttgtt

SEQ ID NO: 2886 - protein, 370 aa, Homo sapiens
MSASFVPNGASLEDCHCNLFCLADLTGIKWKKYVWQGPTSAPILFPVTEEDPILSSFSRCLKADVLGVWRRDQRPGRRELWIFWWGEDPSFADLIHHDLSEEEDGVWENGLSYECRTLLFKAVHNLLERCLMNRNFVRIGKWFVKPYEKDEKPINKSEHLSCSFTFFLHGDSNVCTSVEINQHQPVYLLSEEHITLAQQSNSPFQVILCPFQGTLTGQAFKMSDSATKKLIGEWKQFYPISCCLKEMSEEKQEDMDWEDDSLAAVEVLVAGVRMIYPACFVLVPQSDIPTPSPVGSTHCSSSCLGVHQVPASTRDPAMSSVTLTPPTSPEEVQTGGSILLHQVVYAKKRQLLKWHPGILLKPHKEQIAVV

SEQ ID NO: 2887 - DNA, 10467 bp, Homo sapiens
gtttctctctctggtcggaggcggcggtaatggcggatggtgggttgtggcgccggcggcggctgctgtgagggacgatgagtgcctccttcgtgccgaacggggccagcctggaagattgtcactgtaacctcttctgcctggctgacttgacaggaattaagtggaaaaaatatgtatggcaaggcccaacttctgcccctattctgtttcctgtgacagaagaagaccccattttgagcagttttagtcgctgccttaaggcagatgtacttggtgtttggcggcgagatcaaagacctggaagaagagaattgtggatattttggtggggtgaagaccccagttttgctgaccttattcaccatgacttatcagaagaagaagatggagtgtgggagaatggactttcctatgaatgccgtactctgcttttcaaagcagttcacaatctattggaacggtgtttaatgaacaggaattttgtacgtattggcaagtggtttgtaaagccttatgaaaaagatgaaaaacctataaataaaagtgaacacttgtcctgctccttcacctttttcttgcatggagacagcaatgtttgtaccagtgtggaaattaaccaacatcaacctgtataccttctcagtgaagagcatatcacccttgctcaacagtctaatagcccatttcaagttatcttatgcccatttggactaaatggcactctcacaggacaggcattcaagatgtctgattcagctacaaaaaaattaattggtgaatggaaacagttctatcctatctcatgttgcttgaaggagatgtctgaagaaaaacaggaagatatggattgggaagatgattctttagctgcagtagaagttcttgttgctggtgtccgaatgatctacccagcatgctttgttctagtccctcagtcagacattcctactcctagccctgtgggatccactcactgttcatcttcttgcttgggtgtccaccaagtgcctgcttccacaagagatcctgctatgtcttcggttacgcttacaccacctacgtctcctgaggaagtccaaacagttgatcctcagtctgtccagaagtgggtcaaattttcttcagtatctgatggcttcaactccgatagtactagccaccatggtgggaaaatacccagaaaattagcaaatcatgtggtggatagagtttggcaagaatgcaatatgaacagagcacagaacaagaggaagtattctgcttcatcaggtggtctatgcgaagaagcgacagctgctaaagtggcatcctgggattttgttgaagccacacaaagaacaaattgcagttgtttgaggcacaaaaatctcaagtcaagaaatgctggacaacaaggacaggcaccatctttaggtcagcaacaacaaatacttcctaagcacaagaccaatgagaagcaagaaaagagtgaaaagccacagaaacgccccttgactccttttcaccatcgtgtgtctgttagtgatgatgttggcatggacgcagattcagccagccaaagacttgtgatctctgctccagacagtcaagtgagattttcaaatatccgaactaatgatgtagcaaagactcctcagatgcatggcaccgaaatggcaaattcacctcaaccacccccacttagtcctcacccttgtgatgtggttgatgaaggagtgactaaaacaccttcaactcctcagagtcaacatttttatcaaatgccaacaccagatcccttggttccttctaaaccaatggaagataggatagacagtttgtcccagtctttcccacctcaatatcaggaagctgtagaacctacagtatatgttggtacagcagtaaacttggaagaagatgaagccaatatagcctggaagtattacaagttcccaaagaaaaaagatgtagagtttttaccacctcaacttccaagtgataaattcaaggatgatccagttggaccttttggacaggaaagtgtaacatcagttacagagttaatggtgcaatgtaagaaacctttaaaagtttctgatgaattagtgcagcaatatcaaattaaaaaccagtgtctttcagcaatagcatctgatgcagaacaagaacctaaaattgatccatatgcatttgttgaaggagatgaggaattcctttttcctgataaaaaagatagacaaaatagtgagagagaagctggaaaaaaacacaaggtagaagatgggacatctagtgtaacagtgttatcacatgaagaagatgctatgtcattatttagtccctctatcaagcaagatgctccacgccctactagtcatgcccgtcctccatcaacaagtttgatttatgactcagacctggctgtctcttatactgaccttgataatctcttcaattctgatgaagatgaactaacacctggatctaaaaaatcagcaaatggatcagatgataaagccagctgcaaggaatcaaagacaggaaatctggacccgttatcttgcataagcactgcagatcttcataaaatgtatcctacaccaccatcattggaacaacatattatgggattttccccaatgaatatgaataataaagaatatggtagtatggatacaacacctggaggaactgttctagaaggaaatagttctagtataggagcgcagttcaaaattgaggttgatgagggattctgtagccccaaaccttctgaaattaaagatttttcttatgtctataagcctgaaaattgtcaaattctagtgggatgttccatgtttgcacctctaaaaactctaccaagccaatatctgccccctatcaaattgccagaagagtgtatttaccgtcagagttggactgttggaaaattggaattgctttcttcagggccttcaatgccattcatcaaagagggtgatggaagtaatatggatcaagaatatggcactgcttatacacctcaaactcatacttcttttgggatgcctcctagcagtgcacctcctagtaacagcggagcaggaattcttccttctccatccacccctcggtttccaactccaaggactccaaggactcctcggactcctcgtggagctggtggacctgctagtgctcaaggttcagtcaaatatgaaaattcagacttgtattcaccagcttctaccccatctacatgcagaccccttaattctgttgaacctgcaactgtcccttccatccctgaagcacacagtctttatgtaaacctcatcctttcagaatcagttatgaatttgtttaaagactgtaactttgatagttgttgcatctgtgtttgcaacatgaacatcaagggtgccgatgttggagtttacattccagatccaacgcaggaagcacaatataggtgtacctgtggcttcagtgctgtcatgaacagaaaatttggaaacaattcaggattatttcttgaagatgaactagatatcataggacgcaatacagactgtggcaaagaagcagaaaaacgttttgaagctctcagggctacctctgctgaacatgttaatggaggactaaaggaatctgaaaaattatctgatgatttgatattattgctacaagatcagtgcactaatttattttcaccctttggagcagcagaccaagatccttttcctaaaagtggtgtaattagcaattgggtacgtgttgaagagcgtgactgttgcaatgactgctaccttgcattagaacatgggcgtcagttcatggataacatgtcaggaggaaaagttgatgaagcacttgtgaaaagttcatgcttacacccctggtccaaaagaaacgatgtgagtatgcagtgctcacaggatatacttcgaatgctcctctctcttcagccagttcttcaggatgccattcagaaaaaaagaacagtaagaccttggggtgttcagggtcctctcacttggcaacaatttcataaaatggctggccgaggctcttatggaactgatgaatccccagaaccactgccaatccccacatttttgttgggttatgattatgattatctggtgctttctccatttgctcttccttattgggagagacttatgctggaaccctatggatctcaaagagatatagcctatgttgtactgtgtccagaaaatgaagccttgttaaatggagcaaaaagcttttttagagatcttactgcaatatatgagtcctgtcgattaggtcaacatagacctgtttctcgactgttaacagatgggatcatgagagttggatctactgcatcaaagaaactatcagaaaagttggtagcagaatggttttctcaggcagctgatggtaacaatgaagcattttctaaactcaagctttatgcacaagtctgcagatatgacctaggtccttatcttgcttccctgccattggacagctctctactttcccagccaaatttagttgcccctacaagtcagtctttgattactccacctcagatgacaaatactggaaatgctaatactccatctgccaccttagcatctgcagcgagcagcactatgacagtgacttcaggtgttgccatatctacttcagttgccacagctaattcaactttgaccacagcttcaacttcatcttcatcatcctccaacttgaatagtggagtatcatcaaataaactaccttcgtttccaccctttggcagtatgaacagtaatgctgcaggatccatgtctacacaagcaaatacagttcagagtggtcagctaggagggcaacagacatcagctctacagacagctgggatttctggagaatcatcttcacttcccactcagccgcatcctgatgtgtctgaaagcacgatggatcgggataaagtgggaatccccacagatggtgattcacatgcagtcacgtatccacctgcaattgttgtttatataattgatccttttacatacgaaaatacagacgagagcactaactcttctagtgtgtggacattggggctacttcgatgctttctagaaatggtccagactcttcctcctcatatcaagagtactgtttctgtacagattattccttgtcagtacctgttgcaacctgtgaagcatgaagatagagaaatctatccccagcatttaaaatccctggctttttcggcctttacccagtgtcggaggccacttccaacatcaaccaatgtgaaaacattgactggctttggtccaggtttagccatggaaactgcccttagaagtcctgatagaccagagtgtattcgactttatgcacctccttttattctggctccagtgaaggacaaacagacagagctaggagaaacatttggagaagctggacagaaatataatgttctttttgtgggatactgtttatcacatgatcaaaggtggattcttgcatcttgcacagatctatatggagaacttttagaaacttgtatcattaacatcgatgttccaaatagggctcgtcggaaaaaaagttctgctagaaaatttggtctacagaaactttgggagtggtgcttaggacttgtacaaatgagttcattgccatggagagttgtaattggtcgtctaggaaggattggtcatggagaattgaaagattggagctgtttgctgagtcgtcgaaacttgcagtctctaagtaaaaggctcaaagacatgtgtagaatgtgtggtatatctgctgcagactcccctagcattctcagtgcttgcttggtggcaatggagccgcaaggctcttttgttattatgccagattctgtgtcaactggttctgtatttggaagaagcacgactctaaatatgcagacatctcagctaaataccccacaggatacatcatgtactcatatacttgtgtttcctacttctgcttctgtgcaagtagcttcagctacttataccactgaaaatttggatttagctttcaatcccaacaatgatggagcagatggaatgggtatctttgatttgttagacacaggagatgatcttgaccctgatatcattaatatccttcctgcttctccaactggttctcctgtacattctccaggatctcattacccccatggaggtgatgcgggcaagggtcagagtactgatcggctactatcaacagaacctcatgaggaagtacctaatattcttcagcaaccattggcccttggttactttgtatcaactgccaaagcaggtccattacctgactggttctggtcagcatgtcctcaagcacaatatcagtgtcccctttttcttaaggcctctttgcacctccacgtgccttcagtgcaatctgacgagctgcttcacagtaaacactcccacccacttgactcaaatcagacttcagatgtcctcaggtttgttttggaacagtacaatgcactctcctggctaacctgtgaccctgcaacccaggacagacgctcatgtctcccaattcattttgtggtgctgaatcagttatataactttattatgaatatgctgtgatcttcatttgatggaactgtgcaagaaaagaacaaggaaaaatggatgtttcgctgcaggattaagttacaattatcttctcagtgaaggtcatttgtgatggggtctaattcttattacttcaacaaatattgttttgacttggggggaggggctataaccctgctatttttcattgactctattgaactctttaggatgatgactgatcatacaaaacgtattataacattttcgtagcaaaattaaccttttttttttccagtcacagtatttgtgaaaagtaatgagccatagtacccagtcatgttaaatgaatattaaaagcatggagaggaaacatgaggaacaatgaatttcaacatatggcttcagaacatgaagatgttcttgtatggattatagtatctagtattcaaaaatgcctgcatctcttctcttatttattgtaagtttttaaatgtataaattgtcttatatttcttaacctcttttataaaaattttcctagaaggtttatactgccttcttgctttaaagcaattggtctaaaatatatgtaatcgtcttaattaaaaagttgcagtagggttgcttttagagtattatttttttgtaagggggtgggtgggacagtaaatttgtattgtctcgatgtacagtttaacggggatagagggggaataatgtccataccattgtgtgtggaggatttacagctaagctgtagttgcagagtacatgtacagtaatgaagttcactgtgtttataaattgaaaaggtaccaggtcttacagcattttatatatcacatctttacagaataacatgatggcaatatacaagtggtattgttaggtggtttaacttagaataaaatgagaattcttcagttatattttgtactatggtttagggctatgactaatatttcaggccatttccggtgaaagaaacttagttttacaagaaaaaccatttgctactgaatgcttaaactaattttagtgtttaatgttacatgcttaaatttttttcagttttaacagtggcatatttaggcatggaaatattattatgaaatttattttcaggatctgctataaggttgaaatttagcccagctctaggcattttacaaattatttttcaagcagtcattcttgattgtttgacttttttttttaaattaaagattgggaatgtatgtgagagtatgcatatgtatgggtgtgtgtgtgtgcgcgcaatcaaactgtggtgtaaatagattctcagtgaattctggtattcagactctattccactagtgaaagaaccattttttaaacttcccttgccttttttatttatttaattttcttggtttggagatgtcagtcccaaacaccagagtctgtacttttctataacacagctcagattaaggtagggcatatgccaaggaggttctcacctccctaaagaagggacttgaattttagggactttaattcacccctccttcaatacaactttcccccttcttgtttgcacatgccaagataactgcttttatgcaggctgtacccccttgaaaaatcctttctacagtgctgctcacaaaagagcccaagttcgcctcctacctgcattgctgacttgaattcacagtcgccgagtctacctagctttcttggaagcagtctagcaaaatttctatttgtacgttcactaattatctacaaggacaaaatcagttgtatttacaaaactctacttcagtgtttgttttagtttttttttttactgaaacttgtttttgtgaatactctgtgcttagaattaaatatcactttcttatgaacaacataacttcttcagattgtgtatatgaaaacattagcaagtcttgttttttctatgaagcaaacacaattggtgacaaaggttgtcaatcatttcttcaaaattataatgcagttctaatggtcagcatattttgatattaaatttaaagatcacctctctgcatttgtttttaaattatgctaatacaccacacattatgttggtatgttttgttctgtactttctttaaaaaaaaaaaaaaaacttgtctgagatttgaaggaaaatgtgcttatttggaatttccataaaaagagtatcctttttatacacttaatagtgactttacaaaataaaagttatattctcagttgtttaaaatcactaacctatgataaccacacctcaatttgaaagtagatttaaaattattccctgacaggttatttaatatggagccataaggagggaacccagtacacaattattttttatttgggaatcagggaatagttcccaaatatacaggatttattgataagattttttttcttcccttcatatatccattcaaactcaatggaaagttattaaataaccattagaaaagctcagtagacttatttgagaaattaagccttgtgcaggatgatggatttgacttactaatgtactgtcacagacaaatatgggtagttttgtttaaataggtaagcaaaatattatactttatagcagtggattaccaacaccttgacttctttgttacagtgctaacatctttttttttgtgcaggtatccatgattattaagcagggtggaagttcagtattttgtcatttaaaaagattagttatataatgtctgcttccagccagtgagaaacatctagccatacctttcttatgcaagccattgagttatcaggactgtgaattaacactgtatgaataaatttctgtacaccttattgtttggccagaaggccaccaagtgtacttatatgtaatccttaaattttaaagtagctgtaatttttaaatatttctaaacttttcttaaaccactaaaattaagctcttactacttagtcaactatcctcagctgtattcgtactcaattgtcagtatggcacagattactgtattaaaatattctcctttcgtcttcatatttaccttctgaggtaattttttaacttaatgtgttactacaaagatttgcagatctttaatcaagcactatgttaatactgtaatatcagaatactatgttgcattatttaaaatgttcaaattgaatagattaaaaagtttttaaatgctattgcatcatataatttgctattcatccactatggcattgcatatcaatcagttaatacacttaatgttgcatgagtgatattttggtctgggtttcctcttaagattttagtttgtctgaattaaggaaaaatgtttttaatatacattcttattttgtcccacccctccagaaataagctggaaatcttaactttttggggggtcttttttggtgttttaatgggcccagaactgtggtttaaatttttatgtatgtattttcttttttgtggagtataaatttaaaaactggatttgggacctaaaatactcctcaggttgatgtattcatgaagttttaaaacatctttagttttcaaagtaaactggatatgtggaccttaaagttattgagtttaagctacaaattgtaacgtcattactggacatgtcagcatcaaccctctcaaaatagcttggtcactttatgaaggggcgttttaaagttgttgtttagcagtgacatttaatatggtccaattgcttttctttttaacgtgacaaaaagagaataaggaacaaacactattgctgccgaatgccataacactgagttgtacaaattgtgattgaggaaatgaaaaggtttatactttttaaaaaaaaaaaaacaaaaacaaaaaacaaaacttcaaatggaataaattattcatgaagccttcatt

SEQ ID NO: 2888 - protein, 2162 aa, Homo sapiens; identical to SEQ ID NO: 2884

SEQ ID NO: 2889 - DNA, 118677 bp, Mus musculus
acctggtcctctggaagaacagtcagtttctctggagaactgagctgtttttctggccttactctattgtttccttgaagatttttcccaacaagaattcatcatgtattgtcgtttgatgctaggttgccactttaaccatccgtattggacaagtcagcgggctactgattttcttcttctatatataccaagtaatcttcagaattactaggcagattagtttataatttcatgtgtatgggtgttttgtcgtcgtgtgtttgcatatcatatttgtgcctgaggatctagtagaccgttgctccattctctccagtctggcatttgaacttgagatcctttttctcctcagcctcctgcatgatggaattaaaagtatgcaccacctgtcaggatatctttaaatcacaaaatgcctagccaaggcaccataatccaccaaggtgaatgctaagtgagttagttatccctggggtaggttctggactaggaaactgaaaacaaatgtactaaatagtataaatgttgcttgatcaacagggaaatgggggagggagataaatgggaaattcatgtgacaagctatatgatatataaaaatggccactacatgaacaaatctgtggttaacaactatttcatcatggccatattagtgcaacaagtaccacttcttggtctttctctagtgcagcaataatctcactcagcctcaatttagtagccaaactactaaagagatttagttggtcatttctgtcagtgacagtagaaaaaacaagagctttgtatattgatacagaaaacatgtttttgttatatggaacaaaggaggccttccctagcatgtgaggcatgaaggtggatccccaggactgcagtttgttgggtttctttgataccatgatctgattccagcaccttggacatggcaagtgctgcagccctgaaacacttatgtttggagaagcctggagaagagactgtaaagttctccaaacttcttccagttattctctttaaagtggctggtaattagtaattgaagaaatgtctaccaaaacaccaaacgccaaggtctggaacagttatagtcctattgtcttgttctggaaacaagaatctcactgttaacctggaattgcaccttacttgttttggggttagttgatttttaaatgtgtattttttgtctgtgtggactcgtgatagctccactttgtgggttccagagatcaatctcatgtcatcagcctttaaccactgagccaactcaccagccctaatttcatttgctttagttaaacatgtaggtatgttaacatgagtgttgatgtctgtgttgggtcctctgatgaaacaggtagtcatgaatcagacaccaaacgtggattttgtgtaagattttaattgcagagccatctctccagcctcttgtttcagtaaaaatgttctatgaagttagctgagctcacaaactagacaacagccctttagacaaagatatgaacacaaatagtcatgagtaaaaaatgtttttaatcattttttatttgctgaaattttcatacaagtatacagtgtactatatgagcctagcaccccaacccttacgcatctccctctcaggttgatctctttcataacagtgcactgagttcaatcaatgctgacactgtttgaaagcatgtggggccatctacaggagcatgggccacctaccaaggaggacttccctaaagacttcttattgcccagctttcagttcccaaagcccttcccctacctacgctggggaaaaaaaaatactgctctttttaactgcttcatcaggccaagtgagactttattgtgaatgtgggctgaggaatctgatggttccttgttcatgtggaccatcagcaggaacacactagaaccgggaatccctttcatttaagctagtgaaaacaggtaggtagcaaactcttgtgctctgcagagtatgctctgagaactactctgaaagtcctatgaagtatataccaagagcaggtgaaccagaaaaataccgtgacttgtcaccagaattaacaagttttactatgtccttgtaaggcccagcttgttacaggtcattgaatcagccaccccagctgggaatctagtcttttagtgtggaaccatttgtctgcagcaagcctcataaattacctgagtcataaccatgtatttaagattgagttctactcagttacatgtggttgcatcacttgactcatgtataaacattctgtctagaaactgttgctactgtggcatcattcagtgttgcgattggtcctgtaccatttatgcttccgtaggataaaaatgcactaagcactttaacttggagactgcctacagttgtcttcatcattctgcttagttcctacttacggtcttactttccttaacatcatttatagttttaaaggatataaggaacttggaaatcactgtcaatcttttagaactatcaagaaaaatgaattctagcaaactgtcaagaaagctttatgtaggcaggcatgctagtgcatgtttttaatcccagcactgggaggcagaggtaggaggacctctgagtttagatcagcctgttccatagtgagttccaggctcagggatacggggagaaaaagtgccctaaaataataaaattatttaggtcctgaaatttctaggagaaactggctgggtacagttacagtcctttagttcccataaattctcacatttacactttgtaaatccttatcacttcacaaactcacaggtctcactgttaaagtagaggaattttcagtttatgaattagaacagctgtgaaataccttagcccaggtggatctggagaaataaacaacaaaatgctacatagatcataaaatttcaactttgaaatagaaatgaatttagagagtagctgggtatgatggttcataacttccatccctcccaggtgggaggtcaaggcaggaggatttccacaagttaaagattagcctgagctacagtatgagaccacctcaaaaagtccagctagttaatatctaaatcaaaattgcagtgagtctatgcaatgatctgttaataataaaaagaggttaacagccattcaaaaagtagcagcagaaaaaaattacaatatgatttcttgaaccagatcctcaaaaaggcaaaggacaacagcatggtttgagaaaagagtaatcaacacacaggggcctaactgtacctgggaaacgcagcctccttctcacccagcgtcattacaggcactgtctcacttccaatctgtttgagaccctatcactccacaggagcatttagagaatgtatttttattcttgagacttcctttttctttatgtactctttggatgtttgaggacttgcctgcgtgtatatatgtatactgtgtataccttgtggttgagagggtgttggattccctggaactggatctggatgcttgtaaactgagatccagatactagaaactgaaccagcatcctttgcaagaggaacaagtgcccttaatcactgaggaatctctctaccccttcaatagtattttaagctcaagatattaatggtctagtacatgatagaggaacatgggaacagactttaaagtgggacaagaattaagcatttattgttactgacaggctccatagtcttcggacagaatctccatcaagcaaaagcttatctagtaaagttttaggtggccagtaacttcatcaattagttctactggtcctggcccaattcccaggacagttcgagaacctggttcaatctgagtacgtccagcatcttggattaaacttacagtcagtcccaaggtttttgcatgggtgagtaattgaatgagggtgtcttcatctggagctttgaccaccactttgggctggccacagtactcccactctttgagcacttgagggcttctcctttgagtctgcttgtaggcagacacggcagcatgagaacactgggcagcaaccttccctttccccattttaaggtcagttcgaaccacaagaatcattttgtattccccactctctcccaagatgcttgcttcagttccagtctctgtgtctctatttgcctcacttgttgagttctgggggaacatcccaaggtggctccggaggccccagcccaggcacatgccacaagcaactccagcagccaagctgagtgtaccaggatgaaccaaatactccatagtcaagaacttggagagcatcttaagagaaaagaaaaaaggtattatctagaactgaagtttcacactattcagataagttacccacaagcagcaagcagtattttagaaccaaactaagtcatgcaggattttatgcatggaccctgtttccatccatccccaagtactagttgattcaaagacccacatgaaatagttttgttcattttcaacagtcagcaaaatttgtttaaaaaccccactatagggctggagagatggctcagcagttaagagccctgagttcaaatcccaacaaccacatggtggctcacaaccatctgtaatgggatctgatgacctctgctgctgtgtctgaagacagctacagtgtattcacatacataaataaataaatctttaaacaacaacaaaaccaacccactatactattcagtcttaaattgtgtggagtaaaggaaatgatggcttggacaacatgcctaaaatatccaaagcaataagaaataacattctgctcctttctggaaagcagttcagatctgtgtcttcataacacagtggtcctcaatggagacagtacagtgtggttctcattatcacagtaaacctgtggaaggtacactaggccacgaatcgatgctgtaagcaaagttgcagcattagaaattaaaattaacatggataagaaacttatccaaggtcttaacacaacttcatgttatatctgaacaaaagtatttgaagtagggctcttaaattcaggtttttgttttttttttttttttttttcctagaagtgtaactatcctgcaggcatttctctccttccctccctctacagggctctactctacagtgccctgcaatccagacaggccttgaatttacagtcctctggcctcaatcttccaatgctgggattacaagaatgagcaacaagcctggcttggattcctgtttgtcatcagtttcttcctgtagtgtagtgtagtgtagtgtagtgtagtgtccaagcatttgtatgcatgaagtgaccatttttacagcgcttaagtgacaccctgggaactaagcatgcacaatctaagtggaactgatgaaaactcattttttttttttttttttttttttagtttttcgagacagggtttctctgtgtaaccctggctgccctggaactcactttgtagaccaggctggctttgaactcagaaatccacctgcctctgcctcccaagtgctgggattaaaggcgtgcaccaccaccgccaggctggaaactcatattttatcaaaaatttcccttttattactcataaagacatgttaatatatggcaaatataatagattataaattaccaaagattttcacttgagaatagcatagcagtacaaactatttcttaaaaacatttcatagctgggtggtggcagtgatacacaccattaatcccagcagttgagcagattcctgagttcgaggccagcctggtctacagagtgagttccaggacagccagggccacactgagaaaccctgtcagaaaaacaaaaacaaataaaccaaaaaaattcacataccacgacattcacactatcaaatgtagatttttttaaaaatattttttcaagataaggtttgtctttgtagccctcggtgtcctggaactagctctgcagaccaggctgacatcaaattcacagagatccacctgcctctgcctcctgtgtgctgggatcaaaggtgtgcaccactactgcttggagatattcatacttttaaattagactattctgattttttttgttttattttgctttgttctttgttttatgagatggtttcactctatagcccaagctgacctcgtttctgtgtatgtctcctgcctcatactgctggcatgttgttgggttaatatatccttgtctgtttccaggcaactaaagtgccaacagttgagtcacgatgggatcccagcaagctgaggggcttctgcccagcacagggaacttcccatgacagaagtaaattctgtagaggcaatgggggttgatccaggacctcacccaggctaaacgagtgttctaccaccaagctgtatgcccagacttctttttaccttttattttgaaacaaggtctcactatgaaccagtcatctttctacctctctttctcaagtagctggaatcacaagcctggcacaaagctgctgaaacaactaaaacttattgacacacaagtgtattgggtagagcattaatcctccactagattgtattcctatagtacttgagtcaagcaatgatagcttgagtccagggcttttttctttatgatacaggatttcattatgtaaaccaggctaacttcatattataattcctttgcctgagccccgggcctccctggcattggagctacaggcatgtcccaccacagctgactctgctttgtttgattgtttattgttaaggtggcttttgaaagtgggtctaacataggccagcttagctttgaactccccaggaagccaaagcttaccaaactgcttatcttcctgcctccacttcccaggcacttgtgctaggaatcaaaccctgcattcatgcatgtcagacaaatactctaccaaatctttaattacagttcttagtcactatacagataaataccataaaactcatttatagatcaggtaggcacatgaactatatagttcaaaaccaggacaaagtttatagtagaaactttagatggttcagctatctatttaaatccaagtgaattagtaattacaagtgtgttagagtctgtatatgtgctttgattattcatagggttatatgatgtaagtattagctcccaaaatgagaggtcattttataatgcaaagacactgatctggatgtaggattatttaaagcataaatattttctcagggataccagccacatggttggtgtgctggagttctaaagacagtaacaatgaaaaaaagaagcaacaaatgatagttgtttggattagacttggttagaagcatagaccttccagagtgctgaaataaatcccaatgagtagataaaagcctgactttcctattagattggctaggaaaatcagagagaaagagacaccgaaatgtgtatataaagaaaatgcacttagccagaatatatctttagtgtttgaagcagaaactaaaaactgatgcctcttattttcttaaagaaaaatgaaacatcagatatgaaaatataacaaaggtttggaatagctattaaggtgaataaagaagtctaacagaactgtgatggatttaggcctgggaagccatattctaaatgtacgaccgtacagatttcccaagaaggatccactccaagtctaggaataacaggcctctctgatggataaaaaaggacaccaagatagaaaggaactggcaagggaatgtttgaaagctatggtgagtctatgtgcgtgtgtgtgtgtgtgtgtgtgtgtgtgtgtgtgtatgtgtgtgtgtgtagcataggtgcatacaatacagataagaatgtgtggaggtcaggacacttccttggaaatgtgttctcttctttcactatgtgggccccagggattaacttgaggttgtaggcttgtcttcacctggtgaggaggcagctcactgaccctcttctctccctctctgcatgcttggggtagactctatagtggttctcaaccttcctaatgctgtaacctcttatagaattcctcattttatagtgacccccaactagaaaattatctcattttacctcataactataattttgctacattgtatgctaggaaacataatataaatatctgatacacagaatatttgatatatgaccccatatgaaggggtcacaacccacaggttgagaactactgctcttgcgcctcctgcatgttaggcaaggactctctgagcctcatccctgcctctgtttacactgcaccttgctaaggttgcctgggctgctcttgccatggtccttttgcctcagccttcccagtagctgggattctagctatgtatcctgaaacctagctcccttttcataatcttttcaaagtaaacattgtctgcccattttaatgaagaaagcattcaaaatccaaaacaaaagatgggggaacagagaacctaagaccaagagaagttaaatacaacaaatgtttgatagctgcctgccaggtagaattaggagtcctcacaatttctaggttgtaaaataagcaaatcagatttggggaaagttaacgtctctacatagcgtctattacaggatgggtaatatactattctatccaaactgctaaagaaccagacaggctgtcattgctaccacagttctttctttttgtgtttcattcttgagttttgtgcaccactccctgctgacttttaaaactttaaaccttcctctgagttatttaactcaacttccacccactgctcacctgacctttctcacagtttgcagtctcctaagcaaaactacctatttgcctggaaatatggataatattacacacacgtacatagttggcccttctgtctgtccctatgctgtccaatgtggtagagattagtgtcacagagcaacatatggctaaatattcttgatctgccttttcctggaaacggcaactatgcctttgtttccaaaggctattactgaccaccttgcaaccatgtcttacttcagagggttgttatgaccaacttatgttcactttccgctgctattaacactgtttatatgccaaatcccccatttggaaaccaatactcctgaactataaaaatccttattttccccatgtccagtgctgatctcttgaacactgccttttgggagaaatagtccgtgtaaacgaataataataataaaaagtttgctttaattaatctggccatgatttgggtcagtggtcttccacttcgaatccatgagattaacaatagcttcagagtagagcgctttgctcaccatgcacaacgtgcatgcaccgcaataccaataaataaaaatacttttgaatccatctttagaattcttttccttttccaagctgggctcaacaattcgaagacggatatttaaaatgtatagtgtgaggcctgttctccatttttttcacgctagggtagcgtatcaatgccacctctaagaggaggtgttgccagcgactaaaattctgggttctatcttggcttcttccaaaggtttgcagagtaggcaaggcaggcagcagccacggggcggaagacaatttatgaagtagctaggaggaggccgaccgtggggtaagatgataagatgcttttcagtagagccattaagaactacactcctctgcaccgtcctagaaggagtcgagacttacctggagctcgtctcgctcacctcgcaggtctccaagccagaacaaggaacacgcttcgcgcgcgccacctactccttccgggtttcctgaaaaactagttccggatcagaaactacgaagcgcagtcatccttcttcttgtcacacccacagagcccgaaccgagaaagccgaaccgaaatcccgcgaggaacctcccggtggccgaaaggagggggtgggggtgggggaacgtttctcttttggaggcgggctccttaaaggagccggaccggaagtgacgcgagcgagttccggttggctggagcccagcggcgggtgtgagagtcggtgttgtgagccgcttccaggatcctgcgatccggagaagccggggtctgagcgggtaggtgagcgaaagcggggagtccggagcccaagccgagctttcccacagctcggccgcttccgcagctcccgcacttgggtgatgcagacgcagaacacgctggtttccacttgagatggctcaggtcactgctgactggctgtgtcagctggcggtggccaggttatgtgggacacctctccgcgcttggttaccgggacattgaacccagacactcgcgacagttcgttccagacctggaagccggctttggctttctcagagaacctcactcccgagctgtccagagccttgggttaaatgaagagggtcttcgctgctgctgattctcaggacctttcaatgggtttttctcctcccgggccactagcgcagtatgctaagtatatctccgagaaacgaaggtattcgggtgtaccgacagtgcagagtagtcaaaggaaggggtcattacctctcagagttattgctgtggacccactcagcttttcctaggactgtcatttaaaaaaaaaaaaaaaaaaaaaaaaagagggctctccgctttttccaaaaccttgatccccaacatttttatttccccgcagtggaagtacttgctgcaagatagggacttaaaggtctttacgattccaaacagtgtatgggcttagcgggttaggcagctatgggttgcttatgacctccagttgattttatgtaaacatcttttgcttttctactccagcaaagaatccaggaatgcatagatcggctgtgtatgtgtctattggcaatgtcattccttacctttcagttctttcttgacgcttgtgagaggtttcgtagacagattgatcatttagagaaccttttccagtgtttctcttggcctaatgaagaatttaattccaactgttttagttcattttttgagatggggtttctctgtgtagccccggctgttctggaacttgctctgtagaccaggtccacctgcctctgcctcccgagtgctgggtccggctatattccagctgttattgtctgagaattgtgttgtccttgggtctgattttagggaagaagcttatttactacgctgtatttttgtattggaggtgatgtttttgttgacctttgggagaaagatgctggcgtaccagacacatgatcagttggagtagatgcaaagtgattctgaagtgggaatctcttctgcttaacttatttgcctaggttatctaaaacacagatgcattttaaggggtttatccttggatacatttaacaatacaattaaatccctgaggcacgcattccagaagaaaatagccacatatctgaactaagctggcaaatggtttggtgctgtttcccaatttacctacagctagtttaaatctgtttgtttcctattgtttttagttttgagttcttgaactgttttacacttgtcagttttgttttgttttgggtttgtttatttgtttgtttgttttgtttttttgaggcagggtttctctgtagccctggctgttctggaagacagcctgctctgtagaccaggctggccttgaacccagctaaatcctttcttatctgctgtttggtgtgttatccctggtttgtttgcttgcttgctttttgtagttgtttttttacttttccaacaatttttttcttctttcttttttctgtttgtttgtttgtttgtttgtttgttgttgttttgagacagggttactctgtgtagcccctggtgtccaggaactcactctgtagaccaggctggcctcaaactagaaatccgcctgtctctgctcccaagtgctgggattaaaggcatgcgccaccatgcccggcttccaacaatttcttaatgttggctcaaatcactactttttaggacttctaaggtcattacaactcattttatttttgagtcagggtcttattatatagctctgagtagcctcaaagtcacaagagatccacctgcctctgcctcttgagaactgagattaaaggccactgtactcggaaagataatttatttttaaatcagatgacctggattaaagtctgagctccagcacttactgagtgatgattggcaagttacccggcattcagagctgctctagattgtgttgataaaaggactcactttatttcatatgactgtcattgtgtctagtgagatggtatttgtgaaatcactttttgtttagagagctagaaatacgtaactgtagaatatgttactttgaagtattgcaaaacttgctgatttatatcatgttttttattaacctgaatatattattacccatatttatagtgatagtttttgccctacttttgaacacaagaaagccagccaagagtggcctgaaattagtcatcttagttaataagtgactagaagatgagcatagctatgcatttaagagtttaagtctgacttttctcagcaatgtattatcagttgaaaattcccaagtacagaagacgtttttgttctggcagaacaccaatgaacataaattaaaaattagtcaagtataattaactaatcattagaagttgtctacttttgcttacatttagtaagaatcattatttactgaaaccaacatttttgaattgtagttacgtcttgtgaatccatggtagcaccttctagtttaatagaggggaaccttaggacccagaaacaatcagtaattggctggcctgaggacttctaaagtaggcagagccagagcctgacctaggctgagttcctaagtgttctttccattcttatgaagttgtcctcaggcatcctgataagctttagcaatagcctagtttatgtaatactgtttgctttgtatgaaagagggttgtgtgttgtatgtttgtgctaccctcccttctttagtcttgtaaattgtagagacactaacttcttagtgagagtcacaggaaaagaaagccatggtgtttggaagactgggataggagcgtattgcgctcaaagccagtctggatgtactggatagtaagaccctgtcagaggaaaagattaaaagtcttcagtaggatgtagtaaggaaagaaaattacttatattttccagaatattctcagtccacaatcacattctatcaggtattgtgaaatgtcacttagtagtagtgacagagttcctgtaacatatctcttattgagtgttactgatatataggagaaacctgtattcattttttccctcttgagataaagaactttttgaacgactgtaaatctgatattctattttattaatttttcatcttcagggtcatttctgtaactgccattctaggtaaaaatccattatagaagaaggagtgatgtgttttcaacctttacttccactaacttcacagaacccatttagtttctcctctgctgggtattacagtgcaagctctgctcgaggctcctaagtgctatggatggaagtgaactctagactagcaaacctgagaaaccagaagcggtgaagcaatcataacttcactgtgtagttctgatagctaataatctgctttcacatagacatgggggattttctagagtgaagttgttaggagatactgctcagaattgaactgttgtgtcaactgttgtgagcgcaactgctggctgtaccccaacacctagactgctctctccttctcctagctggcccggaactcctgatatagagcaggctggcctgaaaggtacagaaatctacctgcctccagagtgctgcgttgaaaggggtgaattgtcactccttgcttaaataaacttagagtgtgttttctctagaaactcttaatttgtttaggaaggtgactttgaatagagtttgctgaactgaagttatgtaatatataaatccttaaataaagctcattttaaagtatgctctatgaggagctggagagattgctaagcgctggctgttcttccagaggaccagagtttaatttccagcacccacacggcagctcacaattgtctgtaactccagtcccaggggatctgccactctcatacagacatacaagcaggcaaacatcaatgcccataaattaagagtaagtcatttaaaaatatgctccttgaatatttgagcaggagatgcttttctgtgccatctaaaaggtgatatttgaagtttaggcatatttaagttaagcaatgacaatcccttgagtaattttattccagtgtatctccctgtaattactgcagatgttggtgtctcctgactctggtgtagattgttgtggcattctctctcctttgtggattctttcagggtagctataatcttcatagcttatctggaagaaccaaactaataacgaaaggaatgggagttgaaggtcaggcatagtggtgctcacctttaatcccagcacttaggaggcaggggcaggtttatctctgcgttccaggacagccagggctacacagagaaaccctgtctagcggggaggggaggaaggagactgggacttgaaactttggttcaaattccatgtcaattaccatgccacctgagttggctacttaacttcttgttatcttggtttcctcctaggctgtgaagtcagtgccctttctttgtgttaagggtcagtgagtagattcaaggcaagcatttagagcagcgcctggcatctggccggcccggagtgtggttgccattattttatggaccactgagctgttgctgagaactctttcccagccttttggaaggcatgtcattatgttatagcttatttcttgccatttaatcattacaaatgcagtttcaataagtaaatacctccatgttcatttttttgtgactattttacagcatgtgtggttcttttttttattatttatttatcgtttttttgagacagggtttctctgtatagccctggatgtcctggaactcactctgtagaccaggctagccttggactcagaaatttgcctgcctctgcctcccatgtactgagattaaacacatgcgccactacccggcttttttgggggggcgttggtttttgtttgtttgtttgttttttaggggtttgttttggttttggtttttttttttttttttttttttttggattttttcaagacaggatttctctgtgtagccctggctgtcctggaactcactttgtagaccaggctggccttgaactcagagatccacctgcctctgcttcccaagtgctgggattaaaggcgtgtgccaccaaagcccagcttatatgtgtgattcttttttttttttttttcctttttttttttttgggtttttcgagacagggtttctctgtgtagctctggctgtcctggaactcactttgtagaccaggctggccttgaactcagaaatccgactgcctctgcctccggagtgctaggattaaaggcgagagccaccacgcccggctatgtgtgtgattcttactgaaaaaaaaaccaaaaaaaaaaaaaacttattttgtagttattcccttgtcatttttttattattgttgatagtctttttgtttgtttgactggttggttttgtcttttgagacagggtttttccttattgccctggctgtcttagaacttgctctgtagaccaggtttgtcctgcactcatggagagagaaatgacgtccactgcagccgtgcaaggatagaggtgaagatggcctaagctagaagggtgaccaagttggagagaagatggctcagcagcaacaatgaagttgcttgtctcacagcctgagttcagtccctagagttcacatggtggacagagagaattgactgtcacattgtcctctgaccttcatatgcactctctgcaaggccaatccgctgtccccaccccaccaaccataaataaatgtttaaaaaagatctagaacactgtgtagatatacttgaaaaggaacttgattttgaataagagaaatgattttttttttaaagtcaaaaaagactaacttctgggtttagtaactggtgggtgattattccaggtaataggagaaggaaagtttgggtaaggccatgtttgtttaatataggttaggtagaagccagatgtatttgtgcatagccttaatcctagaggcagagaggtaggtgggtctataagttcaaaaccagcctgatctatagagtgagttccaggatagccagagctaaacagagaatccctgtctccaaaagtgtgtgtgtgtgtgtgtgtgtgtgtgtgtgtgtgtgtatgtatagataggtagataggcaggagagatagcctgctactaagcttaaggctctcagggacccacataatggagagagtatcaactcctgccgggttgtcctgactctcacatgcccactgtgacctgggtagtaccctcccctataacacaagtaaataaatgtaataaaccttagaacaaggatggaggtgggcatgagtaggaaagggtttgaaatttgaggtgaagggtcatcctagtcataaaatgatatacataactctggaggtcagaacagaactataaatcaagaaacttttaaatcacaggaccagataagttaacaggggagatagggaaaggagaggcccaacaccagataagaaaaggctatggcctggcatttgctgccaagcctggcaactcaacacacattcggtagggagagaagtaactcttgcaggtttccctctgatctccctcacacactgtggcaccttccaactcagcactgggggagtggtgagggggtccttgagataattcaacaggtgcttgcttccaaacctgccacctgagtccgattctcaaaacccacatgttggaagtagagaacagactcgtattctgatctgtacacgtgggctgtggcatacactgaacaaatgaaaagaaaaagaaaaaggagaaagaatggtcagctgtgcaaaactgatgtggtggtggggcaggagagatggctcaggaggaagagcattggctgctttccagaggactgggatttggttcctagcatccacatgctggttcacaactgtttctagctccagttctaaaggaactgacctttgttggcaccaggaacataaatggtgtacatacatacatacatgcatgcatgcaggcattcatacatataagagtaagtaaatctaaaaagaataaagttactgcttaaaaagctgatacagtggctatgtctagcaaggatagtgctaggaaagtaagggacagatggaagcaagacattgtggtactgtcattctttgcatccaaaagcattaattctaggacccctctcagatacaaaatacatgcgtgcatagaaccccagcacacaggagggaggatgagcaggctaactgtcaacaatttgaggccagtctgacctgtacagctagcctgtctttaattccccaagacttaagaaattgagttaagccaggcgtggtggcgcacgcctttaatcccagcacttgggaggcagaggcaggtagatctctgagttcgaggccagcctggtctacaaagtgagttccaggatagccagggctatacagagaaaccctgtctcaaaaaacaaaacaacaacaacaaaaacccaaaaaacaaacaaaacaaaacaaaaaaaaaagaaaagaaaaaataaaaagaaattgagttaaaaacatttaagggatttcccattcattccccatcaaatgatgtattttcagaaaacacattctttatctggcatagccaagtgacagtttgtgttgtctactccgtctggtgtctggcattttttgatagtgtgcattgagtcagggtccacctctctgacttgcattgcttatccaggttctaaagctcagctttgcaggtgtttcatctttagagctttgggaatctcgctattctagaagcggactgtaactagatatgcataagcattctgctcaaggttatacgcttctgaaagcaggaaggtaactgaaaggttgaattcctactttgacatccttgtatggctccaatgaaaaactgaggttcatttagaacccggcttcaaaggatgttaatttaattatgaaacaatgttcccaagaaaatgagaatcagtgggtctagtattcttatttttcttttctctggttaacttttcttttgttatcttattgtattatcatacaattgtctgaaaaaatcttattccatacacacttttgtatgtggatctgtgcatgcatgccacagcatgtctgtggcagtcaggggacaacttgcaggagtcagatctctccttttactatgtgggacctaggattgaactcagctcatcagccttggtggcgagcgcaggtcttgctttagttttagggaagaggagcacttgcctacaggacgcgtactccatgctatgtttaagaccatgttgcatctgggtatggcttgtaggttgatgctaacttgctgggtccccctcctccttcttgggagacccaaaaactaaataattttgttttgtattgtttttgtattataaatggggctaatgttttaaatgaatagagtattatagtctaggcactgagcgtacagcctacaaagacctacaaagaccctttgtagctgtcagcactgctttctaagtatttctgccagaaactgacaaaaacagcacgtgtttcaacaccaaacctttattttaaacagccttaaaggtatttcttgtatctgaaatgtttgatattctgagttatgtttctgttctacttctatcttctgacctaatccacaaattgaattattgtaaggaatataaagtttaatttaggagcctcgctctgtgagcaaaactaacatgctgtatgacctcactgcaaagtaggctacactgaagaatttatgctgggttcctgcttgaggacatttcagacttttaaacagagcaggaatcctttggatttacttccatattcaggaacttgacatatttcatgatacataatccaacattgatcctaacacattgaattgtgaacagtgacttgttatttcatcttatcctacctatgtaagttttttacatagaaaaaaaaagagtttttttttctagacagttcctctgtgtggccctggctatcctcaaactcactttgtagatcagactggctttgaactcagatctatctgcctttgcctcccaagtgctgggattaaagatctgcaccaccacagctcaatttacgttattttgggcagtggtggcacacgactttaatcccagcacttgggaggcagaggcaggcggatttctgagtttaaggccagcctggtctacagagtgagttccaggaaagccaggactgcacagagaaaccctgtctcgaaaaacaaacaaaaatgttagcttggctattctttaggagaaaatgttatatgctaagcaaaaagctaaaaagactgtgaacactcaatttacggtattttttgtgtatggctgtttgtctacgtgcatgtttatgtaccatgtgtgctttgtgcccatggaagctagaaggaaggcattggattccctagaactaaagttataagtagtggtgagctgctaaatgggtgctgggaactgaactttggatcctttggaagagcaccagtgctcttaactactgggccatctcttctgcctccccctccaccccgtaggcttttatcctcaaataaatttgtggtgggggtgggatggggtaacttcaagtctgtggaccagactggcctggaactcagaaagatctgcttgcctctgcttcccaagtgctgggattaaaggggtgcaccaccactgcccggcttcttcaaatggctttgaatacattgtgtccttttagtacatttcaaaatgtttaggttgtggggggattgtagaacaagcagagagttctgattctatgggtgcttctgttacttgtgaaaacaagtcatgtaggcttgtatatagtgtagaaaagtgtaggcaaatgcctgtaagggaataaggagggtggtactcaatgtgatttaccttcaagagatggatggggaggggctggagcattggctccacagttaagagcacttgttcttccagaggattaggtttgggtcccagaactacgtggtagcacacaactaccggcaattctggctccaggagatccaacaccatctgcagtctccttagatacatgctggcaaaacacctatacagtgaaatgttgttgttggtggtggtggtggtggttattattattattattggaaaagaaaagggcatggagaaatactgttcctatctgtcaagtcattattcagggcacttaaatgtaatttgattgttgttgggttttttgtcttgttttttgcttttctgtgacatgttctggctctgactagcctgaaacttgtgaggtttccccaggctttgcctcctgagtgctgggattacacgtttgtgtcatcatgtgttttgccttgttttgttttgtcaagatagtctctcacactagcacgttctagcatagaactgattatgcatctatctcatggccttaacgtttcaaaagctgagagtacagggatgaatcagtgtgcctatatctatatacttcctcttgaaatagcaaaactaacttacagacaatcccccaaggcaaaacaaaagcatttaaagaccaaatggaattaagatggacatgttatataaatagtttcaaatgcaaaagcttaaattacccaaagaaacacttgaaaaggaaagagaaaaaaaactatgggctagaatgaatcagcagttaagaacactgactgctcttgcagaggaccccagttcaattcccagccccaacatagtggctcataactgtctgtaactccagttccagggcatgtaactcttctggcctccataggcactccatacatctgatacaagcaggcaaaacatccatgtgcataagtttttttattaaagaaaaatttaggagagacttaagtgaaaatgatgtttttgttttttttcttttctggctataaaatttttacactattttaagctgagaagggaagcaaaaatggggtaggatataactaagttctgtcttggtaagtaggcatggaatacaaaatcgaaataattcttctcctaatatggtgtcaacttaatcagaacatattggaaactttcaggaacaatttttcctgtgcctctaacaagtgagacgatgagtaatattaatagggtgtgtagattctagattagtatccacctaagcttgaaaacataagcagcaaagacaaaaggtaggtaggcaggtagatacttgtgtcctctcagggcatctagaacaaggactgagccatggctttgcagttcactaacttagttgcagcagagatagatctatgtgagttcaaagccagcctcatctacagagggagttccaggacagttagggctacacagagaaaacatatatcagaaaacaaaacaaacaaacaaaacaggactggagagatgactccgaagttaagagtactggttgcttttccagaggtcctgagttcaggtcctaacaaccacatggtggctcaaaaccacctggaatgggatctgatcctctcttcggttgtctgaagacagagcactcatatacataatagatcttaaaaaggaaggagaagaagatggggaggaaggaaggggagaaaaaagaaagaagaaagaaaagaaaaaatgagttagtaaacatgcagctgaatggcctgtaggggttagaattattccaaccagccttataaaccaaaatactaattttctaatacaaagagaaatacatagattgagattgtttctttcaaaatcctccaagaaataatctatatttagtttgaaggaaagtgtcttgccaacatgtcagcacactctgtactgctacttcaggccatgtcgtatctgacctatttgcaggccacgttgtatctggttactgctctaaggtttgttgtagcttgttctgtgacattacctgagctacttgacttctgcctgcctgtgtgtgcattataggagtctgttagacttgaatacttgagaacttctgtgatctgattattcttacagaatattcataaggcactgtcatgcagaacatcccacttttgagaggaagagaattgtcactatgtagagggtatttaaggccgagtgactagatgacatcattagggagagagtgtgaagagaatgcaaaaaggaacttggaaggaggcattgaataactccaagagtagaagcagaaagagctgtcagcagagtatgcagagaagtggggaggaaaccagactcttcaggagagagtgattgcctgcccccagctaggtaagaggctcagtaagatactgttgttcttgatgaaagacatttcttgatttcctggagtcagaagtgaagtcagaaggctcactgcagtggagtagagatttgctgctgaggaaatggagactgtgcaggacagaaatgggaaataccagatgatatttatttgccagagataaagaagccaagattgatcatacagagacaactgagggagctaagtccctaaaaaggtgaaagggaatggacatatggaatttgtgttccccacaggcctttggtggggtaagtctgtgctcaggtgggtgggggtaggtttagtaggtttagtagcacaaggactgagggttctccctctgtttttatgaggctgtaggtcagtggaagtgtttgtctcaacatgtgtggtgtcccatgatcattcccaggagtgccacacatccacaaaggttcaaggccagcctggtctgcagagtgagttccaggacagccaggactacacagagaaaccctgtctcgaaaaaaccaaaaaaagaaaaaaaaaaaaaaagaaaagaaaaagaaaagaaaaaaagaaactacattgatagctaagaaaacgatgactgtcagttaaaaggctgaggtttggcatctcagataaaaactagcaccagtgaacacttgatagatatttacagagtgaacttaaagtggctgttcctgttgtatttttattttcccacctatgtctaattattctggctcaccttaagattacagagtggtctcagagacatggcagctttgcagagttctgcaatttgtgtggcaaaaagatatgttctaaattaggaattaatttctattgacaagatctgcgtatgtagcagggactgtctttagtctcctgctttagtcacacaagtgttggggttatgggtatgtatcaccacaccgccatcttagaaatggtcagaatacaaaaagaaggtttgttttgtttgtttgtgacactggctgtcaaacacgaggccttgagtgtattaaggccagtgttttaccactgagccatgtccttaactcctaggaggctctgatgcgtttataatttaactggacagaacccttttttcatagtttactcgcctttattcttatttgggaaataatacaggtttttaaaagcttgttaagactgaatttgtttcttatgtgaagaactagactgactaaacaaaaactaagttctctggattatttctaacaaataaaatccagattattttatgttttattatagagaacatttttgagaaggaaatgtcagaaagttttttttagtatattgtataagaagagattatttactgaaataattcctgttacaatatttcaaaaacaaaacctttaattccataataccattattattagattctatcttaaatggacctaagttgttttgaataaaatgcttttgtctattcaatataatactatgtgaaagaataaataggggaaattagtttgattagcagaatggtagtggggaactttgcttcctaatgcaagcatgcatgtgtgtgagcacgagtgcatgcatgctggagggtatgcatggtttcatgatctcaacactgactggaactcggtatatagtccaggctggccccacatgtgtggcagtcctcctgctctgcctcccgagtgttggtatttaagtgtgcatcgccattcccagtttatgctctgttcttttcaccccaaattgatcaaactttacttgttgtaagatcgatctgtctgtctgtctgtctgtctatgcatggttggctgtggggttagataaatccacacctccacactttcaagcatcttcaaaacttatgtatagcttcaagttaagtaactaggagggctgtgcagtggtagtgcacatctttagactcagcacttgggcagaggcaagagcatctctgtgagttcaaggctagcctcgtctacagagtaagttccaggatagccaaggctacgtagggaaaccctgtctttgaagatagatagatagatagatagatagatagatagatagatagatagatagaaagaagatccttcattcctgtagacagtgctgtttcagacaccctcagtatactttgctaatattaaacctccactttataagctattttgatgctctggtttcattttttcactttttaaaaaagatttatttatctatttattttaatgagtacactgtagctgacttcaaacacaccagaagagggccctggagaagaagccaccatgtggttgctgggaattgaacttaagacctctgaaagagcagtcagtgctcttaactgctgagccatctctccaacccctgattttatgttttcacaaaataacttggtcattcttttatagtaatgatatgtgcaatgttgttttttgacaatatagtcacagaaatttgacataaatttataaaaccatacttggagtgtattatgctttgagctcccataatactccagctcatcttcattgtgttaggtaatatatataggattcatatgaaagatatggcaggagctagtgagattatcatggcagataaagtgcctgccatgcagccatgaggctaggagttcagatccccagcacccgtataagagctaggcatgtctaaccccagtgctggggagcgctgagacaactgatctctggagcttggccagccaggctagctgcagcaatgaactctgggtcctggctcaagaaaataaggtatagagcaatcggggaagacaagctgatgcctacctctggcctgtgcacacacccattccatcccaacaaagatgaggctatatgtatttgtatgttgtatagattacctttaattttttttgtacctgttgataacccatgttttccctatttttacaaataagagcaaccagtactctcaacacttaggaagttgaagtcaaaagagactgttgtggagttcaagtccagcctatgctacttaatgagttggaggccaccttgcactaaggaggccctgcctcaaaacagcaacaaagttaaacttgcttgtagagacttttaactgttccaaggtcctagaatagttgcttgtgaaggttagatttaaactgagttctcttgaactctaaactctattttcactctttaaattatatactcttttttatctaagttccttaaaaccccggtttcactctgctgtattgtaattgatctcttgtaatacaatttgtttggttatcttactttatttgtaacccagccttggggcctgttacagactagtagagtgaaccacagtggtatcactgataaggaagcaagaagtttgttttctggtttagttcattgtttcatgaacctcctaccatttggatgtcttagcttttagagttagtttcacgcaaatacatatgcacacacaaacttttgtgtaaatggctagccagtgatcaccttctttttgattttgtgtgtgtgtgtgtgtgtgtgtgtgtgtgtaggggtatgtatgtgttggtatgtgtttatgtgtttatactggcatacttatagcagcgtgtgtgtgtataggtgtgagcaggtggaggccagaggtcaccttgggcattgttccttagttactgtgtatcttgcttttttgaaataaagtctttcattgagacctgggactcaataagtaggctaggctggctagctagcaagtcctagaagtttgcttgttccaccttgtcagtgctgtggttacaaacacactcccccacacctagacttttacttgggggttaagtatcaagctcaggtccttatgcttgtatggctagcacatcaccaactgaactgtccccctaagcctctgtttttgaagcagtcttacactgtagtccatgcttggttagtattctgttgaccaagttggcttcaaacttgtggcagtttcttcagttctgagattgcaggatgaggcatcacacttgtctctgacctttggagaacttggttggaggttctagcagaggcacaggacggctccagtacccttgcctgacaaatgactatcccctttaatctactgagcatgcatctgtggaaggaacatacacagaatagtgagggaggaaaaagacatcaactgaatcagcagagtcatcctgacaatcagtgggtgacaagatgttgcaagcaggttacactctcatctatttttctcttttatgggtgaatatttttattatttgaatatatacttctccccccttttgaaatagactttcatttagtccagactggccttaaacttccaatccttccatctctgtgtctcccatgctgggggatgctttgtgcatgctaagcaagcattctgctaccatctggctatatctctagcccagtatattttaaacatgaaaatcttatcttctatacccatggcctttcaagtcctacataaagtcttgggtctgtgacgtttgagttgatgtaatgaatttattttctaataatgttaacatgactataaaagatgaaaggataaaaatatatggtaactttaaacaatgtatgacattaatttatacattagatattaaatctatactttatcaatatttgaaggttcaagtttttgatacctttattctgtgaatagtgctcccaaattttaatctggaaaaaaaaacccaaaacactgtaataactttttttttatttcatttgcattggtgtttgtctgcatgtacgtctatatgaaggtaccagttcccctggaactggttaaagacagttgtgagctgccatgtgggtgctaggaattgaacccaggtcctctctctggaagagcagccaaggcttttaaccactgagccatctctctagcctttgaataactattaagaaaaggtttataaccataagcttgcttgcttatttgtgtgtttatttgtttgtttgtttatccttactacaagttttgtgtgggattatataaattgtttataaaactctttgctataaaagagaattttaacataatagtgttaacatatcatacaattgggatatatgccatgttgctcctgtattcagttttagtctcggtgcaaagcagaagaatctaatgtgttgctgggctttattttctgtattagctcctccagagttcctgatctatgaaatggcagagaatggaaaaaattgtgaccagagacgcatagcaatgagtaaggatcagcacaatggaagtctcacaggtaaggaccgtgtggctgcaccagcagcaaactgtcccggggcgatgatgagtgtctttcttctgggatgtcacgtgaatttcctcactaatccttacactaaccaagtagtttgcctctgcattttgggatggtgcgtccctttaatgctggcacaggcaggcagatgtctgtgagtttgataccagtctgttctacatagtgaattctattgcagaagaaacacctaacctacacctatcattccccaaatttgtagtttgaatccaagtacaactactggattctggttgttgttttgttttgttttgttttgttttgttttatgagggtagggaggtacatttcaagatagggtttctttgcaacagtctagaactcactttgtaggccaagcttgcagctgaactcacagagatctacatgcctccaagtgctaagattaaaggcgtgtgccactacgacaggccatttgtgtatgacagttcattttcttttctgactgtttggactagttcccatttctcaggattactgggcttgctgtgaatggttacctgggacatgtatgaaactttgtttctaagcagtcatgcattatgtataccatccttctatgaagactaagaatactctgcagagctgccactgatggagtggaaagagataggcaaagatgtacaggcaggtgagaagccactgaggcttccgtacaggaacctactgcaatccttgttcttttgttaagattccagagactagaattctgttctataaattgcctcctacagaaggctgatctgagtttggtactttgaactccttaaatttgcatggtcttaatgttaaatctcatttatacttttgaggtatttttatgctattagagatacaagacagcaaggtgggtcgatttttttttttctttgaaaacggtagcacagatgttaggaattctcctttaacttccatgctgttgtttttcagacccctcttcagttcatgagaagaagagaagggatcgggaagaaagacagaatattgtcctgtggagacagccactcattaccttgcagtatttctctctggaaactcttgtagttttgaaggaatggacctcaaagtaaagagctttcttactactttttatataaatcgtatttactaattttagaagtccttagccgtctcctactccctgccatctgtttcaccaaaagggattaattaaatttagaacattatcataggaacatttgttttcctttctatagtttaaaaagaattagactaggggaatggggatatagctcagttagagtgcttgcctctcaagcacaaaaccatcaccacacaaggaccagttttccaagctctccctctgctgtgtacttaaagatcagcctggcctacatgaagactatgccacccacctcaccccaccccaaatggagagcaatattttgggatattcagtttgaagaaagatgagtgaggaaatgttatttacttgataggtaattgcaggtgattgcctgctcttgttgtcttctagtggaaacatggaaaaggtagtggttgtttccactggattttatcttaaaaagaaaccaggcctgtttgcagtagataccccaagtctgctttactgacagccagagaaaaagagctctgccataaaatatgtcctgtcttttaaaccccttgcatctagctgtttcaaatatggcagagagcaatttcacatcctattattttctggtccttttaaagaatctatactgttatcttacaattttgttgtatttaacatttataaaacattttgtaacaaatttcagcttatttgatccctctaggagccccacaaaggaagacaagcaaatatatgagtattatgattcttaaaggtaaaagtgcaaatcagattggttaaatgccttgctaagagagcactccccactggccaacccagtccgtggctagaaagccagcgcttttcctgttgtaccgctccaaattcagagataatgtgcaaaccagatgaggctttgggtggagaaaggctgtctgagtaagagtgtggctgtatgataatccaggtcctggccctgtgtaccttgactgactctgtctatcccaaaggctgtttctacaacttgtaagatcaatgtgacattttttttttccatttctttttaagattgtggcatcgtcaaagcattgtggtgtcctttttactgctgcttgctgcgcttgtagctacgtattatgtggaaggagcgcaccaacaggtactgtgctgtgtttcccagtctgcagtcacacatttcagaatgagataatgcagagttcatagaatttataccctcaacattttaagcatactgataactggtatcttaatgtcttattcctgcactaaaaatacccaagcactgtctcatagctggtcaatgttattctggtatttaggatactgttttatcttcagagatttaagctagctttttttgtatttagtcaaaacagcgtggatcctttcatctttaccacaatgtcttcataatgtctactgtatgcctttctgatctgtccagatttcatcctagattgagaggttttatgtctgtgaaaggtagattcatttccctgctgtcagtagtcatagtactgatgagaaaataaggaagtaacatttgtcagcacattttcattaaaatagtgaaacattaatctatcttaatagaaatgttttttagaagctatcattttaaagtaattattctagtgtcagagaaggtttttgttgtttttaagtagttttcaatgcattttctataggaatctttatatcttggcatgatggtttgtatatgcttggcccagggagtggcactattaggtgtggccttgttggagtaggtgtttcactgtggtcatgggcttaagaccctcaccctagcagcctggaagtcagtagtctgctagcagccttcagataaagatgtagaactctctcttcctcccgtactatgcctgccgggatgatgccatgttccctccttgatgatactggattgaaccgctgaacctgtaaaccagccccaattagatgttgttcttataagacttgccttggtcattgtgtctgttcacagcagtaaaaccctaagacagttggtcagacactttgcaaccaagctgtccatggtgtctcattcaagtaagcacaacagaagcagggggatcactgtgagtctgtttaacagagtcccaggttagctacaggtacacagtgaaattctgcctcttaccaaataaatcccagcactccagaggcaggttggtccctgtgagtgaaggccagcctgatctacagagtgagttccaggacagccaaagctatgcagagaaaccctgtcttacaaaacaaggaaggaaggaaacaaagcaaagcaaagcaaagcaaagcaagcatccagcaactctataacctctgtactctactcccttattttattgacttttttttttttttttttttggtttttcaaggcagggtttctctgtgtttccctggctgtcctgggctctgtagaccaggctggccttgaactcagaaatctgcctgcctctgcctcccaagtgctgggattaaaggcatgcgccaccactgcctggcaggtcagctctttcttgaaagtcaggtctttcttgcactgaacttcatttttgctcttgtttgaaaaacaacgtggtattaagcatacagaaattgttttattcttattttttacttgaaaaatcaagaatgtattctattaacaacaacaacaacaacaacaacaacaaagtgtgtgattgctcctcaatcttggtattttgagacaggttctccacatggcccttattgtcctgaaactcaagagatccccctgcctccctcccgagtttaaagggttgcaccgccatacctggttcattgccccctttcttgaccactgtgtctcctgtattcctaacgttttctctttacaaatattgcataactgtctttttcttaacactgttttatgtgtaatttttcagtcactttcaagtgttattagcattaccatactaggttgggcacggtagcacacaagcataatcacaccactcaggaagcagaagtagaaggagcaactaaagctccaggctatgccgttgtacatggaaagtaccaggccaggctgcgctacagtctgaggtcctcaagaaatcagagaataataataataataataataataataatagtaatagtgattaccaagcatgtgccttattctgctcagagggttggttttgtcttttgctttgcttttgttttttgttctctctgcaggggtacactggcagctcgagacctcttcaaggagtgtgttgtcttactgtttctcagcttagggtcacagaggtggttagcactagcatggtcctgggcaggtgtttgagtttataccttgtcccttttgtttttcagtatgtgcagcggatagagaagcagtttcttttgtatgcatactggataggcctggggattttgtcctctgttggtcttggaacaggactgcacacctttctgctttatctggtaagcatggctttctttcagggaacaaacatgaagctgattcttctgtctagattggtgtatttactttggaatctgcaattctaaaatctgtgtttaactgctctggattttcaagtgttctaatcctcaaaccagtgcctgaagtaggctttttccaattttgaagtaatgattattttgctttatgcatttgttataatggatgaagttcatttcagtttataaaattctgtgtaaagcttagaacaagttatacccataatgtgagcacttgtgaagctggggagtaggattgttgtgagtttgaggttagtgtaggctttgtaacgagacactgtcttgaaaacacaaaacagtgaggtggctcatccagtaagggagctcactgccaagcatgacggccgtagttcaatcctcagaagctgcctgatagacaaaagagagaactgactcctgcaaatgtcctgagccctttattatgtgctcagttacccacacatacacacaaaacaaagaaaagaaataaaaccgccttttaaaaaaggggggctggagagatggctcagcagttaagagcactgacagcggggctggtgagatggctcagggggtaagagcacccgactgctcttccaaaggtccaaagttcaaatcccagcaaccacatggtggctcacaaccacctgtaacgagatccgatgccctcttctggagtgtctgaagacagctacagtgtacttacgtataataaataaatcttaaaaaaaaaaaaaaaaaaaggagcactgacagctcttccaaaaatcctgagttcaattcccagcaatcacatggtggcttacaaccatctgtaatgggatctgatgccctcttctggagtgtctgaagggagctacagtgtactcacctatataaaataaataaataaatctttaaaaaaataaaataaaaaacaaaagcaagaaaaggctttaagttgatacagacagtttacctgttaatcagtgacacagagacattctaagcggccatgggcgcttgtccgtagtttggatgttgttatttaatataactgatgaaataacatgtaaaacttagttttaaagtacttccttggtgaaatactagtttaagtataagataaaactttccatttttacaagtgaccttaaaaatctgaggtagaaggagagtaggcagctgaagacaggacaacaggatctaggtaggccttgtcagagtgaggtaagactgggatgcttgagtgcttattaagctctgtggctacatggtttgtttcttttgttctcttcttgttcctgaataaggaagtaaaaacaattccatatttgtagttttatcttcattgggtagaaagaatatcacagtgatactcaatgctgaattaattccatcatttcaaacaaggctgctctatacatactacattcacttctgaatccaatatgttaatgttaaggcatgaatgattggtataggagagtgttgaactaatgatctgaaggataatttgggagttaatctttagtacatcatttctctaagtttattttaaagcttggaattttaagctagacccagtggcacatggtactagctgcttaggggactatagcaggagctttgggagtttgaatctggcttgggcaatattaggaggccccatctcaaaaatgtttgaattttagaattatattcatatctgcttatctcttacctgaaataaaagtaagtaattgattctatttcttagtaacttctaaactggtataagtttgtatttatggtatgtgtgtgtttgcacgtgcgtccagatatatctatctgtgtatacatgtagacagagacaagttgtcaacattcggtgtcttcctcaatcacataccacatattttttgacacagggtctacataaacttgtgtttagctagattgccttgccagcgagccaagggatcctcttgttttttcctccccagttctgggatcacaagcatccttttcagctttttgcataaatgctggacatctaaataaaagtctgcatgcttaaactgaatctctctccagtcctataactgctaaattcttagtagtgtaatactgcattcagatgtagaaattgaaggagcgagaaaaagaaaagacagattagattataggatatctttttgttctgtttttgtttttgttttttattttgtggggtgtgtgtgtgcgtgtgtgagtgtgtgtgtttggctttggtgtttttaagacagggtttgtctgtttctccctgacttttcttgaattcactcggtgaagttaggttgtcctcgaactcagatccacttacttctgcctcccaagggctgggattgaagatgtgggccaccctgccctatcttcctgttcttatctagacccaccatctgatatttcttgaaaaacaagatgaagggctttgtttataatagatgacaaacctaaaatcctctgggaagccgcatacatggaagattctactgaacattaaacggaattcaaatgagtcctctttaaattgcatacaaatttagtataaagaaatttgagggctggagagataattgagtaaagtactttctgaacaaccttgaggacctgactttgaatcctcggatgagccattttctgacctctacccctgtgccatggcacacagatactcacctgcatggacacattcgataataatagcaataatagtagtagtagtagtagtagtagtagtagtagtagtagtagtagtagtagtagtagtagtattgtaacagtaaagtttattacagaattaatgtaaaggaaaagtaaaatctttgtttctactaatgagcatttttacacttgatcagtgtgctagtttagtggaatgtaattagaattttctcagctttaacttttaatgcatatgagtattttgtatatctgcatcatgtgtttgcctggtgcctgtggaggaactggagttacagacagttgtgagctgtcttgtgggtactaagaactgaacctgaatcctatgcaagagcaacacagcctctttactgctgagtcatctctcttgacaatttcaagagcaattgggaggaagttctttctcactgcactcaatgttatatctattatatactaagtcacaagtaaggagatagaatcattgaacttataaaaactactgcattaattatacataaatgtttccatgggaagtttttagtatatttgtgtattatatttgtatataaattgttaaaattacatgtgaaattttaacacattttaaaaaaagacaggaaatcaaaagcagagttttgatttgttcttaatacaagctattctaataactttaaaatttaccatttcctttgtgatttgtaacaatgttttaattcttaagtacagggggtctctctctctagaatcccagtgaccagcatgtcaatccatgtaagatgagccagttcagctcagtacaactcagtagtctgtgttggtttaaactttgagaatctgaccccaagtagtttcctttagatatatttaattaagtacagtataatttggtgaaaaaatttcctggtgataattaactcaatcccatgttgaaactttgtaagaacatgtgacatcttccataaagataggttctatatatagatcgactgagaaaaagagtttcatgataaggtcttagggaggatctggtgtggttttagccacacagataataaaagtcaccaggctcataacctcctctgctctgaaagcaagttttctctctctctctctctctctctctctctctctctctctctctctctctctctctctcaagataaccctgcatgtttaacattcctggtttctctagtgcttctgtgatggcacaaggacctctgtgctttgcctcccacacctgacaatcttcacttcttttgtgtattgttgtttgtttgtttggaagggggtgtcactatatagccctggctgtcctggaccttacagagatcttcctccctctgcctcctgagtgctaagattaaagacgggcaccaccatgccgggctcccttgtcttttgatgataggactgtgtttgggaaaccccaattgcatgtgctttcttttatgagcttagatgtgatgatgacgacattctgatggcctacttttttgtgatggtgaaatagacacctctaccttgttgtaatcatgtaaccctcagaggccaagcagccatgctaggaacgtagtctgggcagacatacagtccccttcttgtcggattttgtgtttgtattgtttgtaaagtcttacagttcatgtagtttgaaaaactaaagattaatttcttctttatcatgatcatgctttctaaaaattaagtaatatgaaaatgctttgtatttcgtgtccattggtcttcacagtggaagttgcctctttgcggttaaaccttgttaattgtgatcgaatgtacaccagatggtcacttaagattaagactaaaaagattagatcttaaaatgaagtcatatttttcagttaatgaacaatttccttatttttaagattaagtttttcaattgaaaggttgtaatttgaaaatgtgtgttggaaccctcatcactcaatcagcagagttgctgtttccatgggagtggtgggtgtgagccagagagcaaagcgagcttctttcatctctgcggaacggtacttagtaggatgattagcagaaccactgacttgtgttgcttattctaatttcctgaacattctacttttgtacctaggagaataagctttttattcttgttgaaaaaaaaaaaaaacctacgttattcacattctccaaagattgtcatctacgagtggtttgaaatcagtttcctagggggctggagagaaagatggcccagcagttaaggccagtgtgttcttgtggaggaccttgctttcaattcccagccgcagatggtggctcacaatcattcatagttccagttccagagaatataatgctgtctgctggcttccataggcatccatgtgtgttgaacacatccacacatgcagaacaaaataaatcctaagatcctttaaaaaagagaaaaaaccaattctagaacttgtcttagtacatctatatttggtcaccactagatggcatcactaacacaatcaatatactgttgtatatttgcctataaagcattcttacccaattcccaaatgactctctcagcttagacacatgatttattatttgtctatattcacacatacatggtttgcttacataagaatgaacggggctgtgtgtaatcttagttgcaggggatccagtgctcttcctcttctgacctgaataccaggcaagcatatgtttcacagacattcatgcaggaagatgtgcatacaaagaaaatctaaaataatttttaaaggatcagtaaaattaccagttagccttgctttccattgacttgcatatgtggaaaataattcccacggctatatatcctggactggtcttgaactcatagcatccttcctgtcagggcttcccaaataaggggattgcaggtgtgcaccaccacatctggttttccatcctttaatggtgaagagtatgcagaagttttgattatgagagaagcagagtcaagtagctaggttggaatgtctgctccaatattagctatgtgatgtttgatgaatttcttaagatttttgttgttgttattgttattgttggtggtggtggttttctcgaaacagggtttctctgtgtatagtttggctatcctagaacagtctgtagacaaggctggcctctaactttcagaaaatcttctgtctctgcctcccaagtgctgagattaaagacatgtatcactatcacctggcatatttcttaacttttttttttaagatttatttatttattttatatatgtctctgtcttcagatacaccagaagaggacattggatcccattacagatagttgtgagccaccatgtagttgctgggaattgaactcaggacctctggaaaagcagtcagtgctcttaactgctgatccatctctccagcccagatttcttaactttttttttttttaagatttatttatttatttattatatgtgtgtacactgtagctgtcttcagacactccagaagagggcatcagatttttgttacgggtggttgtgagccaccatgtggttgctgggatttgaactccggacctttggaagtgcagtcagtgctcttaaccgctgagccatctcaccagcccgatttcttaacttttaaaccttagtttattcaactataaatggaagtgataataatggtaattatctcgtgactgttttgaggactaaatgaaataacaaatgtatctttttaaacatgatgtttaatacacataaagtatctagaaaattattccagctattataaatactatactatgttacagagttttatatttttgttttgaagaagagagagtataaaagagaaaaagaccagagacacttaagggtttgcgtttcagtgcatgtgtgcatatgtgaaagtcgtaggacatgtttgctgtcagttctctcctttttttatgttttactgtttttgagacaggattttgttgtttgtgtggctgtgttgcatacttgagcttccagcaaattctcctgcttccacctcccgttccccataggagtgctggcattctaaatgtaaagagctgtgtccagcttctcccatgggtcctgtgagtcaactcaagtcctcagactgtgccaacacagtctgaggcgatctctggcttctcagctccttgtttaaaacaagtgatcattttcaatatgtgtgttatgcctttgttttcttctcagtgctaaagattaaactaacagcctcgaacatgcttgccaaattttctactactgactacatccacagtccacccttagctattctcaccagccttggctgcttagtgaatctcaaaaataaaataaaaaagagaaaatgcctgctgggtgatggtagcacatgcctttaatcccagcactctagaggcagaagtaggtgaatctctgagtttgaagccggcctggtctagagagtgagttccagaacagccagggctactcagagaaacccattctcagagtatgggggaggagtgagcaaaattaaggtttaaagtcttacatctaaataagaaagctgagtgtggtgacccacacctataatctcagcacgttaaaggtaaaatacggagttgaaggctaccctcacctacataagttctaaagttgattaacctgggtttcatgagccccgatcacaacagcagcaaaagctataattgcattggcaggcttccattgtgtggtgtatagacagtttttgacactagggggagcattttcctgcagagagatttttcaaagctcagtttctacactgggcctttgggatacctacccttacagacaaatgttatttttagcctaattcactaggatttcttttttcacacttgggatcaaagtagaaaaatgcctggagcattagcattctcccttctaaaagcaatgtgaaggtaggatttggaactattggattatagtataaaattgaccaagctttattagaaattgtaaccaaattgtgttgtcctttgaaaattcctccttaagagacattttcttaatatgatcgtttcaacaaaataccttacctttgttataagttaaacacaacaaatatgtataatatttgctgcccagatgcctgttttactcttaagtttggattattttattttaaagtggagcagaaattgtacctttttaaaatctggcatgttgattgtcttctcgtgtttaaacattgctgtgggtagtgcctgatagttgtctgtgctgctctaagctgtgtttccttaggtacagatatttctgggcccttttggctcttgattccttattgctggaagtaaatatttgggaactatcactgagatgtggtaaagtgaagcggagaaatagtttccgtaactgtgctgttaatgccatgatggtggtgattgtctcagagctaacctgccagcttcctcttcgctactttttctaactctgatgattgcgtcagtgctcatctgtgaatctttgagtacaaagaaggaagaaattaccccaaattgggttgtggtgtcactgatactgacttctgtaggcacggtgactgtggcatgatcactttgagtcagagctcatcctggaagattagcagcctctttttaggaaaaaaaaaaatgcctgttggcctttggttgatgagggagggaatggtagctcctctccctctctctccccaaggagtgactcatctattaactcatgagcgtcaccacatcaaaagcagaaaccaaggtctccaggacataggggtttatacagactggatagcttcctgcccttaagtcactatttataattgtgtgcttaaaagaaagcttcaaagactatgttaaacaacttgcatagctctctacctaaatatgtagtccatttgttcggaatacttaggtcaactcatgatcaaaatttgcttagaagatggaggtcagtggcagagcacttccctagcatgctcaacggcccggcttcaagcccaacctcagaaaagaaagaggaaggtcagttagggtttgttagtgttttctttgttttgtgggggtctcactctttggcattggctggcctggagctcactatagcagcttgaccaggttgatctcaaactcacagtgagtgattccccgccttggccagctgaatgttgagagtaaagggtgtgctaccaggcctgccctctcaggcttactgataaacatttgaggtgatgggtcacctaaaaattgttagcttattgatgtatatagtttacattgtatagtgtataatgtatactaaaacatcatactgtactgaaagtgatacacagttatttgtaaatctttaaaaccaattttactgattttaaaggagaaacaaagtatttcttcttcttttttttttttttagatttattaatttattatatgtgagtacactgtagctgccttcagacacaccagaagagggcatctgatttcattatagatggttgtgagccaccatgtggttgctgggatttgaactcagaacctctggaagagcagtcagtgctcttaactactgagccatctctccagccccaagtatttctttatattaagaatactaatctggtacaattcacttgcttccagaaggttcatgagctaattaatgttagagtttacttttgttttggccagcagatgtgtacttttaacatataataatatattcttgccctaggtgccacagccattgttttatttttaaacactttgttacattaggaagataaggcagaattctaattatactttgtttaagtctaacagatttaaagacctgccactcacattaactaatgcccaggcctttgggtttagacaaaccatgctgctttctatagagaagagcagggaagtgctagcttgtgacttgacaaagagaatctaaagaacaggtctggggggctggagaagatggctcagtggttaaaaggagtggctgctcttccaaaggaccagtgcccacattgcatctgggccacaactacctgtaaatcagttaattcccaggaacttcctggcttctttgggcacagacatccaatgtgaacaaaatatccttataaatagaatttttaaaaagaaattttaaaaaaagaagaaataaaggaataggtcagctttttggtgtctatttgcagtgagtagttctatattccacccatctagcagtcctttctgtaggtcagaaccttaagtaagttgttttctgactggtgagaaaagcaactgtttttaacttcgggggagtagaattcctgtgtggcttctaaagtctcccaaaagtcagactttaaacaaggaagaaagaaaggttgcagtcatgcagacaaccctttgtctcccagacatccctagtgatcacattccagaccagcacggtccttctgttcgtcagtgaagagtgaggcgaacatggtttcccagtgaatcagagcacgcctcggctttagtacctttggcctgagttttccagacaaaactaattggaaattttgcccttgggatctcccttgacttctgtatgtagatgatagatttagctatgagttgacattacagatgctggggaagcatgccagtgtttaggaatgttttatcagttttaagacagcggccttgactgtaagactgtcagtgtgtcttcctaggagtatttatactctctcacacacacacacacaaacacacacacacactcagtcttcatcacccaaagaggtttgactaaactagttcctagtttaaaaaaaatgaggtgtaattataataaattgtggtctgttctagtgtacatacaaagaacttgaaaacttcaaaacccagaaaatggtttggggtgtgtgtgtgtgtgtgtgtgtgtgtgtgtgtaaaataaagtagaattacatatactatttcatcattttacaattagaaatgttttaattgattgaactatgagtatattcctacctccttgtgaagaccttaatttgtgtttgtgacctaagagctctttctttggacttgtatagatactacatcatcatcagagcacagcttaaaatttctctttacggacaggtcagggcagctttgtttgacatcatctcagatgttatgaacagccattgagatggctcagtgggtaaagctgacctgagtgagctcagtcctctaacctcaggcttgcacactggtgcacaaattaaagtcttacttttcttgtttggtattctttggtatatagtggcacccaccctaatctcagaactcaggaggttgaggctgggcaacaaaatgaaaacttgtttttaaacaacacaaatgatggcctaaaaaaattctaaatttattttattaccaccactaaagatagaataaaattaatctcacagaataatctgagatggaagttttttctttgtactttactctggaaagattataaattgtagtaatatataaaatttgtataaaaagacctgagtctggaatggtgctgcttattatctcagaagttgaaaggctaaaacaagagaatctggtatatgatgaggtcagctacagctgcaaaacaaaatccccaggaaacttaaaataccttttttcacagccagatagttctgtccactccttcgagaagcctgccttctgggctgactttggagtatcctcacccagcagccttgcctgggcaagtataatgtctgttatcttgagcaaagcagaattattctgtcaatcaaactttggaaactattgtataataaatacaacttatgagactagatatctggaatctcaaaataaaacaaaagcagatgttcagtgtcatatatatctaaaacgttattattgggctagaaatactatatttaaatttgaagaaaacaaaatcttcatttgccacttttccctaaagctgttccctgtactgactttgttatataccatttttgttgcatagaactcctatatccgtatgaattttctttctacttaccctatcagttaatgagagatgggtgtcctacttaggctttctcttgctgctataaaacaccatgaccagagcttggggaggaaggaaggcttcagttcaccttacaatccttagctaatgctcctctgcaggcaggaactcaaggaaagagcctggaggcaggagctgaggcagcagcaggagaggagcacttgctggcttgctccatggcttgctcagcctgctttcttctcgaaccaagaaccactagcctagggggtgcatcatagtgagcaggaccctcccgtgtccatcatcaatcaagaaaatgcaccacaggcttacctgaaggccagtccgacagaaacatttttttttagctcaagttccctcttctaaaatgacaccactttgtgtcaaggtaatggaaatctagccggtacgtggtgttaatattttcagtgatgagctaagtgcagtgatagacagctgtaataatggcactttcaaggaagagtagggagagagagagagagagagccccccccaaaaagaaaattctactgtggttaggaatctgctaatctctgtgttcgattactaagtgttcctttttgtgttagctcctgttatatgcgtggtaaaacttctaaagcttcctaaagatttacccttttggcatgtccctcctgtgctctgttcttacgtctgatgctaagatgccgtgccatcttctaagatgcctttcaagtgttctgtctttttaccctttttacttttccttggctcttacttttaactggatagttttttaaagatttaattagtttactttatgtgtgagtgtttccctgcatgtgtgtgtgcaccatgtgtgtgtatgtgctggtttcctgaggaggtaagaagaagggtcggatctgtaggattggaatcgcagacagctgtaagctgcagacggagtgctgggagccaagtgtgggtctggaagagccttcatgttcttaactgctgcgccatccctccagcccccaaacgcctgcacctggttgtattactaatcagcgtcaacagtctttgccttctccgtttcgtatttggtctgtttctgactaatgccattctcaatctggttgagctcaagtgcggccctctgagtatttgttgctttttttcttcccctcttgttaccttgatctttggcttatttaccatagtttaaaagaaaattgtaagggttgtgctgatacaggtgagttggcaagcgtacgtgctctctgtctattttctttctctcgtgcttctgttgtcttcactttacctctgcgcaggtcttgagccccaactcaagtggtttgctgttgttgattggttggttgtgttttttcttttctcttcttttcttttcttttcttttcttttttttctccctgttgttagaaactcatcctagggcttcagaccgctgcacaagatgtgtaaactgagctttgtgcccagaccagccttcgctttaacagctgcttacctcattaaggattcaaataaagaaggaaatctgcatttccaatgttcttctgacttcatcttatatttgaagtgtattttctatgggttctagttcacatatattttacttcatacttttaatgttttataaaagtaactttatcttttcttccaattatttctgattgtaagtctaaccctatcttctccttggatggtgttatttttgatttcttctgatgattaagatttttttttgcagttgagtcctgccattttgactgtaatgcttttcttaccagcagtttatgttttattattttcttttaattgattctcattaaggtttattttattcctagatctttttttaaccacaagaaaaaaaaagattaaaaaaaaaagtctttttttttttttacctagacataaaacctgtacaataatttgtccactgtttcttttattattttcctgaagcccatatctgccctctgtgtatcacactggtgggtttttcctccttggtcattaagatgtgtatcttaccctgggctttccctctgcctccttcagtctggctgctttctgttactggttatatccaggtaacctttttttttttttttcttttttctttttcactcttgcctgtcctgtctctataatttctggcttggctcacttatttctttgttctagctaaaataggacttgcatataatacattgtagtgaggcttgcactttttgaaaagtatacttaaaagatggttttatgcttgggggttgttagataagtcagtgatagagcacctgcatcacgtgtgtgaggctacgggttcggtcccagcactataaggaggactggaatatatgtaattttatcaattattttattcaaaacacttgtttgttctttggaacaattagactgtaaagttgaaaagaactgcaaggtttcctatcagtaagtatagtctaacctaatatccagatgtaggctactaataggcttgtgaaaatgaacgagggctagtactgaactgctagccaggccccttagctttcattttgtctggaaaccagcgcatgagcctccaggctgagtaatcatgacttcacagtgcggctatgggaagaatgtacactcttgactgaatgaacaaaaagggtcctgctgtgtgaccctccctggtcagaaactccttatgtagtctgcccagctaggttgttccggagcttgctaagtagctgggaataaacaaacttcctgtactcttgcctgtcctgtctaagttccagattacaggtgtgagtcaccatgcccactttatgtgagtggccagggccttatgctttcatgcgaggcaggccccctgaacaatcatctgtaggggaaaaattctaaaattggtgagactttactcttttaaagttaaaactatatccaagaagtatattttatggtgtgatatatttggtttgtattttaatctgctttggaatggaagtgtctgcctcccacagccgggagcctagagttggaaggaacctaggcttgccaggcaagggttgtaccagctagctccaccacttccaaaccaacacacacaaacacacacacacacacatatgcacgtcccttttttaaaaatccagctgtatctgtagccaaaagaaaagaacagtcaaactcttggattttcttcatttttaattactgccatcatatgcctttcttgtcttttctcaggttaaaagtattgtttttttgtttctgaaactacatctcactgtgtagtcccgactggcctagaactcttggcaaagcctcagtgacctgcttcccgcccactatgcctgactgcgttaccgtttaaatattgggtttgctagatatcattatatccttagtttcgtggttaaatatgacattaagaaacctaattgagggtgcctgaattttggggtgccaatgtaacctagatatataggattcatgtatgaacttgccaaagaataaaaaaaaaaattaaaagaaagacaaaatgaaaatactctttttaaaatgttcagtgctttaaatcttgaatattgttttattagcaattaaatttttttaaaaagcaaagactaaaaataaaaagtaagatgatgaagtagatttttaaacaaattttctttaaaaacaagttaatatacaaaatgaaataaataagtaaacaagcatggagaggagtagttggataaaatggttcacagttaagagtccttcctagccgggcgtggtggcacacgcctttaatcccagcactcaggagacagatcatgtggatttctgagttcaaggccagcctggtctacaaagtgagttccagttccagctacacagagaaaccctgtctcaaaaaaccaaaaaaaaaaaaaaaaaaaaaaaagagtgcttcctattcttccagagtttggttcctagcacacacaacaggtatcacacagctccttggaactgcagttccagggcagtcccatgcctccagcctccctggacacctgcattcatttgctcatacacacacacacacacacacacacacacacacacaattaaaagtgaaaaatataaattagggggttggagagatagcttagcagtcaggagcatttgttacttttgcagaggaccccccagatttggttcacagcaccccatggtagttcaaccccagtcccagggaatccaaatccctcctttagtcccttctggtaccaggcacacatagatgcatataggcaaaatactcacgtacataaaataaaaatagctaattcttaagtaaatgaataatttattatcttttcaataaataagactttcatattactttccttttaaaataatctgtttacagttactagtgtgcactcagttagggacaagtagtaggtgtcaatcttctagcttttagtttctggcagtggaacgtattctttaatatttccttatcactatagctggctttttaaatgtcaaattcattcacgctctgaccttaaagagctttgatgtacagtgaccacttttctttaggtctgagtcattttaggaaagccagtaggaaaatctttactagaaaccttcgtattcaaaaatattcacacaatatggtcattagcaaaattttggtgtatgtataaacttgttctataaaagcgtatttcttttaacagataatggatactacattctaacagacaaccaccaatctatgtttatggaactcaggaatttacagttttaccaattcttatatttattttattcataattaatttttgtatgtctgatatgtgtgtgcgagcatgcgcgcccgcccacccatcactccagctcagaggacagcgttatggagccagttctctccttaatgcttttatgtcaattctggaaattgagtcatgtctgcatggcaagctatctcagcaacccctgtttttacaaaatctgtagttgattttttgaattattttgcagttcgaagcatttgtgagccatctgaagtgggtgttaggaactgaagtcaagtcctctacaagagtaatagccacgcttaagtgctgagccagcccctgttgttgattttcatgaggacacctcctcatgtgctattgtgaatcattgtatataaaactttattgcatatctaaattttaatgtaatctaactaatttttaataatttgtaatgttgcaaaataaaagagcaaaatatcacaaaaattgctataggaaacaaaatgtttaaaagtaaaatgcattgataagtggttatacagtgtctttttttttttttttaataattcactggaaaagataggtgataatctcaagttatacctaaaagaaaagttttattacaggaataacattctgacatgcacttatgaataaacaatatgaagagcaaacaaaaaattgggcagtttgcctaaagcaggcctgggaaagactgttttatcaagttgctaactgtatcttaaaatgtgcattcatgttgcatcttgttctctgaaagcagcacttgtatcacattggttgtataacattagtgattagtgtggtgttgagatgaggtgcttcaaagtccttttgtgttactatttctcattagaggtttcttccatttgttttctagggcccacatatagcttcagttacattagctgcttatgaatgcaattcggtgaatttccctgagccaccctatcctgaccagattatctgcccagaggaagaaggcgctgagggagccatttctttgtggagtatcatctcaaaagttagaattgaagcctgcatgtgggtaagatctgcatttttatatttgcctaaaactaaccttgctgtcttgatactatgtcaaaccttctacaatgtgatccacaaaggcccacccagtaaagatttgggaagccacttgctgcaaacttccaaggcaaaagactcttcactaagaagttacagagctgtacgtggtagcatagcatatgcctgtaatctcagtactttagaagctgagacagaaggattgcaatttcccaagggctagactagactgctggaacaacaacatttaaaaaaaaaaaaaaagtagtcacatatttcactattgattagacactgtgtgtgttcttagaaaatgtacttcattttcagcattgttgatggataggtctgcctttctctgtatgacccaggcttccatggtgttgatctcaggctgtgattgtgtagtggtcctgtctttagtcgtcctagtcattatcctcgtgttttacttaagttttctttatgaactatttttcgagatttgattgcttttatttaaattcacttgtgttcctcaccagtttgtttagttcataaagtttatattcccttaagttttcgtttcctggcagtttcttaggaaataaaagcacatgaacgatcatataaaaatcttccctccggcgcccatgagatgggttgctgggtaaaggttcctgctgcctggcctagcatctcaagtttagttcctggaacccacatggtaggagagaagcacttcccatatgttatactgtgccctccacagcaggtaatacatagacacagacatacatgcaagcatgtacacatggactgtagatagaagcacatgcaaataaggattaaaaaactttttaaaaattcttaattctgcctttaatctgagcactcagcagccagaggcaggtggatctgagttcaaggacagccagggttatacagagaaaccctgtctctaaaaacaagcaaaataacctgatggtggtgacacacgcctttaatcccagcccttgggaggcagaggcaggtggatttctgagttcgaggccagcctggtctacagagtgagttccaggacagccagggctacacagagaaaccctgtttcaaaacaaacaagcaaaataaataaaataaaaataaaagtattcttaattcactaaagcagcagttggtaccataacttagaagaaacaggtttttttttaaagtatagactgtgtgtttatgtgtatgaatattttttctgcctatatgattcataccacttatgtacctggtacctgtggagtgcaaaagacagtctcagacccccaaactgaagttaggagccaccatctaggttctgggaacggagcccagatcctctggaagagaagtatgtgctcttaaccaccacaccttctctccagctgcggaagagacagagttgttaaagttatatattagtgctttttctccctcactgatggtctggagatcaaacgctgggcctggtgcttgctaaaagcaagtactcttccactaaactactcctcagcccagcaattacattttgctttgaaggaattataaaagaaatgccatatgttgagttgttgattatgaaaggcaggaagacttgtcatgtttcctgttgctcttttataaacactggagacagattcattatgttagttgtatgttttatagatccgaggagattatcatgaaaaactattattagaatgacagagaataaaagaggctatctatacagtttcttatttttgttctcttaaaagttatttgtgtggctagattaatataatgccaagccgggcagtagtggtgcacgcctttaatccctgcacttgggatttctgagttcaaggccagcctggtctacagaatgaattccaggacagccaggactacacagagaaaccccgtctcgaaaaaacaaaacgaaaataaataaaaaataaataaataaataaagcaaacaagcaagcaagccaaaaagaaagcttcctctggggctggcagcagtacctgctttctttgaatttttctagtatgtgttgtctggtgtattcctttagccaggttttgtgcctgccccaaaccagcctagtgtaatgactaacttctccaaatactaattgactcctgagatacacagactttacattaactgtgtgcctcatagtagtcagcaccgagctttgcccacagtgcagaattttgtctgctgtgtattttcttctttccctctcttattttaatccctttagtcattcaagaacatgtcagtgtggctttggtgttttgatttgttgttgttgttgttgttgttgtgatacaagtctcactatgtagcccttggctggccacggagagctgcctgtttctgcctgctgagtagtaggtttaaagacatgcatcacaatgcccagttaacatttagttacttttaaattggtacctgttggcctcggtgcttacaagagagtcttttcattaaatgttgttgtataatgggatttccatgtttgaaaggatgaagttaaacctttactttgcatcatatgtaaaaattaaccaaaatacatcaaaaacctaaagctgagctcaggctgtccaactactagaaggaaaatatgtatactgttgaatttggtagtgacttcttatatttcacaactaaagcacagggggaaaaaaagattgtattgtgccacaggccaccaccaagacattggggagataacctatagccaggcaagcagctgctaatcacacatgatgagcactggaaaatactcaaagtattgggaaaatccatatcacccaacagtggaattttaaaagggtcaacaagggacaggggtgacagtgtcctgggttcaagaacataaggagagggtgctgtgtagctgcacctgaataatgtttattcaaagaggatacataaatggtcaataaatatatgagaaggtgagcaacattgttagttactgggggagtggattccaaaacacaggataccacaaacccttcttcatgacactaagatgattattatcaaaatgataatcaaggccaggcatggttgtacccaagaggctagcgcaggaatattgtgatggttttggggccatctgggctacagagtgggaccttgtctcagaaaaccagtaataatgttcccaatattaataatgatgataatgatgtaaaggaaaataagtggcttccaagatgtaaagaaattggtgcagaatgaattgatagcagaaatataatctggtgatctgtgcaccagattagcagagaaatatttaagcttaggatgatcacatgactcttctaattccacatccacataaataccaaaaggaaatgacaattgtcagacccttgagcttcactattaatagtactctcacaaaagtgaaaagtgggacagcaacctgttattcttagatgagtgaatgaatgagtaaatgtatgaatgaatgaatgaatgaatgaacaagacatgatgtacatatacacagtagaatatgaccgagccatgacattcgatacagtccgttcagttaagtgctaaatatagatgaccattgaaaatactatattaggggctggtgagatggttcagtggttaagagcaccaactgctcttccaaaggtactgagttcaaatcccagcaaccacccataatgagatctgataccctcttctggtgcgtttgaagacagctacagtgaacttattctaataaataaatcttaaaaaaaaaaaagaaaatactatattaggagaggtggctcaacagttaaaagtccttgctgcccatgtatatccttaacttgagtacgagaggatcccctaacctcttttggtctctgtgagtagcagtaaacacgtggtacgcagtcatacatgtaggcaaaccactttacacataattaaaataaataaatctaaaaaggtcagcagaggaaagtgtgtctgaaaaggacccattattttgtatgctaacttaagttgttttaattaatgcttaatgagaacaagcttcctcttttttaagggtttgtgtgtggtcacacgaacctgtctaggttgtggagggagccagaagatggtgtagagctggagttacgtatggtgtaagtcacatacagtgggtttgggaaccgaactctagccgtgggcttaactactgagccatctctctagcccctgagtatagagcttctatttgataaaaaatattaaaagcagtcagtgaattgcctaacattcttaaatatagtgaatgtcagtgaattgcgcattattagtggcacacaactcttaaaatgtcaacagttccagtgtttggaagcataatttagaatgtactgtgtccttgattcctagagattacctaattttattgcttttgattttgtatgcactttcagatttgtttgtttgtttgtttgttttggcttggggggggagaatgtcttagttgatttaatgatgtcttgctttaaagtttttatataatttgcaaattaaagtattcttatagatttcactattgtgaatatgttgtatcagaaaagctgttatcaactgagatgcccttctagacttcactatctttcagagtatgttaaatcagcaggcgtcatttatgtccatttactgcctcactcccaccttgttcatctgttctttggagcacatagagaggattgtttcatagattagatcagtcaggtatctttctggttacatctgtataagagagtattgcattagtgcaacaaatacttgagatgaagagaaagggttattttggcttacggtttgggagttctaatccataactactgggctccatttggagcctgtgctggatgggagtaagcaaaccatgttgcccacttcacagcatgtgagaaacaaaaggaagggactgaagagatctaggaccttcctacaggcctccttcatcaaggctccccacccccctcccggcccccgaccccgagtcccagtagtcccaacacagggcaaatccttttccttacggctctttagaagccattccaggtccatttggagtaaggagggagcagtctgttactgggcatataccagtttacgccatggtagggatcaaacccagggcttactttaccaagtaagctaagccttagccttataaaattacttttaaaagctatagaaaccagaatcctcagtgccttctttggggtaataacttttccatgtagaatgtaatgtattttgagaggctgtctggatgagtatatttctttaaaatttttttgtgcaatagttgaatactgacatgattttcattcttttatgaaaaatatgaagaattaaactacagaaatcaatgtgatcaattaagaccatgactagctcttgatttcttttcacttcagtatgtcacttccttactagctttaagggaatttgtcaccggtttgaattggatgattgcttccagaattgtcgacaacccactttacatttgacctttgagaagttcacctttgaactaaagtgttgtaatgaactgtccttctttttgtcatggaaaatctgagctttgtacattggtagttgtgtagctaatgaggcttatatgaggtgtgatcattgctaatctaaaagtttccctaaagtgtagagagaaatcaaatgtacttaatgtacttttaccaaacttcaactaatatttatgttcacctgtcttggctgattctgttatcttagagcaaaccccatacattttataacttataaaaaaaaaacaacaacttgttcattgattaaaaaagcttgtcacatagttttccctggtctgattttactggctttattctggtttgtgtagtttgagcctgttcctctctgttcccgatgtttcctgagggttgattcattgagatccttcaagtttatgggctttctggttttgttttcattttttattgagacagggtttcgttatgtagctctgactgtctgtaactcactctgtagaccaggctgtcctggaactcacagagatccacctgcctctgcatggaatcaaagatgtactccaccatgcctagtggagtttgttttaaacagtaataactttatgtatttttgtcacagggtaaaataatgtctttttgtgacattaacacttgttatggtaatccattatttagtagtatctataaaaatagtaattagtgttccaagtatattatttttatttattagttaaaatgccctttcttatctgagactgtgttttcctctgctgtccaggttgtgtcttcaaactcctgtgccctttttcaagcccctcatgaacaggcctagtcatgaacctccataccccttttggaagactttcataggaaagactaagttggttgctgggatttagttcatatatgaaaataaaagcaaatatttgatcctttgcactttaacttttaatggtgtttcttgtccttcagagttgatcagcattaacttttcttgtttctttttctgtccatgctcctgaccttcctacaccttcctctctgtttctctcttctccaaaacagatttactttggagtacttaaacatgtactccaaagtactttttctgagttctcatttcacacctggaaaatggatttatatttggagactattggttctacatactaaatacacaacatttttagatttgataatgtccttcaaggattctttttagaccaggatggtatcaaagtcacagagatctgccttcctctaccagataagtgctgggatcaaagttgtgtatcaccacacctggctctgccatttaaatttttttatcgtaatgtatatgtgtggacatgtgcacatgtgagtacaactggtcgcagaggccagaagaatctgtcagattcccgggagctcaagttttcggtggttgtgagctgacccatgtggctgctgggaaccaaacttgggtttctacaagaattgtatgcccttttaacctctgagccatttctccagtgtcttcaaggattcttttttttttttttaagatttatttatttttattatatgtaagtacactatagctgtcttcagacactccagaagagggagtcagatctcattacagatggttgtgagccaccatgtggtggctgggatttgaacttccgaccttcggaagagcagtcaggtgctcttacccactgagctgtcacaccagcccaaggattcttttgaagacatttagagcagagtgggctgaaagagttaagtttgccttgtacactcacaaacccttccattcactgttactcaggatagaggaccaggactggctggctcaaagtgaaggtttctcccgagactgtctctgtcatattatggcctatctggtatttaagccacttaagcctaaaccaagtttctgattctaaactttgtttttatctttatgtcctgaactgactaaggaaaaacaacaataacaaacccttctcttcaaaaccaaatctacaaagtgactgaaatatgaatcactctgagaaaataagacacttttaaattttatcataataattacccatcctgttactgaggatttggggggccacttgactgtaatatttttaaggctctgttttttaaatgaaaagaaggcaggaaagaagagaaaaggctgttctgagattaaaacatctgagccaacctagagaattgtaatcagctttactggaacttttggtgcttgcctggagagttttgttttgtttagtttttgaaagagattttactttgtagctcaagctagccaaagaaaatcaaacttctgatcttcctggctgtggcttccaactgatagggataaaagtgacggaagcattaagagaaaccccagaacctaaggagagatgttagattgagcctgtttatgtgccaaggaaggtctcacagtctattgtcttatctggctcacaagtcagatcagggctgggattcaaactctgaaacttggaattgtgtagcatatgtatccagtatatctcaaaaagcttttggaaatacacgaaaatataatctgatctattgtgttactgctgaaaactgaacttcatagtgagtattttgctttttcacacagggcattggaacagccattggagagctgcctccatatttcatggccagggcagctcgcctctcaggtgctgaaccagatgatgaagagtatcaggaatttgaagaaatgctggaacatgcagaggctgcacaagtaagaacacaacgggaaggtggagctctaatcccggctcacggttattaaggtggagggttaggagttctgtgtgaaagaaaactgccaatgtaaaacaaagccaaaagtgacctaggacaggatatgcagaaatactgaaggtaaaaaaaatggcaaatcggggctagggatagaggttccaggcgcaacgttaaacagcacatgtgggaccctgggtcctgtccgtagtacttcgaggaggaagaacagcctagacatactctttgtcagtgggttttcttcaaacaaactagtagcaagaagatacaaagctacttttctcctcccaggaactgataaatgtcatctctgtgtttcaaaatagtgtgtgtgtgtacatgtgatcgctcgtggacatgcctgcctgcctccctgtgtatggttactcatactcacccaaggattcttgtatgttactcgttgggctttgtttatttcgtgagataaagcatagttttgtagcctaagatgaccttgaactcacaaggattgtgcagtacagctctggctctctggtggccatttcctccttgagaacagccttgggacttcatcctcatgtgcaaacagtgcttaaaggactggggttccctgagagaatgtaacattgcgtaacgttcttcaatagctctgaaaatctgaaactagaaaggcttgtggcagtataagtgacagtattactttctttatagagattgaacaattcaaattagtctttctttacctttgaatgttctagaaagtatcctcaaaatgtgcagggtaaaccagaatggtaaaaacctaaattccagacttgaggtaattaaggctttttttcctgagacaatctgtgtgccgatcccagtgtcacaggttggttgttttactcttaggaaataggaagatgcctctgagattgactaacttaagggtggccttagaaaacacacagatgaaaaggaagcaaggcagtggccgctgtacagtgtgaacccttcttgccccctccctcgcctgttgtacctaacttacctctgatggctgcgattgagaattttgctaacttcaaatacaaggaaacagaaacttagtaaagtaatcctgtctccaaaagaaaacatcaagcaggaggaatatgggagaaaaaagaaaataatttcctacatttggtttttgaaggcattttcaggtgttttcagacatctggtattggtattgagagtgccaatgcccttctaagtctttagttttttgtgtttgcttatgtaactcaggggtaggagtaatggacattaaaaatggtggagattaaaggacaacttgattaccttccactctgtgagtccaggagctcaaactcagttctcaggcttggctgagccatctcactggcccaaaaaagggtctcttccttgtccaggagctcaccagttaggcaaaattggctggccagtgaagtccaggagcctcttgtccccacctcccatcactgggattgcagccatgtaccaccacactctgctttcccgtgaggctggggagcctcatgctggcagcaaggacttatttatgctggctttaccagttgagctatttccccctctccgggttatttttaaacaggaattgttttattgtcagttttctgatgaactgaataacaaaataccttactaatagtttccatccaccctgctcatggacatgttgagtgtcctgtctctatttaacacctttccaagctagtggtatggacagtaccactcgtgacattggttagcagcttattgcccttgaaaaactcatacctggaaactgatgaagtaagatgtcagacttgttttctcttgtgtctgtagttggagttcttggatactccagccacttagtcttcccctccccactgggagaatgataatctcgtgtatctcttacgaccctgatcatttttgttacttttgattggctcttttctaattggacttcatctatcttagatgagatctatcttattagatgagatggcacataatacttctgaaaattatgaggtttgggctggttttattctttttggctttatgccagtaattacaaacatggttttaggataaactatacatttcttactccttaacttcatatttattaatcttggaagtgaagaaggcaaattatatgcattcttttttttttgtttgtttgatacgggttttttttttttctctgcagccctgactgtcccagaactctctgtggagaccaggctggcctcaaactcacctgcctctgcctcctgagtgctggaattaaaggccagcaccaccagtgcttgacttaaacattctatttcatgctccttaaatcagaaattacatacctatgtcttctgctgcttgctgtgctgaagataatccagggccttgttcattgttgtatcactgagctacattccagccttgtactcttaaggacattatacttaaaatgtttattcaaatcacagttatagatactgctaattaccatacaaactagaaaatacgtgagtaaataataagaaaattattagctcatacgtgaataatttaccttgccacattgtgaagtaaaaatccctggtttggtttgtttttcttttgttggtttgttgttgttgtttgtctgcaattttgagtttcagcagattaattctcatctgcattgactggctatagattctgaatgtgttgacaggcaaacaaatcgcccatgtgtagcacttgtttgatgagtcctcatcctcgttatgctttctggacaaatggccatgggtgcggatagtatggagcatgccttgttcctttgacccagatggcattagtgagtgtagtgtctgtcagtgtgtacatctggagttgccatcatgaccgatttctagatttctttgaatatatgagggccaggcttcctgaaggccccttcatgttttatgaatgttgattgcatgttctccgatcactaccatgttgatggcagaacagcccttcttattgtccccttctttgtaggagccattctgctgggcacaaggggaaacacagaatttgactgtattacccgaatcagacccaaattctggacttcagtgagcctcctgctttctctcagtagctgggattattctcctgtacctggcttatccctgatctgagtaaagaaaacacactcaaaaacacagggtcaatggaaaacttgaagtgttaggggctggagaggcagatcagacaacacttcctgttcctccagaggaccccagatcagttctcactacccacactgagtattttacagccactcataactctagctccaggggatctcttcaaggccagcctgggatagataccaggaccctctctcagaaaacaaatgtgaaatgaaatctttttttttttaaagatttatttatttattatatgtaagtacactgtagctgtcttcagacactccagaagagggcgtcagatcttgttatagatggttgtgagccaccgtgtggttgctgggatttgaactctggaccttcggaagagcagtcgggtgctcttacacactgagccatctcaccagcccgaaatgaaatcttttttttttttaattaattaattaattaattaattaattaattacatgtaagtacactgtagctgtcttcagacactccagaagagggagtcagatctcattacggatggttgtgagccaccatgtggttgctgggatttgaactctggaccttcggaagagcagtccggtgctctaacccactgagccatctcaccagccccccgaaatgaaatctttaaacatgaaaataactctatctttcccaggcggctgccgaagatggagaaggggcaggttctggtattggatggccgaggccatcttcttggccgcctggcggccattgtggccaagcaggtacttctgggccgttaggtggtggtggtcgtacgctgtgaaggcatcaacatttctggaaacttctacagaaacaagttaaagtatctggcctttctccggaagcggatgaataccaaccctcccgaggcccctaccacttccgagcccccagccacattttctggcgcactgtgcgaggcatgctgccccacaagaccaagagaggccaggctaccctggagcgcctcaaggtgttggatgggatccctccaccctatgacaagaaaaagtggatggtggtccctgctgccctcaaggttgtgcggctgaagcctaccagaaagtttgcttacctggggcgtctagctcatgaggtcgggtggaagtaccaggcagtgacagccactctggaggagaaacggaaggaaaaggccaagatgcactatcggaagaagaagcagatcttgaggttacagaaacaggcagaaaagaatgtggagaagaaaatctgcaagttcacagaggtcctcaagaccaacggactcctggtgtgaacccaataaagactgtttgcctcaaaaaaaaagaaaataactctatatatgatgggatgtaggttcctaacttctcttcataactagttatttttctgacactgcttacaaacaaatttcttttatttttctatggtactagggattaatgcaagcgtgcgcatgctgagtgagtcccctgtcattgagccctatcctcaaccttctgcttttattctgagatgatgtcacactaagttgccctggctggccttcagttcactgggcagtcctggcaggccttgagcttgccttcttcctgactctgcgtagctgggattataaccccgtaccaccagcctggcttccagggggtttaatcttgtctcacattgtggctaattagttactaatgacgtattcaagacatgctagcctgatatacctaccttcccgagtgccttctcggtggtgctttaaaagtgcttcagtaatcacagcagaatgacttcagtggcctagaatttgctcatatagatgaatgtaaaacttgtagtttgataggagctgcaaacagggaagagtggagtaagtagaattaaaacagtaagttaagcaagatgaataccagcaaagcattaattaaagatttctgaaataaggttttacattttttattcaattcttgaaggtaaagtactttagtggcataaatttatcagcaggaagtctaaataaatcaaactcacaaacgcacagaaccttggcaccgcctgcttgctttgctatgtgctgtccaaatgggttaaagggaacatagattttactgagaaattgatgttcagtaaagtgttcatgacacatatttacttcagttctgcttctgactcatgtttaaatttcatgtaatagttgttttcagagaaagactgataagtgttgatttatattccaattccttataattacctcatttatttttcgagttctgtattgagattagccagtatttttccactaaactggcttccttttgctcttgacatcctatcctgttctttttctatatctgtgagagataggcatgaatacaagtagcttcctatggccttgaacatctaatgtttgaaaacttaagttctaagccagactggtaatgttgtttagtgaccctgctaatattggggaggtgaaacaaaaggatcacaagtttaaggcctacctaggtatcttagttagacccgtgttctgatcatctttgtatcttttgttcctggcatctacaacctgttttgtaattatttatttttattatatgggcattttgcctctgtgtatgtctatataccacatggatgccaggtacccagagaggccagaatatagcattaaatcccctggaactaaagttacaaaacattttgaggtgtcagataggtccagggaattaattgtaatctggtcctctggaggagtggccagtgcttttaaccactgaaccatctctccagccctcatctgtaaacttcattgtcatcctcatagttacctcaagttaaaatctgaccaatctttggttcattccccaggatcaaggaaataaaaatataactaggtggtactcagcagttgagagcactagcctcctccagacaatttgatatcctttcccaacactcacatgactgctaacaaccatctataactccagttccaggagaactggcctcctctggcactgtatgggagtggtgcacagatatacatgcagacagaactccccctcccgcccacccacatccccacccccacacagcagatgtaatcatacactgtaatcctagcgtggtggaaactgatgcaggttgccaatatgaagcctgcctgtgatacagagtaacacactgtctaagatgagttaatgtagtttttaaaatgaaggctagaggggttactccatggttaagagcactggctactctttcagagaacccaggtttaattgctagcacccacacagtggttcataacagtctattaattgcagttcctgaggatccaatacccgcttctggcctgcaagggatctgacacaaaagtggcacacagaaatacaggtgaactagagaaatgactcagttgttaagagcacagactgctctttcaagaggactccagttcaatccccagcacccatactgtgtctcacaactatatgtaactccctctagtttctggcgatccaacaccttctctagcctcttcacttaccagacacacagatagtgcacatacatacatgtaggcaaaacactcatacataataaaataagtaggtttttaaaaagagaaataaaatatatgcaggcaaaaaattgaaaactaataactctaatattcagtcacttgaatttctccctggcctcctaatgccagtcatccaggaagctgattgacttccactgcattgtcaccatctccctgcccctttgtttctgaatgactggttcaaacatgtctcaacaatgcctactcaacatttctagtggattcttttaaactatttatttatctatttatctattttatgtatatgagtactctgtttccatgcacaccagaagagggagtcagactccattacatatagatgtgagccaccctgtggttgctgggatttgaacttaggacctctggaagagcagtcagtgttcctaaccactgagccatctcttcaaccctctggtggcttcccagttggcttgctctttactgattttcaccctatttttcccccacactatccaaaggaaaaacctttactaaactgtaccctgcttgtggaattctcctaatcaaggatggaactcagttggtagagtacgtgcctaatgcttacacaagacacctgtaatccatcacataaatggtagacgaagtcagcacagacattcatcttaggctttgtaaagtttgagacagcctggacattgtcagtccccttttcaaaagaaaaaataacttgactattcagaaatacttggctttttctcaaattgtatatagtgtgaaatccagtctgtataacaatttacttggacaaacccacaaaaacagtcttttggctctttaacagttttttatatgttacatggattttgtcttgttttgtttgttttgctgtttatttgcttgtattgatgctttggatggaacttagatcctcacacatgctacgaaacccttctaccgctgagctgcactcccagcccaacattgatggttttcagttagatagaatacctggttaacacatgttaaatccttttaaagcaaagagctctggagtttttcagtccagaacttgctgttcttagtaaataaaccgtgatgatttattaaacttgtaaaaacgttaccgctgctctgatgaaatagaataatgtgatgaagctctttctcctatctctgcttgccaggctcttgtgtctgttcctctgtatgtgtcaccttgctcattcctacctatcaagttcctgcagcttctccagtgtttcatgtcattgataggagagttgattggaatttttgttggtggtggtcggttgtttgtttgtttgtttgtttgtgaaaggatcttactgtgtaggcctggcactcagtatgtagactgagctggccttgaactcacagagatccatctgcctctgccctacaaattctgggattaaaggcctgagccaggcttggtggtttttaggtcttactgaatagccagggttggctttggactcagagtccttctgccttaactttccaagccttgacagtactggtgtttgctaccatgcctggctagggctggggcccttcctcccaaaatattttctaaattttgtttttagttttttatttatttgtgttttccctgcttgtatatatgcgccccatttgcatgcctgatatcgtcaggaggtagaagaggacttcgatcccctagaactagagttatggttggttgagagctactgtgaaggttctgggagtcaaaccaggtcctctgaaagagcagcaagagctctcttaccactcagccagccatctttccagcccctggaagttttcatccatattgaagaaaacaactttcgtggcttattgatagtatgcttaagcatgctccagggtcctacttttcatcactatcccaacccaatcgctaaaattgaggacacatggaaattcttacagtaatttgttggttctctatgctgtataaccaaagacaggggaaattgtgcagatgtgttagagggtaagggttatactcactggtagagcagttgcctagcctgtgcaaggtagagtctgaaacatgaggtagctcattttcttgatatattcagtgattattttgttggacaccacagaggatatagaatgggggcctaaccctgttattttgtgttgtttttgtgtgtataactgatacaataggaatgctgcccatatttacttagaagaatatgttttggataaaattgctatctactagattgcctaatactatctgtcagaatgatctaccatttgcatattctttagtgctgagttggtgactttgtaaagtttgctgtcttattatttgttttgataataaacactactgtgttgttttgtattcttgctatcagaatcagaaatgtgaaagtctaacttcaccttttagtagaatgctattttgtttctccatatttgttctagtttccttgtcttttctactgggtatcacttgtgagtctttacttctccctgccctggagtgaacctgaggcttggtacatttttaccactaaactgtattgccagtccttgtgcttcattttgagtttggtttggttttgctgagttgtcccaactatctacctgactcagcctgccaagcagctgggattagatgcctgtgccactaacccagactaggtaaactacttatctctttaaagactagtttagggggctggagagatggctcagtggataagagcactggctgctcttccagaggtcctgagttcaattcccaacatccacgtggtggctcacaaccatctgtaataggatccggtgccctcttctggtgtgtttgaagagagcaacaatgtactcatatacataaaataaataattcttaaataaacaaagactagtttataggtttttttatttgtcttatttcaagagaattctctttaagctagcagtatttaaattaatcaacatttgtactttatatattaaaactaaatgctcatactaagcatatataaatttaaggctaaacagattttacctagtaagatttttattctttcagaaatttcaatttatttgcattagtgggggggggacaaaaaccaatcttaaaaccaaaacttatcatttgttttgacaaactctcatgacctgtgccttttcattttagacaatgaaagacatttttcctttcaaagaacaaggtataaatgaaggattcttttgacctttgttgataatgatagaacatttgtttcatcatttgagtttggcgattatgggaaagcatttgataatggtcacttagacactcaaccaaagtgcttcagcattccatttatgttctgtttgttgagcacattttcctgtgagtgttagcagttggatatgccaggtcagtcagtgcctgctgggttttccccctatgaagtatctgttctttttcatacaaagattttatgaaagagctcatggtatagtatagatgatctgaaactaaacaggggtcattttcatatgtttttaatgtcatttgttgctgggacctgtttttgactcttttgaaccctttgctggttgtggtttgtctggccatcacatgacttctctgaaaattccccctcctcttcatttccagtaaactgtttgagcaggcgtgagtcagagtgaaaccagcttccctgtaaccacagggcttgttgaagaatttgtcaacgtggactctagagggtttgcattaagctttgcagcaacgatatggtttgtgttgtgtcagttcctgggaaaagcttcctcctctcaggatcttttgcttatttgcattaagtattagaaatgttcattctaggctcattcgaggtcttgtcatgtagatctcctttcagatcccaccaaccacacacagccagtgacattcaggattttgttgcttaacatctttatttttattttaagtgtgtgaatttgcctgcatgtgtgtatgtgtaccgtatttgtgaagagctcagaagaagttgttggaactcctgaactcgaatcatagatggttgtgagctactaagtgggtgctgaaaattgagcctagaccttctgccagggggagagcagccagtattcttaacagatgagccatctcttccttaagtggtcttttaatgagaatccattatagaatatctcaactattgggatagttaagtttgagtacagaaggaagaaaggaaaggtaatacttaaactgtctagtggggcatagagagatggcttagtgatgaagcacttgctgctgtcacagagggacccacatgtcaggtcacagctgtctaactccagttccagggagagccaacagaggcacctggtgcatatatggcactcagacatgcatgcaggcaaagcatccatacacacgaaataaaatctaaaaaaattaatgttcagtagttgtcatttgaacactcaacattgacttagaatttttcatggcttcttttgttgtctcaagaaactttttcttaatactaaattgtcctttggccactcccattcccagatttgactgtttcttggttttctgactcttcttctattcagttgtatagcattaatggaacttgaaagatagttgtggcttgatgcaagtctcagaatggatggtcactgggaaggaaggctgtctgtctgctcctagtctattcctgagtcctgctcttttctgtatggcagtttatgcctcagtgggtggcactgagaggacaactctcagtccacagtgggattctgatgctgagctcctatgatgaggtttgtgcggcaagcgcttgtacactctgacacaccgagtggatctcactagcccttgttttggcttctgaaacttggctcatttagtcctatgccaagattacaggcgtttaccaccaccatgcaagacttgtatgctcatttctgatttaaccttgtcatcttcagtcaggcttattttattatttatttatgcatatgtgtacacacatgggttgaagtgctggagaatgccagaagagaatgttggagttggaattgaaatcacaagcccaacatgggtgctgattttctcctgcttatctttttacaacaaaatacacattgaagaaaacgttctggagagactagaaaatgtctagttttctagacatataaaattatgttctcccgtactccttaactcacaagataaatttaatttttttcagttaacatttaattttaataatacctgttatgtttaaagagtcaacaacacacaaggaaaagtcttctgtgaaatttaatttttttaaaattctgtttgttttaatgatgaagcaattctaattgaaaccatctgattttcaaataaaactaagaggttaatacaacccagtcagtaagaaagcacagtaagtaatatttaaggttttcttcttagtttgctttggaaattggagtagaatggttttgttttgtgtttgctttgttcttttcttctccacacctgtttacggtatgaacagaagtgaacagtgggtaagcattatgttacccttgttagctggtttacagatggttgctttgtaggtttagtatttcaaacaccttttgtaaaatgttctagaaagttccctttcattgaaacttggactgtcaggctatatctggctctgtgtttttgctggatgatttttatatcagtaccatactgctaataaatgcaagccctctccctgctctaattgctaagccctcatgggagttgtggctcaggctcagaaataaatagtaggaaggacagtggaataactattaacactcatttctatagcaaagctttgttgattttcaactagctaggggatgtgatttgtcatgagagagctggaaggtttgttttttgactttatttgttttgggttgtttgttaggcattataggaatgctttttattagttttctttccgtttttcctgtttttaatcttggcatttaaagtcttgctgacttgatatttaaatacttactccttagtgcgcatgcacacacatgcacacacacagagcagtatgcagccacacaccacagaccttgtatacaatagttgctccataagaatatatcacctggtgtcatcaaataaacccattctgtggtgtttgtattatgtaatgatgcaattgaccaattagacatttctcaaaatatatcttcatcattaggaaatgtatgtctatacttaacgtttctttgtcctatccccatgtctttggtaatttttatgtgtgttttagttaacatattattaattgtataaaataatgggttgcattacttttatctgcccttgtggttttggtttttgttttgagtcaaggtcctgctgtatagccttgcttgctctgtaggctcctgctggcctcacttaatattttttctgccacggttttccctagtcccacttgcttctgcctcgtgtgctgggatcagaggtgtatgctgctaggctcaataccctccttctgtatcaggctacattttctgtctatggctgtttcatagcttagttttcaaagctttaagtgtttaagctcatctgaataattttgacctttccctgcactgaccgttgtgtactgtcatagaagattcactggtatatgttgccttggctgttttagagacggggctctttccctgtgtggtccacagtagccctgtacttgcagtcctcctgccctaccctacggtaaaccaaggttacaagtacacatcctcccatacccagccactgtgtgcgcgcgcgcgtgcgtgtgtgtgtgtgtgtgtgtgtgtgtgtgtctgcatttctctttgattccattcgaatgtgagtatttatactaacttgtttataaataaaagaacagtgaaatgactttagggctggtgagctagatcacaggtacaggtgctgactataaaggctggtgagctgagttaatctctgagacccatatggtgaagagagctgactctttaaaatgtcattttaaagatgtattttagcagggcggtagtagtaaatataaatacctttaatcccagcacttgtgtggcagaagcaggtggatctctgtgagtttgaggacagcctggtgtacagagagagttccaggacagccagaactacacagcaaaaccctgtcttgaaaaacaaaacaaacaaaaaggtattttaatcttttccaacccataataaaattattagatacaaaccttaaaaaccttatgcaacaagtgctttacggattcaaccatcagccccattttttaaaaggaatttgttttatttttattaatgtatgtttgagtatgtgtattcatgtctgtgtgcaagtgtcatagaagtcaatggaaggtcttagatcccctggagctgaagttacaggaggttgtaagctgtttaacatgggttcacagaactgaactctagtcttctgaaagagagcaagcgctcttaagctgtgccaggtgtggtgggacacatttttaatctcggcacttaggagacagaggtaaacaggtctctgtaagtttgaggtcagattgggtctacatggagaatttgaggcagccagggttacatagtgagaccctgtttcaagaaacaaaaccatcagcctcattttttaaaaggaatttgttttatttttattaatgtatgtttgagtatgtgtattcatgtatgtgtgcaagtgtcatagaagtcaatggaaggtcttagatcccctggaaacaaaacaaaaagagtattaagttagagtaagccagacatggttaggatactactgtaatccaaacacttagggggtgatgcataaagacccaacaggtttagacaaggttgggttatacagtaagaccccatccaaagtaatagtaatagtacttgtgggagatactgggtttggtttggtttggtttggttttggttttttgagacagggtagccctggctgtactggatcttactctatagacttgaattcacagaggtccacctacctctgcttcccaaatgctgggattaaagacatgtgtcaccactgtgtattatttataattatctcagactgacaactttagtattatactaacattagaacaaattgtggtatattcgtacaatagaataacacatatcactttagcagtttggttactccacattcattaacagcgtggaagaaacactagatgtaatgtagagctaacaatgccagacctgcaagaggacattctgcagtaatcctgttctcattaagctcaaaaataggaaaagctaaaactgtagctctaaacattcaggagggtaattgctctggtaaaagactgacttcctagagtaatgttctgtgtctcatctcaatggtaattaacacgtttattttttttattggggggggggttggtggtttcaagacagggttaatctgtgtagccctggctgtcctggaactcactctgtagaccaggctggcctcgaactcagaaattcacctgcctctgcctcccaagtgctgggattaaaggagtgtgccaccacgtggtggcgcatgccctttttttttttttttttaagattgattgattgattgattgattgattgatttaatgtaagtacactgaagctgccttcagacactccagaagagggcgccagatctcgatacagatggttgtgagccaccatatggttgctgggaattgaactcaggaccttcagaagagcagtcagtgctcttaaccactgagccatctctccagcccccacgccttttatttttataaaatctatcagaatgtatatttttaacgtgtatagtgtacatttgttctgtctccatttaaaaaaggaatctgtatgagccaggcatgatatcacacatttttaatctcagcactcagaaggcagaagcaggcagatctttgtgactttttttttttttttttttttgagatcagactggtctgtgtaaaaagattcaggatagccagagctacatagagagactctgcctttaaaaaaaaaaaaaaaaaaaagagtatatgtgtggtatatacttgtgtgcaggcaagtacatatacacccctgtatgtgtgctgggggccagaggaaggcaccagatatcctggctccatcacttcagccctgtttcttttgacaggaggtgtgtctgtgtgtgtgtgtctgtctgtctctctctctctctctctctctctctctgaatctggagactggtgaacagcaggtcccagtgtactctgtcttccacaacactagggttgtgaatctgcatggctttgctgggctttcccagcctgggctttccactctgtcttgctgcttgctcagcaagttctctgacacactgccttcctcagctcagctcatgtacttgagtttggaaaatatttgaactgcctgttcctatgcaaaaataaatttggtgacactttacatctgtatgccatggaagcctgattgtgattaacagcttcctattttagcacttgaaatgtttgttcttcattgtaaattacatataacatgtttttttcatttttttaaagcaaagcctcacaataccaggattacagtgtatgctaccacacatgccctgacatgatttttgcatatttatatatttatttgtgcatgtacttactgtcagggaggatgcatacagcttgcatggcgagatcagggaacagcttgtaaagttggtttctcctcccatcatttgggttcttgggactcaaatgtaggttgtctattggccacagttccctttatccactgaactgtctcacaggcctcatagattttattttcaggggaaaaaaaacaccaatttctatttaatatttgaaggtatagtttgggtgaagtgccatgaaactctctttgtgctaagttgaggtttgatcactgatactggtttaggtgctgtttttgctatagcccacaataccaaaatgcattgtcctttgcattccagagcctaacatatgtgtaactgaaataaatgtctgtagaaatagtgttgtagcctgttctcctactatagcagaatagcagaaactgagtaaataagactttatttagcttacatggttcatgggatgtttgtggcatatgggccatagcctgtgaaggcctcttgttggatgacaatatgttagagtgtatcatggtaaaagagaaggagggaccaagtgtttggccctgcagttgtctacataacagtaatactatatgggcagaacaggttacatttatatatttaggaatataactaagagtgtgtgtgtaaaacaaagaaaatgaaggccataagtttgagagacagcaagggaagatacataggaaggattagaggtaggaaagatgtaattatattttaatttcaaaaaattttttaaagaaaagagtacctagaggtgatggcacatgcctttaatcccagcactgaggaggcagaggcaggcagctccgagttcaacaccagccttgtctacagagccagttccaggacagccaaggctacacagagaaagataccctgtcttggaaaaaaaattgaaagaaagaaagaaagaaaggagtgggagccagtacagctgccccttttatgatttttcattcacaaggcagtgtctccatgagctgattacctttcaaagattgcttttctccacactctgccatacagactgtttcaacctatagcacatagtatgtatttgtatcatatgtgtaatcttataattttattctgttcattaaggagagaatgccagggccaggagaggtcactcaaatggttatttaaaacattggctgctgttccagaagacctgggttcagattcctaatacatacacaacagctcacagccattagttaactacagtaccagggaatctgataccctgttctggcctctgtgagcatcagacacacatgtggcatccaattaaaacacccatgttaaaaaatttttttaagttgttttttttttaataaaaagatgcccttgtcactaaatttcacaaggaaatttagtttattagtttaatgaaatcacactagatgatataataaataagaacaaaatctgtatttttcagatttctagttacaatcagtttttcatcccttaagtgtgtgtacatacatgtgcatgtgtgtgcctctgcctccccagtgctgggactaaggcgtgcatcactacaccaggcctactctgaagggtttaatactaaccttgaagctatttcagtaacaaaatcaagaacactattagatcagaatgggttttagcatatagtcagctaagctggtaggtaggggatttagaaatggctcagtagttaagatcatttgctttccttccagaggacccaaagtcagtcctcagcaccctgatcaggtgggttctaactttagctccaggggatctaacactttcttctggcctgccacttatacatattcacatgcacacaagcacacacacacacacacacacacacaactaaatctagtaaaaatggagaagatactcaagtactaaaccaagctgcactgggccttgaaagccaaacaaaagatatccagtcacctgctgtgagcattaccctgatggacaagtgtgtggtggagagctgggaaagatggagtatgtggtgaagaaatggaagaatacttgaagccaaaggggcttgttagtgcgctgtggagaaaggtggaactcagcgtcattgaggaacaggtggataaaaggaggccctggtaaggttgtgaccctggctgctggtaaaggccttgtctggatcagtggtcctgctatagctagttctgtgtccatgtctgtggtctgggctgccatcgtggatatctgagggcagtgctttctcttggcatgctgatctgagtggcctgtgctgctgggagccatgtttgggtttgatgtcccagacccacattaccagcaaaggccatgccagatgtctgaactgctgtcacctaaggcaccatgctgagctggcccagctcctgcctgccgcacagtagagctgaccctaatggttggataggtgggggaacaaacccccagcacatgtgtgcgggtgaactagccccgccccgagactatgtgggtggcttgggcaagggggagatgccccctccccagttgctccttgccacttgtggcaggcaggtgagctggcctctaaggtcatgagagcaaggaagcagagatggccctggtggtataggagagctggagaactgaccaactcagctacctaccaggcccagatccagagctttgagttggccacccaatatccaccccacctatgacctgctggagggcatgaaagggctggtcctgcagatccagagctgcagggtctttgtgtaacatagtgtggcacactacacactccaggacaaggttttatgtgtgtgtgtgtgtgtgtgtgtgtgtgtgtgtgtgtgtgtattaatttcttttggtagggaggttgtaagggcagatacgaagggacaggaagatgagtgggattggtgtaatgatgtaaaattcataaagactcataaaatgttaaaataataatagaaataaatctttaaggcctggtggttgtggtacacatctttaattccagcactcaggaggtagaggcagataaatctgtgagtttgaaggcaaccagggctacacagagaaagcctgtctcaaaaaaaaccaaataaacaacaacaacaaaaacccacaagtaattaaataaagaaatctttaaaaaaaaaaaaaaaggcaggttaggggctggaaagatagatcatcaattaaaagcattcgccgctcttgtagagcacccaggttcgattcccagcacccatcgttagtaacttctgtttcacgcgatccaatgccaccttctagcctccatgggcaccagaaacaggtctggcagaatcacattaataaagagaattcaattaaaagaaaaaacaggctacttaaacttccataagataccaatttccccatggttgttacattcatttaaatgctgctttaaaaaaaatttttttttcccaagctgggcatgctaacaaacacttctgatccatccttctaggtcagaggcaggtgggcctgtgtgcgtgcaaggccaggctgatctacacagcaagttccgaaagaccaaaccagttcaataaatacagaggtccttccatgagataaaaaaacagtatacggttactgcttggagataaatattatttatacttaaaatgttacagccaaagattagcatttttctgcttacaatcagtcctgtagtttctcttctctggtaatcctaaatccctttgtttaaagaggccatcactggaaagaggcccatcggacacacaaactttatatgccccagtacaggggaacgccagggccaaaaaaaaatgagaatgggtgggtagggaagtgggagggagggtatgggggacttttgggatagcattggaaatgtcattgaggaaaatacttaataaatttttaaaaaaagaaaaaaaaagaaaagaaaaaagtggaaaaaaaaaagaggaaatagaaagcagcagtgctctggggctagtacactaatgtaatgtaaggcctgcttccctttctggatctggggctagtgtgatgtaaggagtgcttcctttcctccgttagggcttgaagcctctgctggtataaatggctgcttcctcctctgctttcttacagtgttggagaatatgttgctcctatcttcagctgtttcaaaagtgcaagctcgatagatgcctagtcactgtgggtggggctgggaaatggaactttccagataatgggtttataactgagaaaaacagaaaatggtacatggtactaattgtgaattatgtaatttatttaaagagaggtagagagtgaacatgtcctcttaggcacttaaattgtgaaatagataaagattgtgaaatgtgaatacagagaaatgaaactataaaaaggaatttattttttgtggtacagattttttttatataaaatggcaaatgacaattgaagaagcaatcaaattggactctcagcattgttcccacaaatactacaagaatattcaaatgaaatgttaattttcttttatatgtaactggagaattgaatgcctaacataacaaatttgttggtaatctttttcttctgtttttatttaaaaaatattattgctatatattttcatttggcttattcattgtacttgaagtaaaagacagcaacttaaaaaaaaaagacagcaacttttgtttaagatatttcttttaagctttaggaactgaaagttttttctagtgatgttagatgacatttctgggtttttactgtgaattgccaaataatataaaaagagagtaaaaatatcccactgcatattttaaaggcaagttaaaatacaaatattataattatagtattactttaaaatcaacagaaaataactgtcaaattatacaaatacttgtaccactgggtggtcatggcacatacctttaatctctgcactcataagtcagaggcaagcagctctctgtgagtttgagaccagtctggtatccagagtgagttccaggacagctaggggagacaccatggccaagatattacactccaagtgtgctgcccctgtaattccctaaaatggaggaaactcaactgcatgatttctggtaatggggaaatacattggcattctcatctgattgaaaaaaatttttttttaaattatacaaatgataaaaagtactgagggctagataggtgactctgctgttaagagctatggctactctattcttgcagaggacccagatttggttcctagtacacacacatgaaggctcatctctaactctgcttccagggaaactggtgtcaccttctgacctctgcaggcatactgtatgcacatgattcaaattcatataaaataaatacatttttgaaaataagtgtgtaacttacaacaacaataaaaacaaaacaacacacaaggcatggtggctcatgcctttaatcttagcactgagagtcagaagcagggtgagctctaggagttctaggcttggacccaggcttgtacagtgagaccttgtctcaaataaatacgtgatttttaacttgaatggcaactaaaaaagcaagattacatttattatgaaaaacatgtaggatgataaaagaatggtgttccttttaaatttttagttttgggatatttcagttagagttcacagaagtcatgaattcaatccttaagactaattggaattaaaactttattggtgtggcgggggtggggggtgctcaatgaggaaaggtttgctgagcaagtgtgaggaccccagtctagataatcatcacctaataaggcaaggcacagcaccatgcgactgtatggtcagcaccggggagagagcgacgggccaatctctctagtcgctcgtaatagagggagatgtctatataaatgagaacgacaacaaactgactctcaccatttgtaaagaacaagacttccatctgggcatagcggccaggcccttaattccagtgcctgggaggcagagacaagctgctctgagttccaggacagccagggctacacagaaaaaccctttttcaaaaaacaacaaaaattcaaggacagaaagacaaataccactaattgtcactcatgtgtggaagctaatatgttggtctaaaataagcaagagaataatttcttgtcttgggcgtggaaaggggaggatggagagatggtggttaacaggtgcaagggcacatggggaagaggagcagcttccagaactctgtggtgtgagagcatgaatttcaaaatggctagtttaggcagagatgtcttcattgtcctgaaaactcaggctttgtaccatgctgttatttggagattatgtctgttaagttattagaggaaaaagaaaagatgggataaaccagggtttcaaacagtgatatagtgcatgtggtttcccatattctgtcttctctggagcatccagagagaaccccaaagatgcaacaatccattcttaaatgtgggaagactttaaggatgtggtacttttgaagacttggatgttttcccacagacagcctgctactcagtatggatcagtatgagtcaggggtagtgatacgtacctttactcccagcacccaggatgggagacagaaggatcgtgagttcaaggccagcctgcagtacaaagcaagactctgtatacaaacaaataagaatcaattggtatcagattgtaagatatatagtacaatagactatcataaagagttgtctttcggggcatcaagatgcctctttgagtaaagatacttgtctccaagcctaatgacctgagttcagtccccagaacctccatggtggaaggagagaaccatccgcacatgtgtatgtttacatatacagctgcaaataaacaaatacatggaaaattttaaaaataaaagttgtttttcttctttgtacttttaattaatatttcaaaacatttgttttacaggactttgcatcacgggctaaactggcagttcaaaaactagtacagaaagttggattttttggaattttggcctgtgcttctgtaagtagattatatttaaagttacaaatttcactaaatgctatgaatatattttgatcaatttgtttgttatgcatattagtgtcttgtgttcttttatgtatatgtgtgtatcacattcatgtctgatgcctgctaagatgtgggtgctggaaactgaactgtcctctgaaccatccctttagcccctttttttgtttgtttgtttggttggttggttggttggttggttggttttggtttttcgatacagggtttctctgtgtaaaaaatcctggctgtcgtggacttgctttgtagaccagggtggcttcaatcttcaaggcttaattctgtgacaacaaagaaataagatccattattcctatgaagaagtaataatgagatgaattagcaagtctttttccagagtgtccaagtattaataggaagatttgcttaaaacctgacttgagacatcttagctcctgtttaggtttgggcgggtaccttggaagcatggggaattcattcagtttgtattctcagaatccccataaaacatctgggtggtggcgtgcactgtaatatcagtgatggcagaatgggagatgaagacagatggatcactggtacacacagacgtcacacacgtaaaccaaaatgtccacgcgcctgaattactgttgttgatcttggaagtactagacatttccccggtgcagcctctgtgacaacagtgacaacagatataaagtgcccaaggaggctacctcacaaggctgataggatttatgagaatatttgtgaaaatcacacgcaacacagccctgagagaagttggggcgaggggatcagaagttcagagtcgtccctggtgacacagcagatatgagggtttgaagtcagcctaggatatctccaaagcaaagtgtgcattggtgagatgactcagcaagtaaaggcacttgtggcctgaggatgcagaacctgatttcagttccaagaatccaaagaaagggagaagatgcctcaagtcctcctgacattcacatgcatgtgtgtgtaaacacacacaagataaaatatttttgcaagaacaatatagtgcttctcacataaatgctcatttattttcactgtggtttatcagctttctatcagctactgaatcctaggagtatatgaggaacaggtagtgatagcacagaccttcggtctcagcacttgaggatctgaggcaggaggatagctgtaaatatacaaccattctgacttgagtttgaggccagtctggtctacatacgttgcaaaacagccaaagctacatggaaagactcttaatcaaaatcaaagcaaaacaaatagcaacaaaaaccaaagaaggggaagagaaggagaaaagtgagaggtgttttctatctcagagatctagaagccagtaattacagacagttgaaatacagtgttaaaaacccagtgtagtaaccatgcctttaatccctgagtttggtagatagaggcaggcaaatctctgagttcaagaccagccttgtctacagggtgagttccaggaaatccagaattacacagagaaatcctgtgtgtgtgtgtgtgtgtgtgtgtgtgtgtgtgagggaggtaggtgggtggggtgggtgggtaggtgaaaagtactgttgatgagctgaggagcctattagataatagtgttcttaatctgaggccagtttcctgggttcaaatcttttttatgggggaaatgtcttgctctttcttaccattcttttctacaaaataagtataataaatatcatacaacatgtgcccggggaaagtgaaatgcttttagctttctgaagcaggaaatctttattcctggttactcactgcctgtgtgttagaaactcaccatctgtcctacgcgttccttgtattggtcatgtacagttagagttaagttcaatttaaaaatgagtttagctgtctatgaattttttccaagatatttttaatgaaagttaaagggtatttattaattaaccatcttgatgtcaacatttaaactaagataagatcataattgagaggaaattttaaagcaatcctgtagggttttttgtttgtttgcattgttattattattttattatacatgggtgttttgtttgtatgcatgtctgtaactggatctgcaggggcaagaaggcactggatccactagggctacagtgacaaatggctgttagccaccacgtgtgtaagaatcgaacccctctggaagagcagcctctgagccatctctccagccccacaaacagttttagttctaattgtcctctggtttatttagttataacttcaggaaaaacaagcaacagtagcagccgtgtctcctgatagctgactctccttttctgagaggatccaaccagagtgaaattcctagcaagttgacaagttagaatttgtgtctgttctgattttcattttaaacctatttccatttactgtggattaaagcataaaaataaacaatagctgggctggagagactgctcttccagaagtcttgagttcagctcccaccaaccacatggtggctcacagctacctgtaatgggatccaaagccctcttctgaagataacttcagtatactgacatataaaacaaacaaacaaacaaacaaaaaacaagttagtagtagtggtactcgccgttaatctcagtgctctcgaggcaggtggatctcctgagctcaaagccagcatggtctacaaagtgagttttagcacaagggctacccagaaaaaccctatctcaaaaaaaccctgtctcaaacaaaccctgtctcaaaaaaaaagaaagaaagaaagaaagaaagaaagaaagaaagaaagaaagaaagaaggaaggaaggaaggaaggaaggaaggaaggaaacaaaattatatttcatagacttgtgagcataacaaagaaaaaaggtaagatgtggcctttgcactctgtacagtacaggacgatgagtctgagtgaggagaccaccaagagtcacagcagagaatgcttgagttctcatttagtcataacagtgttcttagaagactgcatgtggccatttttttttaaacaactgggcttttctttcagagttcaaaaataaaattatataaattaattggcttacaaatggctcagctaacagtcacaagggcagagtatttctgtgggagaaaaataagtgaagtgctcaaaaacagttgtggtttcttcacattcttacatgaaattgttttaatgtgggaatgtttggagaggtatttattgtgaatcacttctttgtctaggacagagtattcaaaacatctgagtcggtgtgctctcatctctccacacaagggttttttaaaaatatgtcatgtgtccccagagccataggctttcttaatataaaatataaataatgaattatttttgagcaggacctcaaccccctctgtcctgaatccactttgtggccaagagtaacctgaactcctgcctgcctttacctcccaaagctacagctgcaggaatgtagtaaggttaaatgttgaaagcttcacgtttactgaagatacgaacacatcgagataattgtgttttgagtgagaatttacttagaacctctctaataatcttaacaattcattcataccttaccgaagaaatagccaccaaatgagcaaaaatctacttttaaaagggattcaatttctgcagatccaaggttgtatccattcctcctgtgttaaaagactatttgtatgaggtgcatcttagtttgctgtgctcttatagaacggcagactcccgagcatgagagccagcttagggactgctattagagctcaactctaatcttctgaacagtgtcttataccagggacctttatcccgtgtcatacagaaaacaatgattaaagcaggacaccacacacccaacagattttaaaaacattttctttgaattattcacagaagtattttttcttctcttgatagattccaaaccccctgtttgacctggctggaataacgtgtgggcacttccttgtacctttctggaccttctttggtgcaaccctgattgggaaagcaatcattaaaatgcatatccaggtaattatagctgagtcactgtttaatggccttgataggaccatggctcttggcttgcttcctccttccatcagttagacaataaagtatgcaaacttagaagtacataaattctgctgtttttcttctttcctcttccttcttcctttctttattaaaaaaaaataagtagtgtacttgtgtaagaaaatgcatattgttttcatgtacacagtcaaaggctgtgctctccttactgaccaccacttattgattcttgctttctttcacacactgtacagcacttccttgcttgtcaccagtatcctttaccaaaaaccagcaggtgtttgtgggcaggagaagggtagctgaagctgtggggaaacatgggtggtgtggttagagaagtgagactctgctagcccccagagccactcttaccatctttaaggtaaatcaagaggccaagaagtgagggagaagtggctgtgccttgaactgtgaattgttccatctcagggcaactctcagtaataaacatctcaaaaagaatttctgtaagtcagcgtgtttcacagcaaataagaatttactaagaaagaaagttaagaacaatgaattaatgtctctaaaaaataaaagtctagccccagtgattgtgagggactagagaaatggctcagcagtaaagagcactggctgctgttccagaggaccttggctcagttcacagcacccacatggccgctaacaaccacgtgtacctctaatcccaggggaactgacatcctcttctggcctctgcaggtgctgagtgcacacagttcatgtacatacatgcagacaaaacactcgtacacaaataaataaaggagggagggatgcctggcatgttggtgcacgactttaatctcagcactcagaggcagtggcaggtggatctctgagtttgaagccagcctgttctgcaaagtgagttctaggacagccagggctacacagagaaaccaaaaccaatgctgacatagctttttgagttaatacctaagtactcagttatttctatttctattgtaacagtttatgtaatcgtacgtatactctgtttcatgtgtttgaatatttcacctgcatgaaatgtgcactgcgtgcttgcctggtgccacagaggctggagaagctggtaactactaagccatctctccagccccataatctgtaaatctgtatgccttattttatacttcttgaataactttctttacattattatactttttattgcctgtttcttttttttttttattttgtacggtacattttcattttattcattccactccttaccaccttccatacctgttttaattttgaattcatctaatccagtttgtgctgcacatgtactcacagatatatggcctcgcatgagcatggtagacctaccgggggccatacccatgaggagaattattgtaaactttgaatgctgagcaccttatctgcatcgcttgtcagaccttttcatttcagaaaagtggtcaaatttaataatacttttagatatcctaagtagattttcttctaaaatatatcaattctggtttgttttgtttctctatgtagccttggctgccctagaactcaatctgcagaccaggctggcctcaaactcagggatctatctgcctgtctctgcctattacatgctaagattaaaagcatttgccaccactgcctggctcaattcatattgtacttcatacttaaactgtgtagaattctggtataaaggaagtatataagtacagcagtcatacttaagtggctaataagcaatacatgtctataagaatgctggcaggtggaatttgaacccaggtcaactaaggaaggtaaatgttttactgcctgcagattatcaggaccagtgatgggtatgcggtaggtgtgcagatttcatagagaaacttaacgtttagaaggaaaaaggtttgcttgccttcaaacctggaattcaaaacaagccctgaggttgaagttcttctacctactatgtagagaaaatgatagcaaacccatttgtcttcctgaggcatggatctggatccttttcctgactgtggaatatgtttactgtgttccactgtacatagtaaattgccttaagaaggcatgtcacttgatgtgcattcagatgtagcttagaacaagcctttcccgttccctgagtaggcagtactagtgagtaatataaacattttggtcagttccagagtccagagaaacacccacacacaaattcctctgtactctactaaagcccatctctctgtttgctcttctttcgtccttttccccctcagcttaactttagacagctttccaatacgttataagtataacttgctgtctgttagtcttccttgaaaaattcccagcagtacaatctactgtgttggatcaaaactttcctgttccctgggtagattgaacttctctgcctagaagaggattcttatcttgttcccaaatgatgaaaaaaaattaacaagattgtctatttgtgtgcatcttacttactgtggcttttgcctgtctgcatccccatgaaagcacacacacacacacaactggattgtgagccttaagggtcagaaagcttagttccttggtttgggccattgaggcccttgagcacgtgactcgggaaccattcattcactcctctgctcaggtcctttaccttacctagccttgtcccgtttgtttgtttgtttgtttgtttgttgtatttggtggtgggctttattgttttggggctttttttgtttgtttgaagtcttttggatttggttttttggggtttgtttgtttgtttgtttgtttgtttgtttgttttttgagacatgctctctaagtatccttggctgtgctgaagctctctctatagtctaggctggcctcgaactcacagagttccagctgcctctccctcctgagtgctgggattaatgatatgtgccaccacctggctcccttgttccttgtatgcatgagtgagaaaaacgttcactggtttgtgccttatgcttacctggtagaatccccactcagacttaaagctttcaagactgagacctgggttcttaagtggctgatacattttatgttctacccagcccagtaaatttttaagctgttacatataaaaaggaaatattgttttgtttctcaagcactgaagttgtgcaattattggacacaggctgattttgcattgttaggcaatgatggtagggaaagcttatggtgttgaaatcactgaaagtcacaaccattatttctgttgattgttgaaagatttatggctccaagaataacttgtccttggtgtggacctctatactattgctttcccttctacatttactttaacagctgtctcgttaggctgtcatggccttccaccattcctagaactctagtattctagtgtgattcttagagctctctttttttttttttttttttggttttttttcaagacagggtttctctgtgtagccctggctgtcctgtgtcctggaactcactttgtagaccaggctggcctcgaactcagaaatccgcctgcctctgcctcccgagctgagctctctcctttgaaccaccttgcctgctcagtgcctcatggttgtagagttgggaagaagaaggtggcggctgtcctttgttttattcccacctcccctttggttacattggctaacataattattgaacaaacaacagaacattaaagagctcgttgtcaggaacttggaaaaactccaggaatccagctttattcacagaattattatgcatccttataatctaaagttaaatagaaactgttgaatccctagtcagtcctacagctaagcgtgcccttccctttccctgcacttccatgacagtggtggctccttccatcttctcttttaactactagtttcattgggggaggtgggtatgtgcgagtgtgtgcgtgtatgtctgtgtgtgagagtgattttctaccatttgtaaaaaatcaagatataagaagtgttcccagctttttgtttcctaaaagcccttactattgcctggtgttatccataataagtactttatgctcatctgtgttgaatgaagctgagaatatttgctgttagtcctagagttatctgggttgtttgtttttgtcaagtaagagtctctctgcatagtcctggctgtcctggaactccctcagtagaccaggctggcctcaaactcacagagattctcatgcctctgccacccaagcactgggactaaaggtgtgcgccaccacacccggccctcttcttactgttttagtgtcatgcatcacattttttttgttttttggggttttttggggggggttgtttgtttgtttttgtttttgtttttgttttttcaagacaaggtttctctgtgtagtcctggctgtcctggaactcactctgtagaccaggctggcctcaaactcagaaatccgcctgcctctgcctcccaagtgctgggattaaaggtgtgcgccaccacgcccaatattaatatctttaattaacagagggagaacttcattctcaccaaactaaaaatttgaaaagtgcgtttagcagtaagcctgggagatcaggcttgttcaggttctgggaacttggatggtgttgctgtaaaaccttcctaaagttagactgtcttcctaaaatctctgaagtacatttaggcaaggcttcttagagtaatcagctttgagtccatagtggttctgctttgtatagaactcggaagatagaaagagtgacttctccactgttccctcccaggctcgggtttcatgactcacagactctctgagacagtcctgtatcctagtaaaagactacagctgtgcttaaggaaaaacatctttaaaataccaactaccgtctgaattaaatggtcttattttaaaaaatatattaaaattacaattttagggcagcacaccaccttcttttagacaattatactttgggatttacaggtagttcttttaaataattgattgttttaactggtgttttctttcagaaaatatttgttatagtaactttcagcaagcacatcgtggagcagatggtgactttcattgggtgagtaattccttaaagactaatattaatattgtgttttgaatggcgtaaatgtgtatggaagaatacattggaataaaaaaatctagttttgaggggaaaaagtttttgccctattgttattaaaaagacatttttatccaactgaagggaaaaaataaagctcactttttccatttctttggaaactaaatgtatcagttcacataattcttgattttaaagcgctttgggggtagaatatgtgacccttctttgttaaaaaaaaaatgtatgtgtcattacagtttaacatagctttaggccagctactcagttgcatgtaagcaagttaaatagaaactttacataatgttttagtattttactaaaggttgtgcagtggtataatctcaaaatttgtcaaataggaagctgttacttcactagagaaaaattaggccaattaaaaggctaaactatttgacgcatttatttatttttgcagtttgcagaagtaagaccctttgaacatatagttcaaatcatgtcacaaaattgccagcttcaggtcaacaaaacagtttttaaaaacccacccattttgattaactttcaaatggaatatgaacagagtcagatggtagaaataaaatcaagaattgttggtttttagcttgtttacttcatctttcatgtggtttgggttttttgtttgttcgtttgtttttgggatttttgtttttttttacaagagaaaattttctttcatttagtagtagagtggtgcatgatgggaatgggttaagttgaagtgcacttttcatactttaatataaatttccatcttaaaagtcactgacacaaccaaattatttgtgaaaatttgttactgtttaaaatgagttgctacttggtggttaatttgtgttggtttattaccgttcactataaagcatagatatcttgtatatgttttataatagaagttttataatattttatatctctaatgaaataattaaggaaaatacatttttaaaaatatactaagtagaaccaagcactggtttattaattcctaaacttttgattatttatgtggaatataatttatacattaaaggctcgtgcctttaatcccatcccagtattcaagagacagtggctggggaaatctataaattcaaagctagcctggtctacaaattaagttctaggtcagccagggctacacaccaagaaggaaggaaggaaaactagtctgatttttacgctgcctgaatctgtataaacacaatgctttgtatgtcatcatatatcactttcacagcaaaagaaggggaggtgggcctgctgcagagacctgccatcccagcaccaggggaggctaagacaggagccagagttggaggccatcctgagctacctgttacctgaggatgtggggactggatatttttgtcttgtttttgaaggaaatttcctcctattttatattcttcaaaccttagcgactactccacttcccttgagaacgttctgaaaagacagacatgctgttacctgtcatacgcccccactggagagtgacagtgtatcctgcggcacccactttcttcatttttctttcctcagactaaacctttgtagcaggaatagtctcagctacttcacaccctccccaccattacctgtttctccggcctctggaatttccagaagcttgtatgccagagctgcctgtctcacgtgcccagtctgttcctgtcctttcagggctgtcacaccacaccgccatcagaaaccttttaaatctgtcatgttaccaacaacaccctcagtcctctgctctttttcccacccttcaaataaaaccaaaagttcttacagtgtaggagctccaagtattctcctcctgctcagtgtcacggatgcttggatcccagcatgcatgcctgagcctgctgtttcctttgcctgcctgaggatgccttgacctttacactcatggtgttttgggccaaataatcctttgttatgagggactgtctcacgctttaagacacctagccctctatacattatatgtccttggcaactcccagtctgtcaatcaagttatctcaggtgccaaagcaattgcttagcagaatgccatttggcagtatgcttgaggctctgagttcaacctctggtagtgcaaatagcaattatcatctcctagccatgggcagcttagttgtagatcataggcctctcatgtagattgtcccagatatattccccagtgccacaaaaagtgtgtgtattccacactggtgccaaatgtaaagagggtaaatccatagtccacagtcagaatgtccattagatttcagctcctatcctcagaaaacttcctgtgatttggtcaaatattcctaagccagggacttctctgcatagcaacaaacatgacatacacttaaaggttgttttgatttggttttggtttcttttttttttttttttttttttacccatttatttatttattatatttaagtacactgtagctgtcttcagatgcaccagaagagggcgtcagatctcattacagatggttgtgagccaccatgtggttgctgggatttgaactcaggaccttcggaagagcagacagtgctcttaactgctgagccatctctccagcccttggttttgttttgttgttgttgttgttcttgttgttgttgttgttcttgttgttgttttggtttggtttggtttttcgagacagggtttctctgtatagccctggctgtcttggaactcactttgtagaccaggctggcctcgaactcagaaatccgccacctctgcctcccgagtgctgggattaaaggcctgcaccaccacgcctggctagagtttatctttatgtttataaatgtatgattacctctgttactccccctttgcccctattttttctgggagtcttctgtagcccaggctgacttcaaacattcttatgtaattgaggctaaccttaaacttcttaaacttacctccacctcctgagccgggattaaagatgtgccccaccaagctcagtttatgtggctttggggattaaatccaagactttttgcatgctggaccaactcaactaccaccctagccctgatgaccatcttgtttctgccagcccacagaggtccacctgctcctgctgacccattcccagcatctgtgagcttttcaatttcagagatcatgtgtattgtttactgttctgagcacctgacagcctgactcacacagcagattctcaggaaatgaccacatgtgttcaaataaaggtccaccctataaagtcagcagatcttttgtatagccaatattcttctgtttccttagattttgaagtttctaggaaattctgccatttatctacattatatagaagttgaagtgccttcaatatttggacaacttggttaaattgtagtatattctgtcccctattcctttcttttaaactgcattagcatggtccccaaaagaatcctagtgagggactggagaaatagctctggcttaaacacgcacattgatgacttgtaaccacctgcaactccagctccaagggactcactccaggcctctgacctctgagggcacctgtctgagtgcacatacgtacatgctgacacatatgcgtgcacattattcattagtatatataagcccgcacatgcctgtaatcctacctttgatcctagcacccgggaggtagtcaccaaatttctgagttcaaggatagcctggtctacagagttagttctaggacaaccagggctacacagagaaactttgtctaaattacgtgtgtgtgtgttatagctgagtggttaaataaacaaatctttaaataatataagttaattagatttggcttcaacatcagataccaaaagagtttttagtattttgtcagtaattaaattataatcacagtctctcaccaatcatgacaaaatttgttttcctacactttgaaacaagacattgttgctttgttttgtcttttgagacagcatctctattcataactctggctgtcttcaagctcaccgagatcagcatacctctacacctgctaatattaaaagcaagtacctccatgcctagctcaaataggaaatgttctctggctttgggttgttttgtttttttttttaatttatttacttcttatttttttgagacagggtttctttgtgtagccttgactttccttgaactagctctgtagaccaggctgacctcaaactcacagagatccacctgcctttgtctcccaaatgctaggattaacgaggcctgcctagatgttttaaaatataagtgttcaaaatgaaaattaccaatatggctgtagctgtagctctgtggtagagtgtttacaggggatacttagcactgtaacaaaaataataaatataaccctaaatcctgaatgcatgggttcatgtagctcaggtttgtctggttcaactcagaatgatcttaaactctttccttccttccttccttccttccttccttcctttcttttcttttcttttcttttcttttgtaactttctctcaactatgcattgtggctgcctagaattcacaatatacaccaggccgaccttgatatttttgcttacgtgtatgtgtgtatatctttgtgagtaaataccacatgtgtttaagtgacagtggagactggaaggtgtcagagtccttggagctggagttacagatggtcatttgcctgtgtgcgagaagctcagctcagattctctggaagaacagccagtactcttaaccactgagccgcctctccagccccagtggactgctattcttaatataagtatggaacagcctagctaaacatgacaccctaagttcaataatgcctattccccaatcataattaacagctttatttctagggcaattctagaaagtagttgctaatgtcaataggtttaagggaaaatgtccttattatctaaatcagtagatagatctaagttatactctataaataatcagatatagtggaccacttacaaattctgaaagattagaatatagaaaatagctttctaatttatggtgtgtttcttagcaggtgggcagggacagaattctgttgtttttaaagatgttgcttgtgcattggtttgtactctctgagtacgtcagagggaaagtcagagccaaagcaccagcaaacctgagagcttgaaaggcagtgttaacgtcttgttccctattactgtgatgacataaacctgatttttaattcattgtagacttacattgtaagaaatacgtgagacctgtgaatatttcttaaagtacagaaccaaatgataaaaattgtaattataaaatgacatgttccggaattctcaccaaatagaggctaagaattcccagaaaataacattaagcctgtgacttgcaataagccatatgcagaacattggcttgttgtcagcttgccagggtctgattggaagacaaagtccccagttttaccacacaggagaagtttccataactcagtcattgaactcgagggctgggggatgggcttggctggaacagggacttttcaccagttacagaatgttccatgctcttcttcgctgtctcctaacaacagttaacttgatgtttgacctcagagtcaggcttgcctgtggcaagagagagcatttgaaccagttagtaattaagctctgaagtcggaatgttgtttcttgttcttcactctatggaaagtagttagaatgagctatgtcagcctagaccacaggaggaagactcaaccttttcttatttttctgtttgagttgcttgtttgtttttgtttttgggtgtttttgggcatcttttgttgctggtgctgctgctgctgcttctgttgaatgagggtcttactcggtagccctggctagccctggctagcctgtaactcacttcatgtaaacccggctgtccttgaagtcacagaattctgtctgggcttaaagggatgggctaccttgcatggctattttttattactattattataaaatgtaatctagttcatgtctctgattctgttttacgctggtcattatgaaagtaattttcttaaaaggttatagaagtctgaaccaagccgggcgtggtggcccacgcctttaatcccagcactcgggaggcagaggcaggcggatctctgagttcaagtccagcctggtctacagagtgagttccaggacagccagggctacacagagaaaccctgtctggaaaaaaaaaaacaaaaaacaaagtctggcccaccagtattcattccgtgatctgagaaaggattactagcttagaaccccactgtggtgacgcagctgtggtggcgcagttctgactttaaagttacctccctctgcagttgatgatagcttcccttcttgtgtctgtggtaatctgcagaaactcttccatgtttctgtcatagatgctgggatgcagcatagctagactgctgatgagaaatggatattttattaggaagttagcactatcagagcatttcagtggaatattaaagtaaaaatccagtttgttagataatacagggtaaaacaaaaggcggtcaggaattcctgacacattttaattaccctacttcttagatacataaacctattctttttttaatttatttatttattataggtaattacactgtagctgtcttcacacaccccaggagagggcatcaggtctcattaaggtggttgtgagccaccatgtggttgctgggatttgaactcaggacctttggaagagcagtcagtgctcttaaccactgagccatctctccagctcaacctattctttcattaatagaaggaattactatgtggtttttggatgagggaaatactagccaaaaaaaaaaaaaaaaaactagagagaaaatataaattacagggctggagagatggctcagcaattaagagcacttgccactttttcaatagaccctgttttgtttccagcacctgtattggataggacataactgcctgtaactatctccatgggatccagtgcccttttctggccttcttaggtacctgtacatacatatatacatttgggcacacatatatacacaaaaaaaaaattaaggaaaaagaaaatacaaattactactgagcatgatggtgtgcaccatgtacaagcatggggagagaagaggaagttaaaagcaggcttggggtgggggagaaaagaaacagtagaaatataaaggctagctaggcatggcatggtactgcatacatgcctttaatccaataatctagaggcagaggcaggcgaatctctgtgagttagaagccagcctgatctccatagcaagttctaggatagccagagcaacataaagagaaaatatcaatagagatagatgagaagaattcttgcctggtagctcactccggtaatcttcacagttgggaagctgaagcaggaggattatcatgatttccagtccagcctgagctacagagtatttctctgtcttaaatacagcctgatgtgtttattagcctctgttctttgaaaaccggaatgaagatgtgtttccaaggcttgctgagagcaccacagaaggcagtgtttgtccctcagtcttggaagtcggagatgagcatggagagccagtctcagtctcaggcagctgtttgaatacagccagcacgatcgtttttaccccattacagcagaccattccttaaactcctgctttaccattgacagaagtgcctgcctgtccttcctgctcaggtctgcattctgaagaaaccatcccaaacattgaaaagcaagggcattgcaaaaccctgcgtgctagaaaccccttgtgaagcacaagcgaccatatgcctgaagtgtctggaaaaagcaatgtggtctgtcttccaccaagcctcgaagaaagggatgctatcatgtgtataaataatgccactgggtacacagtgacctaagttgaatacaaaagaatttttaattatttcagagggacacagatgcaaattaaattcaagatgttttcatcccaaaccctgaggtagaatcacagcaaattttagaaggtgccagagactgtcagtgcaaacaagtccatatataaaaggcctagaatttccagtgcagtatgtaattctcactctacgttcattgtatgttgggatccgcttccaaaaccctggtgtataaagaaagcacttttcaaattcaaaagaggtaaaatagtcaagtcaatttgccaattttccctggcaacatcagcttcttagattgtgttctatgttcagtgaaatggtaacaatagtaacactttcatgcccagtacccagaattcctagatcttactttcaccaagttaaaaatgctggttttcagtcagtgccagtccactcgctcgctcccgcaatagttaggtaacaactgatgtcttattttttccctctaatctccaatgggcaggacaggtattaatattaatgaaggcttatgaggtggcctttggcttcttcagaatatttcttgataaattcccctgccctttctaaggagtccaccttaagtggagggtttcgggtagtctgtcattgttgaatcaggctaggagtctgaggtcggctctgagtcactatgaatagagctctagtattggttggtccccagggaaactggtggttaaacactgtgagaatctttatcaggcaggaaatgacaactcattaaaatactaaccgttaagcctgtttagatcactcactgtctgggggtggggaggaaattttaaccctacaatgtttaactaaagtgtaccctctcctctcttcccctccccttccttccttcctttcttttgtacatatttctaaaaacaattatttataagtgtcttaacaagaaagaacattatcaactctttttctttttaatggaagacaggtctgcatatgatggaagtagaatgggagagggcttttattttatccccaaagtatatctaccctactgtatgtcccactgttgctgttaagtgtccactccattgtcttcagaggactctgctggcttcagtcgggagatgatcattctaaccaaaaatgttagtgtgtgtctgagatgccagcactctgaagattgagtcgggacacttgagagctccaggccagcctgggctccataaggagaccctgcccaccacccactagccctgcaaaagaacatgaaaaagcagatagttttctacttaggactctattcctaagcttctgaactgcatcccatccatatcttaagttctacaaaaagcctgatacatgcctgtaagcccagcacatgagaagctcaggcaggagggtgtgagttcagagcctgcctgaattttatttactactgaaatttgctaatttaatccagaaaattcttaaaagttttttctcagagcacaggtttggctgtccagatgcctaaaagatccttcataggtgtccgttataaagacaagagactgctgctcacaacacctgtgatcccaacactatggctggcagaggcaggtggatatctgagttccaacaggacagcctggctgtgtagaaaggagagagggggaggggaggagattatttttttagatatagtttgccttcctccttgacttttaattagactgctaaccaagccttaagatgggtttagaaggcagatgtggcacattcttcaaattctagcactagatgtaagggcaggaggatcaggagttcaaggtaatccttagttatgtaaaaagttccaggccaacctgggctacatgaaaacatacctcaaactgacaaacaaaatagtgccaataagatggctcagtgtgtacgggcacttactgccagtgtgctggcctgaaactcgtgagatgaaagaaccatccttcatgttttcctctgacctctactacaagctgtagtgctttgtgtgtgtgtacacacaagtaaagtggggcttttgtgtgtatataaccaaagcaataagttattattattaataataatattgtggtgatgacctgactcttctcagagcattcttcccttagagttttcagtgatccctgtgttagcacccgaggctagtactgtgataatcaccaggaggtgccaaaaaacttagccttgaagtgctgcacaatgaggtaaaggggaaaactacctctgtaccatagcttccttgtttaggactcacaccagtatgtcttacgagctctcattcgtactcagatcctagggaagtagtcaagaaagaagcagagttcgggttaagtttgaaatgcacttcagtctgcccctgcactagtcagatgaatttccatcacctaacaaaacagtacatttttgttggtttggtttgaggttattttttaaagggcaggaagatgacacacacaaggtccctgtagctctggctctcctggagcacactatatagactaggctggcctctggctcccaggtgctgagattaaaggcatatgctactatgcctggcattgttgtttttatggtgtgtgtgtctgtctgtctgtctgtctctgtccgcctctgtccgtccattcgtctgtccttagtgctcatcagccctcacccactgagttgcctgaatgatcttgttttgattttaagacagtgtttcaccacagacttgctatccttctgcctcagtttacccactgcagtgattatagacatgatctcccattttcagcaaaacagtatactttttcagctcacattcctggtaagtatagtgctatgacaatacattaaccaaaaacacatctgactagaacaatccaaacagaatcatgacaaccacaaggaaaagttcaggtatttcatagtaagatctagttaggttactatctccatgacggagaagggactcaaagttaattagatgtgtttttatatgtgacgaaccaacttgcttagagccacggtttgaaagaattccatgaaaggagggaggcgtggtgccgggtggttctagtgcacttggattgagtgcgacttctgcatgaagcgacaaatagagctgtgtgcattgtggaatacttaccccacccactcttcaacagactcccccagctctgcagcttcctcgggagatctgagaacaaaatgacgcaagcctttatgagtaaagatgaggagagttcagaatgcatattcttgctagatatatgatttagacaaatagagttaaacgtttctaaaactattttaaaaataaagatttggccgggcggtggtggcgcacgcctttaatcccagcactcgggaggcagaggcaggcaggtggatttctgagtgcaaggccagcctggtccatagagtgagttccaggacagccagggctatacagggaaaccctgtctcaaaaaaccaaaaaaaataaataaataaagattttacttacaaagtggtcaggactcttatttctctcaagtgttattttgagtgtatttatctgtttgttggtttggttggttgcttagtgttgtctgtgtgctctgtttgagctcggccccttctcacactgcgcacgttggcttgacctggcttacacactctcctgcctcactcatctcaggtgtgagtcactatgtgctgctgcagttctcgttctctttttgtcttttttttcttttcttttcttttttttaaaagtaattactgtttgtcaggaagtctgtcttctgtttgtgctaacatatacttaggtacaaaaccatgggaaacacatgaaatcagttttgagttctgaacttttgaggtttttcttttaagagtttaggattgatttttgttgttttgtgaccctccctcctacccccccccccaaaatgtcagtaacagaaagcaaacctaccacctacaaaatttttttgtttgctttgggcttaattttttattgtttttttttggggggggtgttttttttgtttgttttggttttggttttttgaaacaaggtttctctgcgtagccctggttgtcctggaactcactctggagaccaggctggcctcggactcagaaatccgcctgcctctgtctcccaagtgctggaattaaaggcatgtgccaccactcactgcccagcttgattgtttttcaaaacgcggtttctctgtgtagccctggttgtactggaactctgtagtccaggctggcctcaaactcagccagatccccctgcctctgcctactaatttgtccatagaatatttttctccctattgttttaaaggacaacaagaagaaggtaaatcagaaaccttccctcttttaatgctttcttattgaaaccaagtagctatttataaagctggcttaagtacattttagtctaataagggtgctacaaaagagttcaatactaaaaataataataataataataaaacgaaaaaagagtttaatactaaatcatagctctatctatatttgttcttccacagcattgtgttcttctatatcacaaagctagttctctgagcttctcccaccattgagggttagataagagagttcttgctgggcagtggtggcacacacctttaatcccagcactcgggaggcagaggcaggcagatttctgagtgcaaggccagcctggtctacaagacagccaggactacacagagaaaccctgtctcaaaaaaaaaaaaaaaaagaaggggcgagttcttagctgtggacacacagtggctctgaatttattgctttcagaataacacctgcaaccaacactgaactgtaataatgtatgtatacatgcacacatgcacccacacagcagcaaatatactgttcttggtgtgccagaagagatttgtatttctggtctacttctcaaacataacttaagggatgagtttttgagctattcgagtgtgtgttgaggatggcagggtgctttctagcagtgtgaggctatggacaaactggatatggtggtatagacctgcagtcccagcactgtgacggtagaggcaggagatcaggagtcttggcaagtgtggattgtacaacaagttctagcccagctgagctatttgagcccctgtcaggggctggagagatggctcagtggttaagagcactgactgctcttctgaaggtcctgagttcaaatcccagcaaccacatggtggttcacaaccatccataatgagatctgacacctcctctggtatgtgtgaagacagctacagtgtacttatgtgtaataataaataaatctttaaaaaaaaaaaaaaagaaagctgacacagtggttaaaagcacttgttgtagtagctttaattttttttttttttttcattcaaaatctctggtgtaagaatactttgtggggacctgtgaggtggctctgcaggtaaggatgcttaacaagctgagttaggttcccaggacccacatgtaggagggaagaaccagacgttgtcctctgggtacagtggtgcagtcaaaggcagtgtatctgtccacacactttgctggaattgttttgttatctagagaatatattcctagtgtaaatggagagactaattgccttcctgcctgtactataaggaagagttgcttaagctcctaaggagatgtccacctactgagagcgagtcccacctgggactgcactgcctcactgtttgccattgtaggtctgcggttggcagtcggcagtcggactgcattgcctcgccctcaaagcttgtctgtttaggctataatcaccatccctcagtcatctctccttcccctcccagttctcttagcgtttattttctacattgagtctctaggattgtactttctcctgtttggttttgtggcaaggtctccgtgtagctctggctgtcctaactgtccctacaaaagacctcttaactcacagagactcacctgcctgtctcatgagagctgggactacttgagtgtgctaatatgcccagctgcattttgcttttctattttgtagtgtggacacaaagtagggactccattaaacgttaaagatattactaggtaaaagactgataggtaataatagtacaaaagaaaaagaatggctagcagttgggaagttgttgctggctggcaaatatagtagcaaaaaagagtcttctcttattattctgcttgggggggaggaggggtgaggaaatcgttcactggtgtcagtacgctttcggggtagcactgggcactgcgcacatgtgcctgctatactttttctggccctaggaaaagtacgggcttatttgccttgtagcaaataagacagatgagaaaataaagggtacaggaagtaagggtgtttacttttcaaagttgccccacagtaccgtttaacacaacctgttagctatcaaaagaaaaggaggggtggcgggggaccggagcctggtagcttcagttgccagaccggttttacagccctagctctacgagctctggggaccttggttggtccagagccttatcagagatagctatccagacatcttggaacaagctgtttagtaatgtacaggagtttctgggcaaacatccatcataagccatgaaatgattcagggtccgcagttcctctctgttcctttgttaatcactgacttctggctggggggaggtgcctccccaatgtgctaatgcattctttttggataaggatgacgcaggggttgtcctaataaggacttagattgagaaagcacctcccacccaccccatccccctgagaagacgggacagtcagagagagggagggcagtttcttttttaactagagatgacacaagcataagtcatttccttattaatcggtttaaaccagttcttacaggaactagtggtgataaatgtgggacttctcagaagtcattcattttattctttgtgccacagcagtgtgcagtctcagctgcactagcctcgccctcctgacatagcagtggctctgagctctctcctactttctcccaaatgcattactgctggcgagacctctaaggagttcaggaggaattttatcactatccaagcttcacaggattgctgtgaccctgattgttgaattttgtcctttttatgaagtccttgccgcccttcttttctttttttttttttttttaatctgaagggtaagtagatttcctttaacatttctcttgcttttcttcccaaatgtgtctttcctttggtacctgcctccagtgctgtccccggcataggtccgtctctgcagaagccttttcaagagtacctggaggcgcagcggcagaagcttcatcacagaagtgaagcgggcacaccacaggtgaggatccctcctgcttctcccccctcggcaggcatcagcaggctcaaactagatccggagctctccgggttttagatggggtggctgagggagtttattggtctatgtctagtggcttttcagaaacaaggatggggtaatggaagacaggattctgttgtgtgtgatgctgtcttgatcttacatgagttattacatacatttccaggctaggttaaaaagttaacacgtgcaccatcaccaagcagtaggtaaaatggttatcccctttcatttctgctgtaggaaagcaactgcttgcttgcttttcttttctttctttctttcttttttcttttcttttcttttcttcttttcctttcttccttccttcctctctttctttctttctttctttctttctttctttctttctttctttctttctttcttttttcttttaaataaagcaaggcttttaccacagctgaacttttaacttgaataaactgcctggccgttttgccttcagttcctgaggcagaggaaagaaccagcagatgtgtaggcagcaccctgaacagggagcctgggggagagcagccactttcccttggctttagacttcaaatagctctttgccgctgtggccaaagagggctcacatttatgttctaaaagcagctctcagagtttaggtcctcttccccttccaagcaaggtctgcaaggctgtagagaaagtatagactctaaccagaccactctgtcacagtgtaaaaggacagcccaccctcccatccctccctaagccatacaggttagcatcagctatccatcccacagcttgaactgacaacctagtgtggaaaagcttggcctgaatgtggatttcagcctacctagagaccggtttttagttgtttgggtataataggcaagcctcaagttctcattgtttcccttgaagtgttgcaaataatctccttagtgttgaaccgaggaaaccctttttcttgaattgttctgctttctttcctacagggagaaaactggttatcctggatgtttgagaagctggtggttgcaatggtgtgttactttgtcctgtctattattaactccatggcacaaaactatgccaaacgaatccagcagcgcttgaactcagaggagaaaactaaataagcagagagtttttatctgcagaagttaacatggtggagtcctgccttacactgggagggctctaaccaggaaggaaggtccccgtttccaacctgtgttgatttttaaaacattcttcctgaaagcagtttagtccatatgttacactgacatactttatttgttaaggtaaggtgtctacaccctcagttcaatccacgtcgtattctttagggtggatgtgatgttctgctgcaaacttaacaaaaactggccttctgataccttcacagggccacacagaaccttctgaagtatgttaaatatgtcaggctttttaggcttgtcacaaatgattgtttttttctaagtcaccaaatgtatataagttatatatattggatagcaatcttgcatgtctatcatggaacaatttaatatgccttcctttcccaccctcaaaaaggccattttatgacgcattgcacaccctctggggaaattgatctttaaattttgaaacagtataaggaaaatctggttggtgtctcacaaatgagtacgccattttttattctgtatatttagaatgaagtcgtgaaaaactttataaagacatctttgatcattccgaaattgtgtccgttttctttagtgctatggttttttgtttctttttcacttctacaaagcgagtggcagccttgccaattagacttaaaccagaattgcccaggcttttatgtattgcctgagagagctacctccaaggtgttttgttgttgggctggagatctaagcgggactatgaggttcacctagagtgggaatctcttactttataaaaacaagaagtggtgatgtataaatcagaggacactagcaagaaaggctttttcatgttcatgttagttttagctgtttgtactccggctttaacaggtggaagcttacttctctgtgtgatttctgtgttttatttcaatgtgattttcctttgacatttttttgattgaccctgttcattttgttttgcctggtaggaaaataaacagctttctttcctagaattggcattaagccccagcaaaccagagatgtttgctttgctttaaaccctgcctgagcacctcgtgcttgccccctgtcgtggtcgtgacatcgcatggctgtaccaccttgtcggatagcttatcagactgatgttgactgttgaatctcatggcaacagcagtcgatgggctgtctgacattttggtatctttcatctgaccatccatatcaaatgttttcattcaaacattacccagcatcatggtttgcagtcaaaaattgtggtccttatgtcttgtgagacttggagcccttataccttggtacaacagcagcagtatcaagagaaaacttcctaggaaattggggtagtcgtcacagtcataactaaataaataaaaatgaaaagtcaccttgcctcatggattttggaaaggttgtcctttgttggcttttggttggctggttggtttatgtttttttctttacagggactaacaatttgttacctggccatacttgaaaagcaatgcccaaattaacaatgaaatttttatttgtttgtttgtttgcttgtttatttacttatttattttgagataagacttcactatggagaccaggctagtcttggactcataagagatcaacacaccctcgcctcccaagtgctagaattaacttcgtatgcaccgtgctgccaggcttagactagtataattcatatgttagctagctagcatcagaattcccaccttactttgcaattgtttcatctctttgcctcactattttattttgtgtttatttgaagaaagaagatgttaagtgtgaattatattaagtctttgggatttatttataaaacttgcttcaggatagaatatttaaggaaaaaaaaaatggtttcctaagctaaaagtctaggagactaatcaagccctaaactctgttcatttgtcctggattcccgctgaagcagtgagatatctcttctgtcccatggttgcctggtttcattaaccactatcataaatatatagttatatgtctccaaagatactactacttaagtctagctagtaggagcccagaaagtttgcaagtggatggtttgatattcctgaaacttggagagagctcgggccttctgactccatctcataagtcttattttgttcctctgcactccagctgcatgccccatctgcagtttattcaatcagacactgccatggaatgggtctggaatcttatgtacacataatctggagtgtggggctctgaagaaggatacttccatttatttggatgctgaacatatagttcagtggttctcaacctgtgggtcatggccccttagcagtcctctgtctcctaaaatacattatgattcataacagtagcaaaattacagttacgaagtagcagtgaaaataacctcgtggttgggggatcaccgcaacatggggaaccgtattcaagggtcacagcgttaggaaggttgaggaccactggccttgtcccatcctcctgacaagctagaaaaaaagaagactgcaaatggtgtatttttcgcctgctaagtgtagaagcacctcctgtggtgagcattccttaacctcctcctgactccagcatgctctgctgtctgtagcataaagacagtatgagattcctgtcacccaccaaacacaaaacctgcgttaagcttaataagttgctgtggtaaatgttcctataactccagttttgtttcattattttgcttgtctgtatgttttgagacagggtctgtctgtgtagccctagttgtcttgggactccccgtgtagaccagcttagcctctgactcagagttctgcctgcctctgcctccaaagtgcctgaactaatcacacctagccttaacttcaggtttttagactgatatgttttttagttgcgtgtatctgtgtgggggtatgtgcacatgtattacagtgtcagaacacagcattgcatgggagctggaattacaggtggggcgtgttaggagctaaacccagggcttccacatgagcagggtttgctcccacctgcttgccatctctccactcctgtcttcagtttttaaatcatcaaagatgatcttagacacatgcagaaacgtcataatgtagcaagtgcaccagaaacttatcgcaggttctccacttcaaacctaggcttttagcgctgccgctagcaggagctgccgccgggctgcaccggtcttcacgtgctcctttgaagccttcagcatcttagataggtttttgtagtaaggaaaaagactatttggccaaaccttttaaattttattttgaggggtattgtgttgtgtaactatgtgtgtcttcttcccagtgctgaggctacattccagcttgacaagttttgtttcgggttttttgttgttgtttgtttgtttgtttgtttgtttaataactacgttttatttttgtggatgagcgtacacatgccgtagtgagttcctgaaggtccaagaacagcttctgcctgtcagtttccttttccttccacatgaggctcaagagtcaaactccgagcttcagtcctgccacagaacccttccaccaggccagaaagcagttataaagtccaaatcaggctctcgtggtgaaacgcctttgagcccagcacttgagaggcagaggccagcctggtctacagagtgaactccagggcatctgtcttgaaaaaaagctcaaattcagaaaaagactctgactggccccttgatctcagccccggggaatctgaggcagcacaaacagtattgaaactgaaaccttatctcaagaaagggggagggctgagaggaaaagagcgtactatataagaccgagaaaaactagatacggccagcatgatggcttactggatgaaggagctcgctgccaagcccgaccgtctgatcgtctgagctcaatccctgggattgtgcatggtgggaggacagagtccacaactacagattgcccttggtccttctcatacaccgtgcacatacacttgttaaataaatgttttaaaaaagaaaaagaaagtttgagcagggaaacaacagctttcagaactgaatccaggtcatttagtataggtaactatgtcaccctggatgttctgaaactgtagaccaggcctcaaactcagaaatccacctttctctgcctcccgagtgctgggataaaagtcatgcgccactatacctggcccgaccttttttaataggcaccaaaaaagctgatgcattttcttcataaataacttggttgtgtgtgcatgtggtagtgaatagtgtagcacaggaggagattgtcctgcctaggccatagggtgttcagattatagacaggtaacacagcctccggcttgacttgctaccgaagaattaataagattgctactaaggtaatttaggagtactttttaaacacaacatcctatctctaagagaccacatagcataccttacataggattatccgtggttgacaggggtgtgggttccagtcccttccctacagggtcaagagttcacctgaagtaatatgtttgccttagaggtgaggccaccacgcagtgcagcaaataacctacctagtgcatttgcatttttagcctgttccgggaagggaagagatcttacaaagcctgtgattcgcagctgcttactcaagccttgagaattgcacagggcagggataggcaggtgccaactgttcttgttctttgaccccactggacctgcccagatctgtgtgggcataaatgggaactcaaaaaggaggttgttttggatggctgctgctccccatcagaattcacttcagatctgaatttatgcaaattctcccaacctgtgagagtgagtctgttgcaagtggctggctgggtctgggaacagacagaaatgcaacttttgagggtttgtcatccagatccaccagccagtgacgctggaaacacggctgtccctctcagcatagcctttttacatgtaaagggtttcttccaatctgtggccggcggccgttgctgacttagtcaagcctgcttaggactttggatcattagggcgcacttgagtcctggtctgaattgcttggggaaggaagagttttacagttggagctttacatggaaattcccatctctcatttggagccaggtgtccaacctatttgttaaccatttccaaacgattcaaaggacagacaggaagtgcttggacacactccagcccatttctactaattggcctttatttgcgttggaaaccacatcccagaattcagaaaggactccagcctcctgagacccctgagccacctatgccaactgacagggtctttagggagttcctggcctccactgtcggtcttcaccccaaattcttgctaattctgggaagcctcttgccactctctgctcccctcgttgggaaataagcactttttcttggagtctctttggactgacccagctggacagcattgcctaattgtattctaggctgtctaaaatcaaaaagaaaaaatgttttggggtagcgagcttttgtgaaaagtgatggtcctttggctggagcttggcactcccagttgcctccctccctcttctcaccgtgtgctccataccactgtgcattactcctcgctcccaagcctggctcactggccatggccgaagggaatggtgtcctcagcccagccaccttccaagaaggcctcgaataaagcgaggaagccgctctctgcagcccctcccccacccggctggagatggggtcctgggcctcccgagggtgctcctgggtcacttgttggaagactgctaagccccacatggcgcaaagcctacaccgtttggccatgctctcaatgctccaagcacctctactctgcccattgcaccgtccccttcccacagagacctctctgatacgccctgaaccaggaagcacagtgggtttctgtaactttgatcaggattgcttgctttgtaccagacactgtcttcagcgtcacgtcaagcttatcgtttagtcctcactgcaacctcaggagagcactgagactgggtggttccgctgtttgtgcatagcgggggcacaaacaaggaagtggacatcgaggccttggtgtctcagctcttacgaactctggtgtggaaatcagtgcaaaagttcaagttgcatcttgtgatcaactgagttggtggggaacggaagaaagcagaaaaccaagccccgcctaagaagccaggcagcttttccgccctcctgtgtcacagggttcaaagagctggtctgttccccaccccgatccccagctttcctgcctggccagcttcccagggtgctcttgtgagtaacaacgatgattactaaacaattcatatttgtataggcctttttttttccttttcaattttgggacaaggtctcactttgtagccccagctggcctgagattggccgagatctctctggggtaaaaggcatgcaccttccttcattttcggagtggtttgccatcttgagttacctgttttaatcttcctgacaaccaagtgaaatcatcagtgcctggaacggcatcagcacactttaaaaaaaaaaaaaaaaaaaaaaggcagattatggtgtcagtcctccatgatctcagcactttgaaagcagaggcagagcaatttcaaatttgaggtcattctgagctgtgtagtgagaccttgtcaaaaaacaaaaaaaaaacaaaaacaaaaaaaaaaaactttcttttaaggtaaaggaatcagtttctgattaagaagtaaaggatgttgtcctagactggcattagagctgaaggcagctatgagtcaagagaaggcgtgctggtcagaggggacttggcaagaggttagaagctaggtgtggtggcttagcccgtaatcccagcccttgggaggagaaggaccagctgttgaaggccaacctaggctggatgagaccctgccctgagagagagagagagagagagagagagagagagagagaatatcactcgctggatcagtctactcaagtcctctactccttgctgtagtctgttttgttttcttgaggaggctgcagattggatctccagtcccaccaacacaaagcaaagtacttaatttacaactcatttgcccttttctgtgttcaatctgttttagccactagaatattatctctgtaagggcccactgtgtgcacagcctacagcacgtgctgagtgagtactgtggcagtctagttaggggctacttgacaaatagaggctggggtatgggccaaggccagagtaaaagaggcaagagaaacgaggacgggttagggtgatggctcggtgtgtaaaatgcttgccacacaagcttgaaaccctgagtggattccccagcatccacatctgtaccctatccctagggagcagaagccacagggtccccagagctctctggccagcctaattagtgagttctaggagagaccttaaaaaattaaagttgtcaatgacagaacatctgacacccacatgcacgcaccactcaaagatagtaaggggagacagaagatggctaccctctaagaaagatttataaaaggcgtaggtgtggggaggtgcccactcaggtttctcgatcctagaaatgttatccccacactgctcagctgacacacacactggaccttgcaggatcccacacaaaggccctccaggcttttccggaagtaccagcagccttcacttgtctgatcacttgctgaaatgtgactagtgctttgagtcacaggaaactctaaaacttcctctctcctgttgtgtcctgctggctgagccagtggctcctcccagtgaggttgcagggtggtgatccctgcatagatggtctttctatataaggagaaaagctgggtactgggtgttgctatgttccgctggatgtagccaggagcccagatgtgtattcaagacagagtgagggcttttcccagccacctctgccaaacccaaaggctcctctgcaccttctggagtttatggtgaagacagctttccacttgactgctttgatgctgaggttgtttacatgttatttagtagaagagttgttgcttactgaagctgactgaatagatattcagaataaatgacatgtaaccacagtgataccaccttgcaggagcatcagagttcagcaagagaggcttaacttgtgtggactcctggggtggagaatggggaaagcaaattccacttgtaagttcctgccttgttttcaaagaccacaagggttctcatgggatctggcataatgagatgcccaatctgtaaagatataagcaggcatttcagcgagagggatgctgtgtggtctcttaagcatgtagcaatcaattcaattctcagatgctctctctgcctttgcttccttcaaagataaaggaagcaaagatggagaaacagctctgctgctaagagcacctgttgttcttccaaaggatccattgccctcagacttctgtgggcgctgggcattttcatggtacccatacacacacacatacaagcaaaacacttgtacaaagaatccatagagaagatgtagcttaagtggcagagagcttgcctagcatgcatgaagccctgggtctatggccatgcactgcataccaattttttgcaaaccaataatcccaacatagaggagatgatgacagacttaaggccacacctcaggaggagatggcttaatagtctcagtagttaacacttgctgttattcccaaggacccaagtttggggtgacagcatcccagttccaggggatcccatatattcttctggtctccacaggggcctatgcacctatcaggtgcctctacacccatcacctaggtaaaaataagttcaaggtcatcctagcaagtcagaggtgaccctgggatgcatgagaccttgtgtgtgtgttgggggcagggagggggtttcctagtccctgcagaaggaagtaaaaaagttcctaactaactctttctaccctttgttacagtggctgactcactagacctcagtctccattcttcagactctttccatgtgggggttaacatcctttaataaattcttttccttggccacaccagtgtgtgtctgaagtctcagttacttgagaggctgagacagaaagaggcctgtcttgagctaggagttcaaggccagactgaacaatagagcaggaaaaaagatgtcaggcctggtggtggtacacacctttcattcctgtacaagacgcagaaggagtttgaagccagcctgatttacatagcaagttccagagctacacagtaagactttgtctcaagaacaaacaagggggtggggagatgttagggatatagctcaattgttaaatgtttgcctagcaagccggaagccctggtttccctaacagcacataaactagacgcaacaaacacggtgatccaagagaactcagttggtaaagtgctttatgcttgtcctcacctgtgtcattgcaccatgcgtgtgcctgacgccaaggaggccagaagacggcattagtcttctgcgactacagaagactaagccgctgtgtgggtgctgggacttcaactccagaccactggaagagcagcctgtgctcttaactgttgtgccatctctccagctcaaaactctgccttcaaaaaaaacaaaaacaaaaaacaaaagctgggcataaaggtgcacttttgtctccaaacaaaagtcctagggaagggaggagggttcagtgggaaaaggcatttactgtacaagcctgaagctctgggctcaatccccgggacctacatggtggaaggaaagaaccaaccaacttccacacacaaatagccacataagtaaacaagtataatttttaaaaaattagattgtgtctagtagctagtattgacctctagccgtcacatgtacacacttgcgtggggggtgaggggaggctgagaagcaaacccaggacccggcacatgctaagtgagtttcacctggaacttatcctcagttcctgagtgccccttagtatatttttctagagtttgaggccttggggggtttctgtttgtatgtgtgtgtaagagagtaagaggtgttataatagtaatgggctcatgaacccagggctcagtgctctgatagagctgggagtgttgctcgatggcgaatgcttgtttcctatgcatgacattctaggctccagaaacatcattacattttgtttgaattttttttttaatttttaaaaatacatatgggtgttttgccaacatgctgtctgagcccacagaggccagagtcttagacgccctgggactagagttacagatggcagtgcactgctatgtaaatgcttaagaatggaaagtggacaccctttggaagggccagtgctctcaactgctgacctatctctccagccctccagtttttagattgtattactaact

SEQ ID NO: 2890 - DNA, 2060 bp, Mus musculus
gcgagttccggttggctggagcccagcggcgggtgtgagagtcggtgttgtgagccgcttccaggatcctgcgatccggagaagccggggtctgagcggctcctccagagttcctgatctatgaaatggcagagaatggaaaaaattgtgaccagagacgcatagcaatgagtaaggatcagcacaatggaagtctcacagacccctcttcagttcatgagaagaagagaagggatcgggaagaaagacagaatattgtcctgtggagacagccactcattaccttgcagtatttctctctggaaactcttgtagttttgaaggaatggacctcaaaattgtggcatcgtcaaagcattgtggtgtcctttttactgctgcttgctgcgcttgtagctacgtattatgtggaaggagcgcaccaacagtatgtgcagcggatagagaagcagtttcttttgtatgcatactggataggcctggggattttgtcctctgttggtcttggaacaggactgcacacctttctgctttatctgggcccacatatagcttcagttacattagctgcttatgaatgcaattcggtgaatttccctgagccaccctatcctgaccagattatctgcccagaggaagaaggcgctgagggagccatttctttgtggagtatcatctcaaaagttagaattgaagcctgcatgtggggcattggaacagccattggagagctgcctccatatttcatggccagggcagctcgcctctcaggtgctgaaccagatgatgaagagtatcaggaatttgaagaaatgctggaacatgcagaggctgcacaagactttgcatcacgggctaaactggcagttcaaaaactagtacagaaagttggattttttggaattttggcctgtgcttctattccaaaccccctgtttgacctggctggaataacgtgtgggcacttccttgtacctttctggaccttctttggtgcaaccctgattgggaaagcaatcattaaaatgcatatccaggtaattatagctgagtcactgtttaatggccttgataggaccatggctcttggcttgcttcctccttccatcagttagacaataaagtatgcaaacttagaaaaaatatttgttatagtaactttcagcaagcacatcgtggagcagatggtgactttcattggtgctgtccccggcataggtccgtctctgcagaagccttttcaagagtacctggaggcgcagcggcagaagcttcatcacagaagtgaagcgggcacaccacagggagaaaactggttatcctggatgtttgagaagctggtggttgcaatggtgtgttactttgtcctgtctattattaactccatggcacaaaactatgccaaacgaatccagcagcgcttgaactcagaggagaaaactaaataagcagagagtttttatctgcagaagttaacatggtggagtcctgccttacactgggagggctctaaccaggaaggaaggtccccgtttccaacctgtgttgatttttaaaacattcttcctgaaagcagtttagtccatatgttacactgacatactttatttgttaaggtaaggtgtctacaccctcagttcaatccacgtcgtattctttagggtggatgtgatgttctgctgcaaacttaacaaaaactggccttctgataccttcacagggccacacagaaccttctgaagtatgttaaatatgtcaggctttttaggcttgtcacaaatgattgtttttttctaagtcaccaaatgtatataagttatatatattggatagcaatcttgcatgtctatcatggaacaatttaatatgccttcctttcccaccctcaaaaaggccattttatgacgcattgcacaccctctggggaaattgatctttaaattttgaaacagtataaggaaaatctggttggtgtctcacaaatgagtacgccattttttattctgtatatttagaatgaagtcgtgaaaaactttataaagacatctttgatcattccg

SEQ ID NO: 2891 - protein, 329 aa, Mus musculus
MAENGKNCDQRRIAMSKDQHNGSLTDPSSVHEKKRRDREERQNIVLWRQPLITLQYFSLETLVVLKEWTSKLWHRQSIVVSFLLLLAALVATYYVEGAHQQYVQRIEKQFLLYAYWIGLGILSSVGLGTGLHTFLLYLGPHIASVTLAAYECNSVNFPEPPYPDQIICPEEEGAEGAISLWSIISKVRIEACMWGIGTAIGELPPYFMARAARLSGAEPDDEEYQEFEEMLEHAEAAQDFASRAKLAVQKLVQKVGFFGILACASIPNPLFDLAGITCGHFLVPFWTFFGATLIGKAIIKMHIQVIIAESLFNGLDRTMALGLLPPSIS

SEQ ID NO: 2892 - DNA, 153552 bp, Homo sapiens
  misc_feature (1)...(153552): n = A, C, G or T/U
aatctgagtacgtccagcatcttgaattaaacttacagtcagtcccagcatttttgcatgggccaataatgcaatcagggtttcttcatcaggagctttgaccaccaccttgggctggccacagtattcccattgtttgagcatttcaggatttcttctttgaatctgcttgtaggctgaaacagcagcatgagagcactgggcagccactttcccttttcccatctttaagtcatttcgaaccacaagaatcatcttgtactccccgctgtctcccaagatgcttgcttcactttcagtatctgtgtgtgtcttgctcgtcttgcttttggggagcatcccaaagcatactcgaaggctccagcccaggcacatgccacaagcaactccaacagccaagccgagtgtactgggatgagccaaatattccataaccaaggatttggagggcatcttaaaggaaaggaaaacagttatcactatccggcagtaacaacttacagaggtataggcttatcagagaaacattttgactatacacttaatggtcatccagaaaaaaggcaaaacacacctttgatcttatgcctgcaccctgtttccaacaccctcttgcccaccaccagtgtactagaaaagattcaagcatccacatgaaacagtttaggtcattttgaatcttgatgtaaacgaagttgcataaagttcaaaaactctattcctcagtcttcccttagtcttgtggagatgttccgttttaccaagatgcctaagatttaaagaaaccaaaaataaccctttcctggaatacagtgctaatcggtgttttcacaatgcagtggttctcagtggagatggtatcaaatcagttaccctcagaagaacctcactgtcacattaatgggcctggagtgaggtgcactactgaaatttactaagcctgagcaaggatgctaaaaaccttacaaaatgaagagttgtcccattggacgtgagtgcagctgaaaaacttaataactgagatgagaactcaacatcattttacttaagaacacaaaatattttttgcatagttttactatgtacaggtgctcctcaattttccatggggttatatcccaattaacccaattaattgaaaatactgtaagccaaaaatgcatttaatacacctacagaatatcatgacttagcctagcctaccttaaatgtgctcagaacacttacattagcctacagttggacaaaaatcatctaacacgaggctcttttataatagtgttgaatatctcctgtaatttattgaatactgtaagtggaaaacaatggttgtatgggtactcaccattaatttacacagctgaaagcacagtggtcctgaaaaatgtttgaagcactgaaatagaattaattgctggatgatggggatgcaacagggtcctcaatttctctctcttctgatgaacatcgagaataggtggtagaaggcattgggacatcaacactagttgatggtttagcaagcatagtgttgttcttcaggaagataccaagttttgaccgtacagcttgtttcttcttttcactatatatttctctgtagcaagcaagagcatcctgtatctgcgcctgtcaactgtggcgaatctctcgtaattgacgtccatttcttctaacgtgtaggccactgctgatagcagcaaatgcctctgccagtttctttgctgtgaactttctaggtgccgtgggtgtaacttcttccactgcctcaacgcctttacctctttcttcctccagtgcaatcagctccttattgcaaagatctttagccataattatcctatgcagctgttccttaaaagctatggcaccttcattaccagcacgtgctgcctcaccagtgatctttacattgtgaaaattatgacgccttttgaagcgctggaaccatccatgacttgctttaaacatttgtgtatatgtaggatcactggcacggtcttttagcatattaaaaagacttcttgccttagcctggatcatcagtaggctaagtggtatacgcttctgtatctggtcttccatccacataacaagtaatttttccatatcatcaattggtccagcccttttctttgtgatgacagtggatttaactgatgctgacgatttcgctgcatcactgatttgcttcttatcccttaagatggttgaaatcgtggattgccaaagtcctaactcacgtgcaatggccattactggcttgccaccttcatgctgggcaattatcttgagtttcatttcaagagtaattgccttcctcttcttcatctcaccagaaacaggagacactgatggacattttgtagacatgatggaatgtgaaaacacaaaacacaatatccaaaaaagctgacaacacagtacacggtagaggatgggttgttgattcccgtgatcacatgggtgactgggagctgtggctcgctgccgctgcccagcatcacaagagtgtactgtaccacattatcactaggccaggaaaagatcaaaatgcaaaactcgaagtacagtttctactgaatgggtgtctctttcacaccatcctaaagttgaaaaatcctaagtcggagactgtccatactgaattttccagaagtgtagctatcataaaacaaaggaatgtcatcctttattattttagaaaatcttgctacttcggcaaagctgttcataatatttgagtcaccaataagacacttatatcagtctacaaatgaggctgctggattcacagtgcttctatgtggcaagcaactatcagtttctttttctagtggagtattatctaagcatttataaacatggggccactatatttgtaatgcactgtatttgtaatgtaaagtggtgcccttggaattgtgcactgcatgattggcacggcatagatgacagccctggaagtacttataaatttcctttatgttcttctttaaagttagggcattatattaacattctttccactaattttaacataaaaggggttactgtctttggtggggcagaaattcgtttgaggtggggtcaagagatagagcaaaaagaaaaagcaatggatataaggcgacacagaggaaagcaattttttttttctcctaagaagaaaggataagcatatttaaatgttaataggatgaagccagaagaaaggcaggtaaatgctcaagatagagaaagactttataaagggatgtggttttggaaaggaaaagggacacctttcccaatttcagttttaaatcaagtaggtccacggatttgaaggcaggaaagtattccccctgagggaaggagctcagacagaagttaaaatggagtagagaagagaaaggcggaaataaaaggtgtggcaaaatatggcaggattgcagaggaatattgaaagcatggttaagattaatgatgactttttaatggcaacatactatttgtgattttctccagtagtacttagaagccaaaagactaaaactactaatcacttcctccagacatacaaactaacctccatccacactcatcctttgctctcccctcctactgaaatggtagttggatgtatccaagtttaaattatgccaggagcacgccccaagacacagtggtacaagggaatttaggataagggtaagaatgtttgacatgatagaccatgcaacctgtgttattacatttttctcttttggcctacctgataaaaagcaacctgtattatcaaagactgatttatggacaataaagtgatgcatgctatttatctagacatgctgttgaagaacaggtgtaatgaaagtaaactggaaagacttagagcgatgcatagggttttgattttggagacgaacaattacaaagaacatagctataggaatgggtatctgaaatagaagtgtgactactttctactttttcaattcttttagttttatgatatactgcttcccttccacaaatactgattgaccctgttctagaatctaagggatacaggagtgcacaaagcagaaaaagtcctttctctaatgaagcttacattttagcaatggttttgaaatggtccaatcctaattttgaatttctttcatgctgttttaaaactttggggtttttttgtttgtttgtttgtctatttgagatggagtctcgctctgtcgcccaggctagcatgcagtggcgcgatctcagctcactgccagctccgcctcccgggttcatgccattctcctgcctcagcctccctacaggcacccaccatcacacccggctaattttttttttttttttttgtatttttagtagagacagggtttcaccgtgttagccaggatggtctcaatctcctgacctcgtgatccgcccacctcggcctcccaaagtgctgggattacaggtgtgagccactgtgctcggccaaaactttgtctttatagctcaaaatttccacaatactttgacatgtattgttatttgatccactgagaagtgaggattactgccatatcaaaaatgaagaaattcagaccaagagaagttaagttcaataaaacaaatgtttactggctatctatgtgccagccatacaccctgttaagctgaggatatagtgatgaatatgggccactgtcagctgttcatagataagtagtgaagacaaataattgcaagactggtaaatgttataaaaaggtgtttgacagtcccatcgggggtgagatgggaggcagtaacagatcatcagacattagattctcataagaagtacacaacacagatccctcgcatgggcagttcataacagggttcacactcgcatgagaatctaatgctgtcgctaattagacggagctcaggaggtaatgttagcgatggggagtggctgcaaatacagataaaacttcactcagttgcccaccactcacctcctgctgtgcggcccagttcctaacaggccacagggacgcctgttctaaaagatacctgagccttgactagcagttggcaatagatacagggagatcatttcagaggctgctataatgtagtaatagttaacatttatgaagtgttctgctacacactggctaaacactctataggaattgtcttctttaatgtgcctaacagcacttcaaggtaaatagagctggtcatggacttactgtagtttcgcttaagctttttggctttacaatggttcaaaagcaacacatattcagtagaaactttacccatacaaacattctgtttttcaccttcagtacagtattcaacgaattacatgagatattcaacacttgtaggccttatgttagatgattttgccctattgtacgctaataaattaagtgttctgagcacctttaaggtaggctaggctaaactaccatgtttggtaggttaggtgtattaaatttatttccaacttctatttccttttctaagagacagggtttcactcttttgtccaggctggaatacagtggagtgatcatagctcactgcagcctcgaactcctgagctcaagcaatcctcccacttcaacctccccagtagctgggactacaagcacataccaccacacactgctaatttaaaaaaaaacttttttttttaagacacaggggtttcattatgttgcccaggctggtctcgaactctgggcctcatatgatccctcccacctcagcctcccatgtagctacatttacaggcatgagccactgtgcctggctctcaatttatggtactttcaatttatgatgggtttatcaggatataaccccaccctaagttgagaagcatctatatataattatgatccccatttttcggatgtagaaaaatgaggtacacaagttatagcttgcctaaattcacccagctcataagtggtcgtcttaatccagagcccttgttcttttttctttttgagacagagtcttgttcttgtctcccatgctggagtgcaatggcacaatctcggctcactgcaacctctgcctcctgggttcaagtgattctcctgcctcagcctcccaaatagctgggattacagacacccgccactacaccgagctaattgtttgtatttttagtagagacggggtttcaccaggttggccaggctggtctcaaactcctgatctcaggtgatccagccacctcggcctcccaaagtgctgggattacgggcgtgagccaccatgccctgccgagcccttgttcttttttttggagacggagtctcactctattgccaggctggagtgcagtggtgcaatcttggttcactgcaacctccacctctggggttcaagtgcttctcctgcctcagcctcccaagtaggtgggacttcaggcatgtgctaccacacccggctaatttttgtatttttagtagagatggggtttcaccatgttggccaggctagtctcgagctcctgacctcaggtgatccacccacctcgacctcccaaagtgctgggattgcaggcgtgagccaccatgccctgccgagcccttgttcttaacattactatatcaggcctctcccagcagtctagatgagatgatggtcatttagacaacagtagtgggaatgagaaataaaaaaagtgtctaaggtacacctgtctgatttagtgactgacaggaagtctggtggcaaaagaaagggagaagttaataatgacagctagatttgaacaaatggagaattttggtgaaataccaggtttgaatggaaaagataatgaattagttttgttctgaacaaaagacatctcagagatatctagaaagaagaaaaaaaaggatatatcagcttaaaggacagaaaggtctaggatatatcagtttaaagtcagaaaggtctgggctggaaatatagatttgagagaccttaccatataattgaagttactgaagagatggaagagtatgaggccacttggacaaatatgtagaatgaagaaaggactaaaacataatcctgaggaaatgaacattaggaatcaaaggagactgacatggagtggccaggagtaggagggtcacatagggtaagctgtagtgcacctagtttcagtgctcttccactcaagtgcctaaatacggtgacagggctgcacagacatagtatttatggttctagtgcctttacagcccccaccccctaaaagagacaaagacagagaattcttttttttttcttaagacggcatctcactttgtcacccaggctggagtgcagtggcgccatctcagctcactgcaacctctgcctccgggttcaagcaattctcccgcctcagcctcccacgtacatgggattacaggcacccgccaccacacctggctaatttttgtatttttagtagagacggggtttcaccatgttggccaggctggtctcgaactcctgacctcaagtgatctgcctgcctcagcctcccaaagtgctgggatacaggcatgggccaccatgcctggccaagtttctatttgatgcttacatatcagcaggacttttctttgataatctaacaaccagactccaaactgaacaaatatgcaatgtcagcaattaggattctctgaaataatttctaggctgcaaagtaaccaaatatcccatacactacattccggtactatctggagaaggaactgctctacatagagaagctattatgtgctggataacatactaaatcctttatatccattacctcatttattgttgctatgaacacataaaaaggaagatatattagcctcattttaaagatgagaaatatgaggatcaaacagagaagttgcctttttctttatttttttttaaagagaaggggtctccctctgtcacccaggctagagttcagtggcatgatcatagctcgctacagcctcaaactcctgggcttaagcaattctcctacctcagccttccaagtagatgggactacaggtgcatgccaccacaccctcctgattttttaaaaattttttatttttgtatggacttggtcttgctatgttgcccaggctggtctggaactcctggcctcaaggagttgcttgaggtcgaggcagcagcatctcgagtccagttcaaaaccaatctgggcaacccagtgagacctcatctttacaaaaaatttaaataattagccagatgtggtgccacatgcccatactcccagctactcaggggataaggtaggaggacacctcaggctgggaggtggaaattgcagtgagccatgatcgtgccactgcaccccaggctggacaacaatgcaaaaccctgtctccaaaaaaaaaaaaaaacccaataagatcaaaaacaggacagtgaaagttccaaaagttaccaagtttatttattatgtcccatatctcaatggagtgtctaatcataaaaatgctaaaattaacacatatttttgttctttaggatgttctaatctcatattaatctgatcagattatcatctaactcctctaaaacaacatgtctgtctctttttctgtacacttacgacaagcgtatcaataagcctagtgcctaagactaaggtaaaacaaataaccattctttgtctcataaataattctgggcaatgacagcagaacaaaataagtacatcctataaaatcttcttcttggtgccttctaattcccctgcctcagtaaacccatttcagtagtgctcttgatcccattacctccttctgcaccatgctccacccgttaatctttttttaagagacagggtctcactatgtggccccctatgtggcccaggctgttctcaaactcctgggctcaagcaatcctcctgtctcagcctcccaaagtgttggattacaggctgagccaccgcgccgggtctgcagtttacaaccgaaaaaaacaaacaaacctttcccaaatcttctctgacccttaagccactgccccactttccctgtatagcatattcccagagtctagtatggtgcctggggtatgtcagtaaggattaatacctctctagttaatctctttgtgtgaaaaaggggggaaattttttctttctttttttttttttctgagacgaagtctcactctgtcgcccaggctggagagcaatggagcgatatcggctcactgcaacctccgcctcccgagttcaagtcattctcctgcctcagcctcccgagtagctgggattacaggcacgcgccaccacgccggctaatttttgtatttttagtatagatgggttttcgccatgttggccaggatggtctcgaacttctgacctcaggtgatccgcccacatcagcctcccaaagtgctgggattacaggcgtcagccaccgcgcccggccccaaattttcgactatattcttagaaaccaattctttccacgcagagctcgacagctcgaaacgctggggatattcataagtgcccagctgagggtatgaggcctgctcgctattttatcaatttcggagagagcgcatcgatactgcctgcctggaggctttgctgggaactagaaattctgagtcttcccctccccagcagcctgttcctttcctccaaaggacggttcgcagaacaggaacagagggctcagcggcccctgggcggaagacagtttataaaggagaaaatgaagaaggtgggtaatgcaacgaggtgaaaagaaacgttcctactggcgagaaaatgaataatgatattggtctccttcgccctgtaaggagccaaccaacctacctacagtacctcctttcctcactcgcgccttcccttcttctgggcagcgaacacgtttctatcgcgtgagctacctcttccggggttcctgggtgacaagttccggatcaagaatcacaaagcgagcagtcattcttcctcttgccacacccacagggcccgcactaagagcctaactgaaatcccgcgaggatcaaccgagctcgccgaaaggagggaggaacgtatcccttctggaggctgtctcagggggcagagggaccggaccggaagtgacgtgagcgggttccggttgtctggagcccagcggcgggtgtgagagtccgtaaggagcagcttccaggatcctgagatccggagcagccggggtcggagcgggtaggtaaactaactcagggaattggggaccgaagcctgaggctgtcctcagagcttggcgtcttccggagctctcccacttaggcattgcggatctggggcactgtgattccgacttccagcagtgttttaggacgctgctgactggatgtctcaccctggatgtctcacgctggcggtagccaggttatttgggacaccttctcatggttggtcacccggacattgaacccagacaccgggctgttcgttctcctctccgcgtacttggaagccttgctaggcttctttagagaacctcttagtcccgggatgtccaggaccttggagtaagtggagaaggtcttccctgctgatgactgagctatttctcaggatctgtcagtttggtttttgctctcccgaacctctggcgcatgatgctagatgtattcgctcctaaacgaaatccaggcgtgcaagtgccatctaaagctctggtggtacagggtagccaagggaatgggccttcgctccgcagagcccttggagaggaacttctcagatttttcactgctttaatgaaaaagagttgtctgcctttccaaacccctgaaccccgacctctatatcttattacagtggaggtatttgcagtaaaacgtgaaggtcgacttaatctctaaaattccagaaaccatatgtggccctgtgtcacactgctagattacttatgacctccagaagattttacacaatcatcttttatttacctgcaactccatgtaaaaatctaataatacacgtagactggccactgttgatgtgttttggcagcatcgctccttatcctaatgttaacgtctttcatttctactttggggcttgtcagagatttttgtggacagattacattgatcatttgaagaagcttgtacaagtgtttctggtgttgtcatgatagaatttaatattccagttgctactacctagtaattgtattgtcattagctctgattttagttgtgtattcttagcatagatgatgaaaggaagaaacttacttactaggcatcattgtatgcattgtagcttatgtttttactgtggaagagggatggtggtacctagacaaatgtgactgatttgtgtaggtatgaagtgactctctcgagtagaaattttatattttactactttgcctacattatcttaaggcactgaaggttacttttttcctttgagggatatatcctacttgattacaattgattaatacagtttaatttctatgagtcacattccagaagaaaatatacatagaaccatgatgccttttaccagtttacctatagctagttaaatcagtttgtcagtttacatatttttcttattttgagtttgaaaatttgttcacgcttggctttgaaacaaggtgacaaaatttgagatatggaattatgatagatgtatcattagtttaacattcggtaaatttgcttcttgattatataactgccaaatctgatcttatcttctttatgttcaattgaaggactgattatccagtttttctcacttttccaacttctcgcttttggcttgaatcaccactttttaggattttggtaactattaaactttaaatcagaagacctggattgaagtctgggctccaacacttgttaagtaatggctgataggttacctaacattctgagctggtctagattgtgttgataaaaattctgctcactttctttcatacaactgtcacaaagattaaatgagctagtaaacatgaaattattaaatatgaaaatatggtatcactttactcttagaactggagatatgtcagtgtagaatactgttactttgcatcattatctgaaaatattatcacatacttttctgagatgatctttgccccacctttgaaagttagcaaagaatagtttgataccgtgatccattgaattagtcaccatggttaataaataggttcctggaaaatgagtatagttttgcattcgggagtttaaatctgatcctttttggtcgtcatgtattgtcacttcagaacttccaagtgcagaaaaagctgaagttttttgcctacgtatagttaactaaagagtagaagtagtcctatcttacttacattaaataagaaaccttattattgggccgggcgcggtggttcacgcttgtaatcccagcactttgggaggccgagttgggcggatcacgaggtcaggcgatcgagacaatcctggctaatacagtgaaaccctgtctctactaaaaatacaaaaaattagccgggcgtggtggcaggcgcctgtaatcccagctactccggaggctgaggcaggagaatggcgcgaacccaggaggcggagcttgcagtgagccgagattgcgccactgcactccagcctgggagacagagccagactccgtctcaaaaaaaaaagaaacattattatttcactgaaaccaatatttagaattagaaggaatctctgtgaatgtataagtagattcccatttaacagaggagaaaattaaggctcagaaacaatcagtaattagtaattggcttgcttgaggtcatctggcttaggtagtgctagaacctgaactgtaaggtctcaagtgttctttctgttctaacaaggttgtatccaggcatcttattatggtttggtaatatttccaagttcacatgaaaataattactcttaggtattaaagggatctatccacatacacacgtaaatacacacatacgcacataagccttatttacaaactttttttccctctttagctagtttagtcttataaattgtagcataacaaaaactgtgcttggctagatttgaagtgtaatagattaaggaaagaaaatcagttatattcttcagaatagtttgtctgagttcatgcttcatgactgtcatgtgttgagttatctttctggcaagtggaaatgacggaggagccttaacacgtgtctactgtgaatgttgttgctaaagagtaggagagaactggccaggcgccgtggctcacgcctgtaatcccagcactttgggaggccgaggcgggaagatcacctgagatcaggagtttgagactagcctgtctaacatggtgaaacccggtgtctacaaaaaatacaaaaaaattagctgggtgtggtggcagacgcctgtaatcccagctactcaggaggctgaggcatgagaatcgtttgaacccgggaggcggaggttgcagtgagccgagatcgcgccactgcactccagcctggacaacagagcgagactccatctcaaaaaaaaaagagaagaaaataaaagaaaagcagtaggagagaactgtattatttgctcttacaaaaaaaaaaacctccccaagctgtttgtaattttaatattttgttatgttaattatctattatatatagagccatttctctagttattttattctgggtaaatagccattgtagaagagttaattctttgcattgttgggtactctttttttttggttccattgatttaacaaactttttagtctctttagtctttctcggagatgatagttctaggtgctactgtcattcctgtttttgcccaagtgcccttgctgtgtctcccattttggtgtggaaatgaactctagattagagaatcctaataaacaggacaaattgaagtgataactttgtcgtggttttgtaaattgttactctgctttcacaaagccttgcaaatattttgaggaatagtaaattgctaagagcatattgcctcaagaaattccttattttatatgggaaagcagctttggatggagtttgctgaactgaagttaggtattatgtaggcccttatataaagcttattttaaaatatgctccttgatttgcagcatcaaggaaatttgaacaggagataattttctgtgtcagataaaaggtgatacttaaagtttaaggcatatttaaattaagcaagggcaatctattgagtaattatatcacagctaatatacctataattgctcaagagtttgtttgtattcttgaactacttaatcttttcagtagttcatgggagtattttctcttgtccttgagttttttaatgataactttgttctttatagattacctggaaggactaggcaggtagtgttaaaagccagggctataaagctagactgctttttttcaaattctagctctattactatgcaactcttggattagttactttttacttcttgctatctcagtttcctcctggacaatgaagtcaatacccttcttgttaggattgaatgaataggtttaaataaagcatttagaacagtgtctgtagcatatagttaaccatgattgtgatcattatcatcatgtggccccctaagctattgccaagaactctttcccagccctcttttaaaagcatagctttatgttgctgcttacttaattattgtttgctcattattaatgaagttccagtaaataaatatctgagtatacacttcactttgtctatattttacaacatatgtgagattcttaaccaaatgaggcattcttttgggccattctgttaactttttggtattaacagactacattatctgtgtaagccataacacagaatttggcaattgaaacttttgatgtttcatgatgtcttttagcactttcttggaatggaaagatcattttccagtgacatctattgccttatctgttcattatccagtcagtgaacaaacattttgtgtcccaggccttacaccaggttctggggaaaacaatgggaaataagaattgttaggaaggcagcacatgagggtctaagagagagttaacaatgtggatatatgcttatttgaggctggagcataatagacttggaatacattgacatgagatgatataggaaatatatacaggatccaggtcatgcagaattttgcaggccaagggaatgagtttgaatttgattttgagtgcagtaggaaatcattctacaattttaagtagaggagtaataggatttataagaagttcattgttgctcatgtgtgaaggatgaattgaagcgggcaagaacagaaatggagagagaagttgagagtccactgcatagtccaagaagaagatgaagatggtctggactagaagggtagcaaagaagatggacagttgtgtgtggataccaaatatatttggtataggacttggtcctgggttagatgagtggtaagaaaaagggaagtgtcagggatgactaagcttctggatttagtgactgggtgggtggttgtgccaggtactgggagaagggaggtttggagaagaccaggtttgtttgttacaagaaggtgggtaggtgtagggagaaaaggacatgttaattttgagacacttaaagaatcatctatggacacaggaggggggacatcacacaccggggcctgttgtgggttgggggaaggagggagggatagcattaggagatatacctaatgtaaatgacgagttaataggtgcagcacaccaacatggcacatgtatacatatgtaacaaacctgcacattgtgcacatgtaccctagaacttaaagtataataataataataataataaatcatccaagtcacgcacttacatatataaatctagaggtcaaaaccagaaatacaaatacgggatagtattttcaaccatggaccagatgagtcacctggggagatagggagaggagagggccaagggcaggtaaaagaaagatctgggctggatgcagtggctcactcctgtaatcccagaactttgggaggctgaggtgggtggatcgcttgagtccaggagttcgagaccagcctggacaacatggcaaaaccccatctctctttttttttttttttttttgttaaaaaaaagagagacttttttttttaacaaaacggagactaagaaggtatcttagggctgggcacaatggttcacacctgtaatcccaacactgagaggccaaggtgcgcagatcacttgaggtcaagagttcaagatcagcctggccaacatggtgagaccccatctctactaaaaatacaaaaattagctgggcgtggtggtgggcacctgtaatccccactgctagggaggctgaggcattagaatcgcttgaacccgggaggcagaggttgcagtgagccaagatcgtgccactgcactccaacctgcgcaactgagcgagactccgtcttaaaaggaaaaaaaaaaaaaaaaaaaaagaaggtttcttagtccgttttctgttgcttataccagaatacccgaaactgggtaatttataaagaaaaggaatttaatttttatagccgtggaagctgaaaagttcaagatcgagtggccacattgggtaagggccttcttgctggagggactctgcagagtgccgagagtatcacatggagggggagctgagtgtgcaagctcagttctctttttctctgcttataaagcaaccagtcctacccccatgataacccattaatccattaacccattaatttatgaatggattaattcattcataagggcagagcctccgtgacccaatcacctcttaaaggccttgtctcactctactgccacattaggggttaaattttaacatgagttttggaggggacacatactcaaacaataataggagtgtttgaaagaagaaaggtcagatacacaaaactaataaaagtggttacatctagcagggagagtggggagcaaggtttttcacctttttcaaatgtatatatataattattttaaagcacatgaaagttgttcttgcgtttttgtttttgtttttggtggggggtgggggcggtgcagggagagggctttgagccaggatctctgtcacccaggctagattgttagattgcagtggcacgatcacagctctctgcaaccttgacctcctaggctcaagcaatcctcccacctcagccccctgagtacctgggaccacagataccatgaggtgcatgccaccacacaggagtaattttttaatttttttggtagggatggggtcttgttatgttgcccaggctggtcttgaactctggcactcaagtgatcctctcaccttggcatcccaatgtgctgggattacaagcatgaaccgctgtgcctggcctatttctgtattctctattcttttccattggcttctaactatccttttaccaatatcacactgtcatgattactgtagatttatagtaattgttgacatcagttagtgcaagtccttcaactttgttctttatcccaattgttttcgctactctaagtttttgcatttctataaatatttgaattgctttttttataaagcttgcttgaatttgattgatcttcattaaggctatacatcactttgagggatttattagtgtgttttcacactgctataaaggtactacctgagactgggtaatttataaaggagagaggtttaattgactcacagttctgtatggctgagaaggcctcaggaaacttacaatcatggtggtaggggaaacaggaaccttcttcacaaggcagcagaagagaaaatagtgtgaaggaggaattgtcaaacacataaccatcagatctcgtgagaactcactcactatcatgagaacagcatgggggaaacggcccccatgatccaatcacctccctccctcaacatgtggggattacaggaccctccctggacacatcgggattacagtttaggtggggacacagagccaaaccgtttcaggggaaattgacatagtaacaatatcaagtcttccaaacaatcaacaaaacatgctaatcatttatttaggctctgtataatttattttctttctttatttcgttttagattttgcttatattttgttaaatttgtctctaaatattttatattttcagatgttactgaatctgaaattttaaaaaattattccaagtatgtaatagtccaatttttattccaagtatatggtggaaagtattagttttgatcttttatcctgtgaccttgctaaattcactttgttctagtagttctgagcatttaaaatttttcttttattttggcctgtgttatttaggactgtgtgcattaacttctaactacctagaaaattttttattttttttttgtactaaaggttgacataatttctggcttatcagagattgtcatttataatgcccattcttagcaattttttgagacttgtttcttagcttattcataagtgtggctcatgaaaaagttcagtatccctacagtggtgttgctttagagtagaaagaatagaggatataaatgtcagagcaagtgttcacccagacttttccaagtccaaattcggtagttcttctactttagtgtacacaacagtccagtgagagtattttcaccccagttatacaagtgcaaatgccccaggtatttagggacagtaaagtagggagtttcagatagtttcatagatactacgtgagtttcgtagatactttaagtactaagaatcaatagggatgagtgttctgttaattctagtaatggggaacatttgaaaatactaggacaagctaaacttctgggactgttttttcatcttgtgtgtatatgtgactctggaattcctcagtgaccactgaaaatcctctcactggactgttttgtatagtagaagaactattgaatttggacttggaaaagcgaggttgaactcctgctttgacatttatatgctgccgacttgctatttggggcccttggagcactcagtttctcatttgctaaaagcaaggataaaaataacagtcccttacagatggctgttagcattatgtttgttaacctatttttaaactataaatcactatacaaaagtagttgttattacatacatccaaaactctacccttgtgctagttggaatttttttttacaactagaaaggaaattattgcactcatttactccatgtgactaataactgaatgaggaaaaagagaatcaggcatgtgaagtgacaatgccaaggtctcactcttagccaaatctcccaactctagtctggtattccttcattatcttaattcttgaccttactcttagtcctccaatttttatttttttttatttttttttgagacggggtctcgctctgtcgcccaggctggagtacagcgttgcgatctcggcttattgcaagctccgcctcccgggttcacgccattctccttcttcaacctcccgagtagctgggactactggcgcccaccaccacgcccggctaatttttcatagacacggagtttcactgtgttggccaggatggtcttgatctcctgacctcgtgatccgcccgcttcggcctcccaaagtgctgggattacaggcatgagccaccgcgctcggccggtccgccatctttttgatgaaaatgttttgctaagattgcattggttatgaaaaactgcaggaacatttagaagtagattaagagaaaatgagaaatgggatttttctttttctaatctctttttttttggagacacactcttgctctgtcacccaggcaggagtgcagtggcactgtctaggcccactgcaacctccacctcccaggctcaagcgattcttgtgcctcagcctcccaaggagctgggactacaggcctgcaccaccactcccagctaactttcgtatttttggtacagacagggttccacagtgttggccagtctggtctggaactcctggcctcaaacgatcctcctacctcccacctctggtacagtggctcatgcctgtaatcccagcactttgggaggccaaggcaggaggatcacctgaggtaaggcatttgataacagcctgaccaacatggagaaaccttgtctccactaaaaacacaaaaattagctaggcatggtggtgcgtgcctgttatcccaactactccagaggctgaaacaggagaattacttgaacctgggaggtggagtttgcagtaagccgagatgacaccactacactccagcctggatgacagagcagagcaagactttgttttaaaaagaaaaaaaaaaatcagacccagggcagtttataatttttcaacaattagaaacctgtgatgagttgagtgtattttatacatcactagatttaagttgaggaactttttaggccagaaataccctctttacctgctgatccattattgggagattaatggagattctgaatgtttttaaattgcatcctaatttggggttttgtctaattccccaagactgactgactgacttcctttcttccttccctccctccttttttttttttttttttttttttttttggggagacggagtctcgctctgtcacccaggctggagtgcagtggcacaatctcagctcactgcaacctctgccttctgggttcacgccattctcctgcctcagcctcccaagtagctgggattacaggcgcctgccaccacgcccggctgattttttgtacttttagtagagatggggtttcaccatgttagccaggatggtctcaatctcctgacctcgtgatctgcccgcctcggcctcccaaagtgctgggattacaggtgtgagccaccgtgcccggcccctcctttcttttcttttcctttctcttaacacggtcttactctgtcacccaggttgaggtgcagtgccacaatcatagctcactgcaacctcaagctcctggactcaggcagtcctctggtctcagcctcccaagtagctgggactacatgcacataccaccacacctggctaattgtttttgtttgtttgtttgttttgtttcatttttttcttttaagagatggggtctcactgtgtttcccaggctggtctggacctcctggcctcaaatgatcctcctgcctcagcctcccaaaacgatagggttattacaggtgtgagccatcacacccagccctccccaagaccttagaaagttgaaaaaaattcaagaattttttttcatatatccccattcacattattatgaattttcagagtacacattctttaactggaacaaccacatgatagatataccacagatagacatatcagatgacactctgatatgtctgatagttactctgatattgtgcattttatttgaattatctttggccttatacccctgcacaagtggaaaactatatcaaagcctcgtttgtcaagatatattactcagattagttattttgtttccaagagtagatcacaattccttaatcttaacagttttagggaaatctacagctattttggagtagtctaatccaattaagaaaagatacttctggaggttgaggccagagcatcgcttgagcccaagagttccagcctgtggtgacctgtgaccatgctactgcactctagcctgagtgacagaggaagaccctgtcaaacaaacaaacaaacaaacaaacaaatagatacttctgaaagcaagaaaggttactgagaagcataatacttattggctatctttgtgtgccttgtatgaagaacaatgtgttttattgagcacactgacataatttttttttgagaaagtaaaattcatctggatagatgatttttttttttaaagaaagtatgttcgttttattttgggatgatgttgccaagaaaatgaaaatcaatggttttgttactctcactttcttttccttttctaccttgttaactgttccaataactcttatgttactcagggagatgcttttatcatgttatccataaatgttttttgttttgcttggtgggggactctcagtaatttacttgcacattgtttctgtattacaagtgtgactaatgtttaaaatgaatggagtattatagtcttagcactggatatacagcctacaaagaacctttgtgagctgatttttgcagtgttttctaagcacttctgcaggaaacaaataaaaaaaaccccacatttaatgttaactctgttttaaatgcttcagctgcagttaaggtctgttacactcttttaatgcatttcttgtatctatataagtgttcaaaatgaaaattatttgatgtttgagttatgcttctgcccggtttgtgttctcaaccccatccacagacctataagatttgtttcagcaacctcattcttacaaacaaaactaacttacatacgtgcactcggtgcaaagtagatgccattgaaggtcaagaatatgtgttagatttctgtttgaggacatttcaacattttaaacagactaggaatacttggatttactcctacatctaggaatctcactgacattgtatcatcacagatttcaaaaattattgctactttattgaattttgaaaagtggctctcattaaaaatgattatttcatcttactttagctatgtggatagactagaacccttttacctcataataatttttgacggattgtccttgtcttacatttcaagatgtttagattgatgaataataattcatttttgttattcaacataaactaagattgttctaaatctgtggctacttctgttatgtaggctatggaaaccagttacataggcttttgtatagcatactaatatggaaaggaagtacctgtaagtgaatactcagggcagcatttaccatgatttttttggaaaattgtgacatttgagaagcatggagattgatgggtatgatactgcatttaaaaatattaaacagcatggagaaactaacattaagcgactgctatgtgccagtcactgtgtagtgcacttatatattatttatcttggctgggcgtggtggctcacacctgtaatcccagcactttgggatgccgaggcaggtggatcacctgaggtcaggagttccagaccaccctgaccaacgtggtgaaactccgtctctactaaatacaaaacattagccaggtgtgatggcagacgcttgtaatcccagctacttgggaggctgagacaggagaatcgcttgaacccgggaagcagaggttgcggtgagccgagattgtgccattgcactcaagcctgggcaacaagagcgaaactccatctcaaaaaaaaaaaattatcttaaagtagagaagctaacttgttgagagtcccccaaagcaaaacaaaaacatgatataaaaatagggatgggggccgggcgcggtggctcacacctgtaatcccagcactttgggaggccaaggtgggcagatcacctgaggtcaagagtttgagatctgcctggccaacatggtgaaaccctgtctctactaaaaatacaaaaattagctgggtgtggtggcacacacctgtaattccagctactcgggaggctgaggcaggagaatcgtttgaactcaggagctggaggttgcagtgagccatgatcgccccattgcactccagcctgggcgacaagagcgaaactccgtctcaaaaaagaaaaataaggatggggatattttacaaatatgcacaaatgcaaattatttaacctaaaactagtaagtcaggacgtattggcagctttcagccaccaagttttcctttttccctataaaatgggtcatgatgaagatgataataagtaagattaacagggtatgttgatgctagattagtcactgttgcagtttgaagacacatacagtaaatacatcaggtttttctggataaaaggtagtctagctagacaagatggctcacacctgtatgtaatcccagcactttgggaggctgagacaggaggagcacttggtacccagaagatcactctgggtaacatagtgagactctgtctctacaaacaaaacaaaacaaaacaaaacaaaacaaaacaattctgcaatctggatacccttatttatactaatcaacattgtattgctctgccagggttgtcataacagaataccacagacaaaacatggcgaaaccccatctatgtttaaacaacagaaattgtttttctcccagttttgtaggctgcaagtccaagatcaaggtgccagcagggtttatttctggtgaggactctcttcctggcttacagacagccaccttctctctgtgtccttacatagtctttcctctgtgtccaggtagaagagaaagctgtctggtacttcttccaataaggacgtgagtccttattagagtaccacccttattacctcatttaactttaattaccttcttaaaggcagtatctccaaattatagtcacatgagtgttaggacttcaccatatgaatttgggggggcacaattcagcccattacaagcatatactctccttatagctaatcagcatgagaagtcagattataaacaaaatactatttgggagcatgaactcaaaggtggatggtaagatgatcaaagccgttggtaatcatgatgctgtgtgccccagtagataggagatttatataggctaacttctgctgcactgtgctggagatagactttctattttgttttgttgaacttctcttttatcataaaaccagtccccttaaattatttttttcaggcagtttagttaataattttatggttatgagcccagcctaataatgccccccagtgtaacataaaaaacgtacagcaacctgtactcccaatttgattagatttgagtcttaggctgggcacagtggcttatgcccataaccccaacactttggaaggccaaggctagcagatcgcctgaggtcaggagttgaagactagcgtggccaacatggtgaaaccccatctctactaaaaaatacaaaaaaattagccgggcatgggggtacatgcttgtaatcccagctagtggggaggctgaggcaggagaatggcttgaacctggaaggtggcggttgcagtgagctgtgatagctccactgacggtggaggttgcagtgagctgtgattgctctactgcatgccagcctaggtgatagagcaagactgtctcaggaaaaaagatttgagtctttaactcctaaatcacattttggggccagctcttacattacctcacttttctagattgagcttgtccctttcaaaattctcagaaaaataatttttgatttagtttggagggtggggttgtcttcccaataggtcagtgtactcctaagatcaccattgtatctgggtcctgcctccaggtttgtcactaacttgttctgtgacattatacaagtcccttacctctgagatgtttatctgtgaataagtagaataggcttgatattctctaaagttccttctgtgattctaattattcttacagcatattcataaagcactttcataaagcagtatggcaacatcattttgcctttgaaagaaagaattgtcagtatgtagagggtatttaaggctgagtgaataggtgacatcattagggagagaatataaaggaacataaaaaggaatctaggaccaggctttgaagaaccccaggacatagagcagggggagccgtcagagaaataggaggaaaaatgaaagtatttcaagaaatagggagtggatacttgtgttcagcgaaggtaagagattcagtaagacatgtcctttggatttggcaaatggaggtaatcgataatcttcacaaaagcaatttatttttatttgtcggagcagaagtcatatcacaatggatcaggcagaaatttgatgatgagtaagtggagcctgtatatgtcggcaactcttttgagcactgtttatgaagaaggaatgaaaaatgggaaatactgagtacttaattttctggtgagaataaaggggtaaagattgattacacagtgagaacagaaggagcaaagtccctgagaaggaggaaggaaatgatatatatatattgacataatggcctttggtaagtagaggacactgccaagtcataaagagagaaaaatgctgacatgggtgaagtgtaaatattttagtaggcttaatagtagtgggattggtgaattctctcactgcttttgttatttaaaaaaatgtaacagggctggatatggttcatgcctgtaatcccagcactttgggaggccaaggcagggggatcacttgagcccaggagttcaagaccagcatgggcaaaatggggaaacccagtctctactaaaaatacaaaaattagctggacatgttagcatgttcctgtagttccagctgctcgggaggctgaagtgggaggatcacttgaacccaggaggtcgagggtgcagtaagccatgattgcaccactgcactccagcccgggggacagagtgagaccctgtctcaaaaaaaaaaaaaaagaaagaaaagaaaaagaaaaaagaaagtcaatgtctgaaaataagaaaggaaaaaggagggtaaaacgttttgggagcaaaaacaaagaatgaaatagttgtcaaagtaaaaaaaaagtttattagcaggaatcatcaattttaggtttgagctttggcatcttaataactgggctaggcacagtgtctcaagcctgtaatcccagtactttgggaggctgagatgggcagatcacttgagcccaggagtttgaggccagcctggacaacatggcgaaaccccatctctataaaaattagcctgtcgtggtggtgcacacatgtagtcccagctacttgggaggctgagacaggaggattgtttgaatccgggaggcagaggttgcagtgagccaatattgtgctattgcacgccagccttcgtaacagagtgaaactttgtctcaaaaataataataggcagggcacggtggctcacgcctgtaatcccagcactttgggaggccgaggtggctgatcacgaggtcaggagatggagaccatcctggctaacacagtgaaaccacgtctctactaaaaatacaaaaaaattagccgggcctggtggcgggcgcctgtagtcccagctactcgggaggctgaggcaggagaatggcatgaacccgggaggtggagcttgcagtgagccgagatggtgccactgcactccagcctgggcgacagaatgagactctgtctcaaaaaaaaaagcaaaaacaaaaagcaaaaaaaacaacaaaaattagccaggtgtggtagtgggtgcctgtagtcccagctacttgggaggctgagacaggagaatcacttgaacctgggaagcagaggttgcagtgagccgagattgtgccactgcactccagcctgggcaacacagcgagactgtctcaaaataataatgataataataataataactggcacataatggaccgttggtatatatttgttgaattaagaatttgaagtggctttgtaattgtgtgattttcttcagttatgttcagcttcttagacagatcataagaatgcagatgattctggaggcactgcagttttacaaagttttacagtacgtatgattgggggaagaagaggcaaagtgaggatgttttcaagggaattttgaaaggcaaggaaaaatgttaaatcctttagaaaatggttaaaatgcagaaaagctttgaagtttttataagcttaactattaaaacactagtgggtcttttattttggctgtttcatacttgggatggttttaaatcatgctaaatggtcaaaatgccaaaaaaaaaaaaaaaagggttttgatgcttttataagcttaactgtttagaacctcagtggctctcttgtttggccttatgctatatttccttcttttgggaatggcaagaaggttttgaaaagttgttttttaaactgcaaatttattttgtttatgaagaaatagactgatgaaaataacttagttccctgggttatttcttacaaaacaaaatttcagactattatgttttccagagagaattttggagaaggaaatgtcagtatgctgttcttttttagcacgttgtgtaagagcacattatttgctcaaatgaaaacccctgttgcaatagcttaaaaacaaaaccttcaaataattgtgcaataccattgttataagtacgcactcatagacccaaaatgttttgggtaaaacaatgacactatgggaaagagtaaataggggcaaatgagttcaattatcagtgttttgtaggagaaaggttttagaatgttatttataaggcaaacctttttgtgccctgtttatcttttcatcacaaattaaataaattttacttactgtgatagagatgaatggctggctttaaaatatcttaaatatccttaaatatcttatttgtaaatatttatcatatatttagatatttacaaatgtttaaatatcttcaaaatattttttaaaagatattgcctataggatttggctgaatatgaacacacatagttttttttgtttttttttttgttttttttgagatggagtcctgctctgttgtccaggctggagtgcagtggtgcaatctcggctccctgcgacctccacctcctgggttcaagcgattctcctgcctcagcctcccgaggagctgggattacaggcgcaagccaccacacccagctaatttatgtatttttagtagagacggggtttcgccatgttggccaggctggtctcgaactcctgacctcgggtgatctgcccgcctcagcctcccaaagtgctgggattacaggcatgagccaccacacctggccaaacccacatagttttaagtatttgcagaacttaagtatagcttcaagttaaatgactggcagatggaaaatcattaacttttttatatggttccatttcaaacatcctcagttgatttttttattaataaaattcagatttgtgaaatagatttccattttgtaaacctattgtgatgctctagcatctttggtttttgttgttattgttttgtaattgcttgggctacattatcttttggctgaatcttcacacaagtatgacttaagtttgcagagtcaaactttaagcttctatgaactggtctgaatattttgtcctgtgagctccgatagtgctttctacttcacgatcttcataatagctagtatatattgaggtcacgtgaaaggtgaggcaatatgttagtattttatgtacattatcttgtttaatcctcaaccctctgatgtgtgtcatgttatctctgttttacaaattaagaaaaactgatgtttagagagatttacaaatttctccagtctgttagactttttgtttttttttgtttttttttgagacggagtcttgctctgtctcgcccatgctggagtgcagtggcgcgatctccgcttaccacaagctttgcctcctgggttcatgccgttctcctgcctcagcctccagagtagttgggactataggcgcccgccaccatgcctggctattttttcgtatttttagtagagacaggctttcaccgtgtcagccagggtggtctcgatctcctgacctcgtgatctgcccgcctcagccttcgaaaatgctgggattacaggcgtgagccatcatgcctggccctgttagactcttaagacctgactaaaacattgtcttttcatctaattttattaaaatgcctatttcatcccattctgttataattgatttcttgtgttcatttggcttctttaccagactgtgatcctcttgaggacagggacctccttatcctattaatatttgtatcctcagtgcccattggagacccccgaacttttaaaatgagagctgaatgaacaacactggcatcactgatacaataacaatgaggcatgtgctgtgaagttgttttttatagtttaggcattttgtacgtttattacctcctactcttttgatgtattggtatttatagtcacacatgcatgcgtatcaacaaacatacacatgcatacatagattatttcatctacacatcaatcatttgaaagtggcaattattgtcctcattttgtgaatccaaacaatgaaggactaaagaaaatgaaactttgcttaagatcacacaactaatcagtggcaaatctgggatcaaatccagatttttcagattttaaatcttatgattgtctacttaaggctatctatactaatagaaacctatattttatttcttgatgtgtttatttgcttattcagcattgaagacaacaaaacaaaggtatacacaaatggattgtatcttaaaaaggagaatattacagtgatgaatgtgtgcttttttttctagtgatttttatagcctttcacttgttttcctttatgaggcataaattttgaaaatagttacaatagttagagtttagacaaggaataaattagcaccagctatcaaactacaggaagattggacccatgaccatatcatattctgatcagctaaatataaatctagcatgactcttggcacatacaaagtgttcagttagtatttgttcagtgaataggtaaacaaaccttatacaagcatcttatcaagtgacttcatgaattttctttcttaataatataaccccctaactcatatatctgactttgaattctaaattgtcactgaatccgctcataaaatataaaaatttgagccacttggccatgagaatactcctaatactcttgggtcttctattaaatatagagacgcgtgggtagtggctcatgcctggaatcccaccactttgggaagctggggcaggaggatcgcttcaggccaggagttcgagaccagcctgggcaacataactaaatgaatgaatgaataaatgagattatttatttatttatttatttataatctatgaatatattattcatatgtattcataacatatatttcctatgaatatttggaagtttggatagttcctgctggtgactattcttaaacagctttattgaaacataattcacatatcatataattcacccatttaaacggtatattcacatctatgcaactatcaaaacaattttagaacattatcatcaccccagaaaaaaactcacaactcattggcagctactccccatttttctccagctcatctgctaatccactttctgttatcatggatatgcatattctggaaatttcatataaatgggaatcataacaagtagtcttttgtgactgacttctttcacttagcatattttcagactccattgatgcagtagtatgtattactactttatttctttttatggctaatatttcattgtttgggtataccatataccgtatttcctatatccattcatcagttgataagacatttgggttataggctgggcgcagtggctcacgcctgtaatcccagcactttgtgaggccgaggcaggcagatcacaaggtcaggagtacaagaccagcctaaccaacatggtgaaaccccgtctctactaaaaatacaaaaattagccaggcatggtggcgggcacctgtaatcccagttacctgggaggctgaggcaggagaaccacttgaactcgggaggcagaggttgcagtgagccaagatcatgccactgcactccagcctgagcgacagagactccatctcaaaaaaaaaaaaaaaaaaacctttggtctgttaacagtgtcactatgaacattcctgaattgctgagtcatatggtaactgtattttaccttttgaggaactgacagattgttttccaaagcagctgaactcttttgcattcccaccagcagttccgatttctccacatcctcactaacacttgttattattatcttttttttgtttctttttttttttttttttgagacagagtcttgttcctgtcacccaggctggagcgcaatggcacgatcttggctcactgcaacctccgcctcgggggtccaagcgattctcctgcctcagcctcccgagtagctgggattacagccacccaccaccacgccaggctaatttttgtatttttagtagagacggggtttcaccatgttgcgcaggctagtcttgaactcctgacctcactatctgcctgccttggcctcccaaagtgctgggattacaggcgtgagccactgcgcctggtctattatctgtcttttactataaccatcctaacaggtatgagattgtatctcattgtggtttaatttgcatttccttgatggctaaagatgttagacatctttttatgtgcttattagcaatttgtgtatctttggagaaatatctgtgcagctcctctgtccgtttattaattggattatttgctttttattactgagttgtaagagtttgcaggcccgatacacgcttcttatgaaatatatgtgatttgtaaatactttctcctgtgggttgtatttattttcactttctttttttttttgaagcagggtctcccttttgcccaggctgtaatgcagtggtacaatcatacctcagtgtagcctttcactcctgagcccaagcaatcctcccacctcagcctcctgagcaactagaactacaggcatgggtcatcactcctggctaatttatttatcttatgtaggatgggatctcactgtgtagtccaggctgggctcaaactcctgacctcaagtgatcatcctgccttggtctcccaaagtgctgggattataggcatgagccactgcacccggccccagttgtctttttataagtgtctgggcaagttttaatattgtattaaggactcagcatttattgtattaaggactcagcattttagccttttattgaagtgatgtgctttttgagtagaaagttttgctttactaacacctgaagaatgatacaatcacaggcaatctggtttttatatgttgtattacattaaagtaaaagcactgatacctgtagtatgaaatgaagcatgttataaataaagtacatttaactatcttaaacatttcaagtttggtttttttttttgcccatatcattttattcagtagaattgtttcctaaataaaactggtctatgatcttagatttatgtatcaacagttgcagcatcttttgtagtatattctatttttatataataatgttaaagggaatatgaaagaaaactgtaaaaaggtaaaatgataagattaattttgagtacacagtagtatgatatttaattgtaaattagaaggagttagactttatagtgtgttaacatttggagttactagtgcttgatatcctccttctgtggacagattacctccaaatttcaatctggaagatccctgaaataactactaggaaaaggtttacaactatatggcttttatatttttactatttgtattagaatatctatataaattgttcaatagaataactaaattgttcaaattttggttataaaagaaaaaaagtgtaaacacatcatacatatcatgtggcttattactgtgatgttattcctgtattcagttttattcagtcacagctacacagcagaagtttgtaatgtattgctggattttattttgctgtattagctcctcaagagttactgatctatgaaatggcagagaatggaaaaaattgtgaccagagacgtgtagcaatgaacaaggaacatcataatggaaatttcacaggtaaattttgatggtttgcagggaggagtgctatgggtttaaatgatatacttttcattggaataaaatagagatatattacttcttttatttttaatcttatattatcttcttagtaaattaaattatgggtcagtcagggcctgtaaggtgatatttcacagtgatggcagaaggagcctggccacaatcacataaacagtgttccaagtacaagattattacttgttaatcttatagtatggtcagtgtttatttggctttgctcagtgctcaattttattgtgctattttgtaattctagaagtagattataaacttactacactgttcttaaatatacagttatcaaaaaagttagaatgtgaatattatttaaaaatttattttaaaattatcgtttgagatgaataaactcatattttaaccaaattggaatttgtggtaaatttcagtgtatttgactcctgtttatacagttaccctgaaaatgatgacttttattaatatggatgatttaagtagaaactttccttcatgcatttaaaggaaaatgaaaaaaaagtttttcttttgttgtaatcatactttttttttagcttttgaattgtttgacatctcaaacacatggcaaataatactctagtgtggtaatattttcacagcaatcctctacttttagaggaagtgcaaggaatctgaaatagtagttttcatttgtttgtttgtttgtttgctttttgagacggaatctcactctgtcaccaggctggagtgcaatggtgcgatcttggctcactgcaacctccgcctcccaggttcaagcaattctgcctcagcctcccgagtagctggaattaaaggcatgcgccaccacgcccagccaatttttgtatttttagtagagatgggatttcaccatgttggccagggtggtcttgaactcctgacctcgggtgatccacccaccttggcctcccaaagtgctgggattacaggcatgagccaccgcgcccggcctcatttgtttatcaccatattgccttgcagaggacattttgcagcactgatctgacttttgggttactttggttgtcagtaaacttggcaatttcaccaagagtttcaggattcagagatgggcattgcatacatcatagtgtcttcccattaggagcttttgtgtgctatttttttctttccttttagagagcacatacatttgtatattcttcctcttctgctcaccccattggaatttaaaattaacattagcatgtcaaacttactcttctgtaccaggtgttttttaatattttagagattatgctataactgtacatgaaaaactgattcttaggctgggcgtggtgattcacgcctgtaatcccaacactttgggaggccaaggcggaaggatctcttgagcccaggagtttgagaccagccaggacaacacagggaaacctcatctctgcaaaagattttaaaaatttgctggatgtgatcgtatgcgcctgtagttctagctagctactcaagttctagctagctactggaaagactgaggtgagagtatcgatttagcccacaaggctgcagtgagctgcgatcacaccactgcactccagcctgggtgacagagcaagaccctgtcccccaaaaaaaaaaatttattctttattatggctgcttagtttttctttccattgtacgagtgtgctgtactttaatcactcttctgtcctctattggtaatatataagttattgattattttttgctagtacaaataatgctgtggtcaataaagttgtgcaagtcatttcaccttatacctaatcattcctagaaatggaattaccggtttacagtgtatatgcattttgtgctgggcgtggtggctcacatctgtaatcccagcactttgggaggcggaggtgcgtggatcacttgaggtcaggagtttgaaaccagcctggccaacatgatgaaacctcatctctactaaaaatacaaaaaaaaactagccgggcgtggtggcagatgcctgtgatcccagctactcgggaagctcaggcaggagaaccgctttaaccagggaggtggaggttgcagtgagccaaaatcatgctaccactgcaccccagcctgggcaacagaatgagaccctgtctcaaaaaaaacaaaaacaaaagcattttgtaatttcaatagatggtgacaattaatagctaaacttaattgggcacttactaagtgttaaactcttctgagaactttacatatatgagctcatttaatccttaaaatgaccctgaaaagtatgtactattgtgatccccattttacagaagagaaaactgagtcacaaaagtattaactaacttgcccaagatcacgtgactaatagaaggcagagccaggattggaaccaactagtttgcctcaccatttttgcgatctaaaccactttgttctgtaatatgatcctaggttgatagaatgcccttcatagaaggtggaccaatttagacttatttcagtaattttcccaaaatctatagctctatcccaaattcaactgctggaattttcagtaccatttctttaggacatcctctacaaaagattctgatgtttatcaaggcagggagttggttttgcctcagttgttctctaggtaacactgattaagaaatggcaactataatatagtagcccccttatccatgagggatacattccatgacccctagtggatataggaaaaaacactgtgttgttctgtatatagtaatggggtaacatatacaacgcggatgtactaaacaaagggatgaatcaggtcttaggctggatggagcaggactggcaagattttattatactactcagaacagcatacaatataaaacttaggggcttggctgcagtagctcacacctgtaattccagcactttgggaggccaaggcgagctgatcacttgaggtcaggagtttcagatgagcccaggcaacgtagtgagactgtgtctccacaaaaaccaaaaatattagttgggtgcggtggtacacacctgtagtcctagctgcttgggaggctgaggtgggaggatcacttgaccccaagagttggagtttaaagtgagctgtgattatgccactgcattccagcttgggcaacggaatggagaccctgtctcttaaaaaaataaaaataaatttaaaacaataaaacttatgaattgcttattttcagaattttccatttattattttcagaccatagttgaccatgtgttactgaaactgtagataagggggaactactgtcattcatcttctttctatgctgagttgggactggttgccttttttttttttttttttttttttgagacagagtctctttcattctgttatccaggctggtcttcagtggcacaatctcagttcactgcaacctctgcctcccaggttcaagggattcttgtgcttcagcctcccgagtagctgggattacaggcgtgtaccaccatgcccagctaatttttgtattattagtagagacggagttccaccatgttggccaggctggtcttgaactactgacctcaagtgatctgccctcctcagcctcccaaagtgctgagattataggtactactagttgccatttttcacaagactctaggacttgctattagttgttatttgggagataaaactcttttcatctaaagtgattgaagagaataagcataaatgttagaaattctgttttaatctctgcactattgtttttcagacccctcttcagtgaatgaaaagaagaggagggagcgggaagaaaggcagaatattgtcctgtggagacagccgctcattaccttgcagtatttttctctggaaatccttgtaatcttgaaggaatggacctcaaagtaaagagtcttctcccactaccttttacatacacctcatttactcatttaaaaaatcctcagtaatctcttactttctgccctctactccatcaaaatggattaattacctttagaatattaccataggaacatatttattctcctttctttaggttgaagaaaaatagattagggaaagacattgctatttgctgtttgcttactggattatcacagttgtccactgttttttcatgttgaatctgcagtggagaacactgaaaaatacgatttttattttctctcctgattttaccattgggagaaatcaggtctgtgtaatttagatacactgattctttagcagggcaaggttcagcatatgtggcagttttactgatagtttgagccaatgaaaaagaactctgccatggaaatgtgttgtctttaaatttagtacttgtaagccctgtttcaagtaccataaagaacaagttgaacttttacatgccttatcttctggcatgcccttccaagttattctctgtactattatcttaacatttttattgtactaagagtttataaagtattttgtaacattttcagctgattttgatccttagggcaactccataaagaaggtaaaacaagtacattattataaacattttaggccaggcgtggtggctcacacctataatcccagcactttgggaggtgggtggatcatctgaggtcaggaattcgagacctggccaacatggtgaaaccccgtctctactaaaaatataaaaattagccgggcgtggtggcatgtgcctgtagtcccagctactcaggaggctgaggcaggagaatcgcttgaacgtgggaggcagaggttgcagtgaaccgagatcatgccactgcactccagcctgggcaacagaacgatactctgtctcaaaaaaaaaaaaattagccggtcgtggtagtgcatgcctgtaatcccagctactcaggagaatcacttgaacccaggaggtggaattttaggccatttgggaggctgaggtgggtggatcacctgaggtcaggaattcgagaccaccctggccaacatggtgaaaccccatctctactaaaaatacaaaaattagccgggcatggtggcgtgcgcctgtagtcctagcaacttgggaggctgaggcaggagaatagcttgaacccaggaggtggaagttgcagtgagccaagatcatgccactgcactccagcctgggtgacagagcaagaccctgtctctgaaaaaaagaaacaaagcccgggcatggtggctcacggctgtaatcccagcactttgaggggccgaggcaggcagatcactaagacaggagttcaagaccagcccggccaacatagtgaaaccccgtctctactaaaaatacaaaaattagccgggcatggtggcacacacctatagtcctagcaacttgggaggctgaggcaggagaatagcttgaacccgggaggtggagcttgcagtgagctgaggtcgcaccactgcactccagcaacagagtaagactccatctcaaaaaaaaataaaaataagtaaataaagattataaaaacaagaaacagaatcaggttggttaagtgtctggctgaaagtgcaacatgaagggtctctgacccaggtcctctgacttgaaggccagtgctctttctattatactataatgcttctccatattataagttgaggtttaataagatcaggctttgggtaaggaaaaggctacagtgggggttatgataagaacttgggttctctgcctatgtatcttcccttgacccccttctgttactccaagaggccatgatgtgtaaggaaaagagctcagcccagctgagctaggtaacctaactgtttcagcaagaaattgttctgagaatgatgaatgctgaaagtgagactgtgagatatttattttttttatttgtttttaagattatggcatcgtcaaagcattgtggtgtcttttttactgctgcttgctgtgcttatagctacgtattatgttgaaggagtgcatcaacaggtgagaggtcgagcaattctgtttctagtcttgcacattctctaattctctaatctcagtttcaaatgggatgaatgtgggttttatagaatttctaccctcaacattatctcataactagtatctcaaatgttttacttttaaaggcatacactaaaaatattcttgtgatgttttatggctgctgaggatttatatgtggtgtgtgtgattccttttaccttcaaagatttttttttttttaaagacagagtctcgctctgtcacccaggttggagcgcagtggtgtgatctgagctcactgcaacctctgcctcctgggttcaagcaattctcctgctgtagcctcccaagtagctgggattacaggcacctgccaccacacccagctaattttttttgtatttttgtagagatggggttttgccatgttggccaggctggtctcaaactcctgacctcaggtgatctggctgccttggcctccaaaaatgctgggattacaggccactctgcctgtaatcaaagatttaaatgtaactttcctgaaggttttccgtcacagcagcatgaatccgttaatcactgccaaagttttcttattttctctaacatacttttgtgacccatccaaataggtaggcctctcatccaaggttgatgattacgttttatttgtataaaaagacaggttcatttgcctgtagtctacatgtacaacattactgatgggaaaataggatgctttgttaacctcttttgttaaaatagcaaaacattaatgtattttaacaggaaatggttctagaatggtattttaaagcagtttactgccaatcacagaaatgactctagaatggtattttaaaacagtttactgccaatcactgaaatgactctagaatggtattttaaaacagtttactgctaatcacagagaagtttttacagttctaaatgcatttattttaaatatatctaaaattatcctcaaaattatcttattcataatttgctttttcctgtgtcctgtaaatagtaggactttaaaagtttagaaacaaggcttttattaaaggtttagaaataagacctttattccagttagattaatttttttgtcatctttgccattgtgtattaaagaaattaggcctcttcaatgggtttttaatcttattagttttttcctatttgaaacttactttagttgatttaattttgatgatggtttataaataccgcatttctgtatagagaattcacggttttcacctcatccctttttttcagtatgtgcaacgtatagagaaacagtttcttttgtatgcctactggataggcttaggaattttgtcttctgttgggcttggaacagggctgcacacctttctgctttatctggtaagaataattttattttaataagcaaaaatgatatttcctatctttttattggtgcttttatgtcagaagtaaaaattctaagatttgttttaattacctttgtgttttgtaagcattctgatcctccaatcagtgctttaagtttgacttagagttctgttttgtttttcctttagggttagtatttaaaaagcaaagagaaaaccccagttaagcaaataaggttgtttatttaaattagtttagcgtggaaggtttttcttttctttctagatttaattgcttaagcaattgttattttaataaatgaagtccatttaaatatgcaaaattccatgtgagaaatgtcttcccttacatcctctaacatcatttacatacttggatatttattttggtattcttgttgaatgtaattgatggagtattaacatgtagaactaaatgctttcttgagtcctttgaaccaaagtataaaaagtgccccttctgggctgggcgtggtggctcacgcctgtaatcccagcactttgggaggccaaggcgggcagatcatgaggtctggagatcgagaccatcctggctaacatggtgaaaccctgtctctactaaaaatacaaaaaattagccggacgtggtggcgggtgcctgtagtcccacatactcaggatgctgaggcaggagaatggcctgaacccgggaggcggagcttccagtgagtggagatggcgccactgcactccagcctgggcgacagagcaagactctgtctcaaaaaaaaaaaaaaaaaaaaaagtgccccttctgaaaaatattcttttactagtggaaataagagagaatggccaggcgcagtggctcacacctgtaatcccagcactttgggaggccgaggcaggcggatcacaaggtcaggagatcgagaccatcctggctaacatggtgaaaccccgtctctactaaatatacaaaaaaaatcagccgagcttagtggcaggcgcctgtagtcccagctactcgggaggctgaggcaggagagtgatgtgaacctgggaggtggagcttgcagtgagccgagatcacgccactgcactccaacctgggcgacagagcaagactccgtctcaaaaaaaaaaaaagaaaaagaaaaagaaataagagagaatgaagatcaattttcctttgaacattcacaaatatactggaataatgtcagagctagaactagggagaggttgagttagatactgagggcacaaaatataaataggcactctcagggtcatgcagatacagaatggatgaataagtgcctcattaaattttgtgccccatgtgccttgcttgttcttgctgttcctgtccctagataataaattgaaaacacttccatatttgaaagcagtttgatcttcattggggaaaaacaggtgaaagattgtcaagcagtacccattgctgaataaaattcatcactacaagcacttgcaatctctgtgctataatgaattcatctctgaagcagctaggataagtattaaggaatgattgtctgcttggctcagaagggtactggattaatgatctgacgaatgctttgggaattaatctataatatatcatttctccaagtttatgggagtttaaaacttggaactttagaattatgttcatgtttgcttggtgatttaactcaaacagggacataaatcctagggaattaactcatatcactgtttttctaataactgcattcgtagtagaataacactacattcactagtagaggttgagggagagaggaaaagaaggaattacaggttacaggatacttttctgttcgtgtctagacctgtcctcatattccttgggaaaaccagattaagaaactcatttgtagcatttaattaatttggaagcctctgaaaagcaacccagatagcagactctgctgaatgtcaaaagagattgaaattatggctcatgcctgtaattccagcattttgagaagccaaggcgggctgatcacttgagcctaggagttcaagtccagcctgggcaacacatctctacatctctataaaaaatacaaaaattagtcgggtgtggtggcacaggactgttagtctcagctattcaggaggctgaagcgagaggatggcttgagcccaggagataggggctgcagtgagctatgattgcaccatgcactccaacctgggtgacaaagtgagaccttgtctcaaaaaaaaaattattttaaatgccctaaaattaagtatatataaaacagccagatctgcaatttatgaatatataatcctggctatagtgtgggagatagattgaaggtggaagagaagaggagcagttaggattatccttatgagagacacaagcttcccaggaggtgataggaagaatggatagcaaggagtatttataaagagaacttgtagagagaagtcaagcaaaatgaagacaaaagatggtatagatctttgatgttttaaaagattgcttggaatggaaatagcatttgggatgaaaaaggacaaatatgacagaaattttagaagtacaatcaagagtgtggtacgttattatggaggaagaaggaatgaaagataactcttggatttccttttgttttgttttaatatattttatgtgtatttaaggtatataacatgatgttataagatataaatatatatagtaaaatggttactattgtggaaaaaattaacatattctttatctcatgtagttacccatttttacgtttttactcctcatggcaagaacagctataatttactagtttagcaaaaactctgaatacaacacattgttattaactatagtcctcatagtgtatgtagagtacattggatcttttgacttgttctgcctgtatatttgctactttgtatcctttgatctacatctcctcccatctctatctctataaatgagatcttgcaacatttttctgtgtagttactggttttttactgagtgactgggtagattttgatgccattaactgtatagaaaacagttatttgttcacttgttcacatttattacatattatgtgaaagtatgtgaaaagagaaatttaaaggtatactgtaattatgctgcaagttaaatgagatcctcactttatccaggtaggttgctggtgcccgtagttgaatggaaagagaagggaaatttataaaggactgagaacgcctacaaaacaaaacaaaacaaaaaattattagagctgggcacagtggctcattcctgtgctcccagtgctttgggaggccaaggcaggaggatcgcttgagaccacaggttcaagagcagacctagcaagaccccgtttctgaaaaacacataaataaataaaagataaataaattagctgggtgtggtggcatgtgcctgtggtcctagctccttgggaggctaaggagggaggattgcttgagcccagaagctcaaggtcacagtgaactgtgattgcaccactgcactttaacctgggaaacagagcaaaaccctgtctcaaaaacaataataataataataataataataataataataggctttattgttcagtgtagttttaggtttacagaaaaattgagcagaaaagacagaggattctaatacaccaggggtccctaatccccaggccacagaccagtactggtccctggcctgttaggaaccaggccacacagcagtaggtgagcagtgggctggcaagcaagtgaagcttcatctgtatttgcagccgctccccatcactcgaattactgcctgagctctacctcctgttagatcagcagcagcatcagattctcataggagctcgaaccttattgtgaactgcacatacgagggatctagcttgcatgctctttatgaaaatctaatgcctgataatctgaggtggaacagtttcatcccaaaaccatcccccacctcaggtctgtggaaaacttgtcttccacgaaactggttcctggtgcccaaaaggttggggaccactgccataacacctttccccaccacacagtttcctctactattaacatattgtattagtgtaatttatttgttacaattgaggaaccaatattgatacattattaactaaaacccatagtttatgggatctactctgtgttatacaggtctatgggttttgacaaatgcataatgtcatgtatatacctatagtatcatacagaatagtttcactgtcttaaaaatgccctgtgcttcacctgttttttccacttccccacctgcccccaaacctttcacaaccactgatctttttactgtttctatagttttgccttttccagaagacactatagttggaattatagggtatgatccttttctgaccgacctctttcactttgcaatatacatttaaggtttttccttgtctttttctggtgtgatacctcatttcttttcatcactatttaataatattcctctgtatggatgtaccacccgtttgtgtatccattcacttactgaaggatatcttgtttgttcctgtttggcaattatttttaaaaaactgctctctctctctctctctctctatatatatatatgctatattatatatatgctatatatatgctatatttataaatacatatattttctgatagatcctgagtataatatatactctattgatagaacatgagtattaattactaatatatagaaaaaacttggcttttttaaggttgtttactaaccttatatcctgcaacattgctgtaattgcttaatagctccaagacttttttgatgattccttatgattttctacatagataattatgtcatctgtgaacaaagacagtttttctactttcccaatctgtatacctgttatttcctttcttgtcttattgcattggttaggttttcaaaataatgttgaagaggagtcatgaaggggccatcctgccttgttcccaaccttaatgggaaggcctctagtttctcacccttaagtatgatgttagctgtaggtttttgtagatattatttaccaggttgaggaagtacccctctgtgccaaatttgctgaggtttttgttttttttttttaaatcatgaatctgttggattttgtcccccaaaacccactgttttagatgatagtgactagaaagccaatatttgaccaggcgcggtggctcatgcctgtaatctctgcactttgggaggccgaggcgggtggatcacctgaggtcaggaatttgagaccagcctggccaacatgatgaaaccccgtctctactaaaaacacaagaaattagccaggcgtgttgacaggcacctgtaatcccagctactcaggaggctgaggcaggagaatcagttgaacccaggaggtggaggttgcagtgagccgagattccaccactgcaccccggcctgggcaacaagagcgaaattccatctcaaaaaaaaaaaaaaaaaaaaagtcaatatttaaaaaagaaataaagtccaggcatggtggctgatgcctgtagtctcagcactttgagaggccaaggaaggatccctgcttgagaccaggagttcaagacctgccagggcaacataatgagaccccatctctaccagaaaaaaaaaaaaaagagagagacagaaggaaagagagagatgaaagaaagaagaaaaggaaggaaggaaagaaattgaatatttagaagcttggggagaaatctgttaaatataaaagaaatataaagagagatctagtatatgccatttccatttgaccaaatgacctttagttcttagacctttttgatcctgacttccatttaggatcccctgggtttaacagaaagaatgaagaagaaagagcatttataaaatataatttgcagaaaagcaaaaggaaaacaaaagatatcactagtctttattttttaattgactggttggggtggaaatcagtttgcaagaggttaagcactactaacaacaaaaaaggcaaacatcattgtcatactcatgctaatactagctggtcagttcttttatttttattcatgtttggtggccattttgtggtacccattcctatgggaagattttgcatccctaccttactgaactccagccatattatttgctttgaccaatgaaatgtgagcataagtgatagatgttgcttgagatctttgtgttgtttgttattacgtcataatctaacctatcctgactgataggcagctaacatttattgaatgtttactaggtggtagtctctgtgagcatcactttaaatgaattatctcacttaggcctcccaagagccaagctagtcaataaccaatagtgtgacaagtgtaaaaattttaattaataagcgtaaactatttacttgtgaactttggcaattatagaaaagagtaaaataagaaaccagaagcaaagcagagtcaaaggtttcaaaatctgatctgggtttttacttaatagaaacaatttcaaataatctctggtttttttaagcttatgccattttcttgctgattagtgatcaacagaattttatccttattggtcaccatttcttttcttttatatgtaggaaatgcagttgtgtttaggatatcctaattacacttactttcattttccaggcttaacataatcctcacttagggaaatgtgacattctcatgttctattatgtgctgatgaaacaggcacctctgcaatatacccatataactaaccctcaacaaagagaataaatgatcatattgggagagtagtctggtgaaaaatatgggcctccttttgataacagtttgtggtgaaaaagaaactaattttaacagaaaaaaatgtaattcattatttattatggctctctttactggaaatcgtagcttaaaagtgaaatatgaattttttttctgcataggcaaaatttcccaattaggtttttgaaatttgtgtttagaatgaatgattcctagagtgtggaaggtatcttttttggaagtatcatttagtaagttataattggttgtatactagtcacctaaaagacttactaaatttcctaaaatattagatacctacgtgtttggctttaaaatggagaatttgtcttaaatttatccgtaaacagtttcatttatatttttatttatttatttattgagatagcatctctctctgacacccaggctggagtgcagtgctgtgatctcagctcactgcaaccaccgcctcccgggttcaagcaattctagtgcctcagcttcccaagtagctggaaattataggtgtgcaccgccacacccagctaatttttgtatttttagtagagacaggattttgccatgttggccaggctggtcttgaactcctggcctcaggtgatccacccgcctcagcctcccaaagtactgggattacaggcgtgagccaacatgcccggcaatatttttagatataactgaaaggttataacttgaaattaagatatcttagaagtcctcatcacttctttaaatgttacaaataaaagttactgtttatttgatcattaaatttaatgaaaatcatcagggaaaaattactaaccatcaagttttgtaaatcgatttgagtaaagtgtaaatcaagtaatttgcagagaccaagtacctagcccagagggacaagttaagatactgtttatgcaagaatagtggttgctaaccagaaaggaggagatgaaggggaaataaataaattttttctgctgatggcttacggagagttggttgggctactaggttacttgctttgttctattaattttaatagttaaaaggtgggtttcaggaggcctgttaatttctgaaagcactgtacttgttatgtatcattgcaaataagctttttttctagcaagaaagaacctgtagtattcatcaggttctccaaagactgtgaaatgttaagaaccattcttctacaacttttttcaaaatatatctatatttggctgccactaggtggcattgctaatacagccaatatactgttgtatttgcagtttctagtctggataaatatatgtgtgtagagcaacttcacccaaaaaccaagccatcaaatggctctactaagccaggagacatattctgttatttacttgtattcatgcctacctaaaaccagtctacgcatgtaagtaaaaagagcatttcttaatagtttctcgcattcgttcattaattagttcagcagttaatagtctacctttctggccagcttatgcctgtaatcccagcacattgggagagggaggcagggggatcacttgaggccaggagtttaagaccagcctgggcaacaaagcaagaccccgggtttttttctttctttctttctttcttttttttttttttgagatggaatctcactctgttgcccaggctggagtacagtggcacaatctcggctcgccacaacttctgcctcccaggctcaagtgattctcctgcctcagcttagcaggtagctgggattacagtcgcgtgccactaccgcccagctaatttttgtatttttagtagagatggggtttcaccatgttggccaggcaggtcttgaactcctaacctcaagtgatccacccgctttggcctcccaaagtgctaggattacagacatgagccacagtgcctggccaagaccccatttctttaaaaaaaaaattattttaattagctgggtgtgggggtgaacacctatcgtcctagctactcaggaagttgaggtaggaagactacttgagcccaggagtttaaggctgcagtgagctatgattgtcccactgcactccagcctgtgttacagagcgaaaccctgtctcttaaaaaaaaaagcctttccagccaggcgcggtggctcacgcctgtaatcccagcactttgggaggccaagacgggcggatcacgaggtcagaagatcgagaccatcctggctaacacagtgaaaccccgtctctactaaaaatacaaaaaattagccaggtgtggtggcgggcgcctgtagtcccagctactcggcaggctgaggcaggagaatggcgtgaacccaggaggcggagcttacagtgagccaagatcatgccgctgcactccagcctgggcaatagagcgagactccgtctcaaaaaaaaaaaaaacaaaaaacctttcctttcgttttgatacacatatttacatggaggacataactcctatggtatgcccagtgtcaggtgtaataccaaacatactaactttaagtccaatcttttctttaatattcaggaatatgcaagtgattgaaaccgattttgttaaaagaataaaatctttcattaaatccttcattcctatgataggaaatagggcctcttcagagtaaaacagctaggtttgaatgtctagtacaatattactagctgtgtgatatttggcaaatttcttaacttttaaacctcagtcattcaactgtaaatgggagtgataataatagtacccatctcataagactgttttgaggattaatgaaattacttgtacagttttcagctcagtacctagtaaatgcaaggtattcaataaatgattgctgctattataattagcaatatcactacgcttactctgatttatttttgaaatgtaataattttcaatttatatgctttagctggtcttaacaaattaggaacatttcccacaattgatttcagtacagtgttatagaataattgaaaaccactgatcatttcatttccaacaatgatgactaggcaatttggaccaactctcccataaaagtttcttaaaagagtggataaatttattattattattattatattttttttttttgagacagagtctcactctgtcttgagtggctgtcacaggctgcctcatgcctgtgatcccagcactggagtgcagtgctggatcccaggctggagtgcagtggtgcgatctcggctcactgcaacctctgcttcctgggttccagtgtttctcctgcctcagcctccccagtagctggaattacaggtgcccgctactacgcctggctatttttttttttttttgtatttttattagagacggggtttcactgtgttagtcatgctggccttgaactcctgacctcgcgatccgcctacctcagcctcccaaagtgctgggattacgggcgtgagccaccatgcccagccaataaatttttaaatatatgtttaaaggtgagtatatgtatatatgagtatttgtatatatgtttaaagagagtaaaagaattataagaccaagatctaagttatacagaaaaaccaaagaagagagactggccaaggataggccctgataaacctgcaggctttgaatttgaactctaaagggccacactttaaaagatgtgatgaactagatataaatcaactttcaccggtactgaagctcaagtttaaataatcttttttttttttttgagacagagtcttgctctgtcacccaaactggagtgcagtggtgtgatctcagctcactgcaatctccacctcgtgggttcaagtgattctcatgtctcagcctcccaagtaggtgggattacaggcatgcaccaccacacctggctagtttttgtagttttagtagagacggggtttcaccatgttggccaggctggtctcgaattctgacctcaagtgatcagcccccctcagcctcccaaagtgctgcgattacaggcatgagctaccatgccctgcctcaagttaaaataatcttattatcttcttagaactgtgagtggcccagcccgtctacccactagaagcaaactagtctggaggaaagtaaaatcatcctaggttttacatgatctctacttaacttactgttgtattccaactgtctagaacagagcctagtactcaataggtgctcaacaaatatatgttgaatatattaatgtaaaatagaatctttgcaaagcctatgagagataaaataattcgacttcttttattggcaaaacagtctgttcctaacatctgagtcttatttgtgacagttgatgaaaaatgacctaatctatatatagctttttcttaatttgcataacagttttatattaaatattagtaaatcgttttatttctccagcaaataagtgcatgtacttcttgctgtgtaaacattttattatgctctttgcattcaatttacttaaatttagacaaaaaataggcacaatgaataattttttttttttttttgagatagagttttgctcttgttgcccaggctggagtgcagtggtgcgaactcggctcactgcaacctctgcctcctgggttcaggtgattctcctgcctcacactcccaagtagctgagattataggtgtccaccaccacacccggctaatttttgtatttttagtagaaatggggtttcaccatgttggccaggctggcctcgacctcctgacctcaggtgatccacccacctcggcctcccaaagtgctgggattacaggcatgagccaccacgcccagcccacaatgagtgatttttaaaataattttattcaacatatgctaatatgcttgtctctggtttatctttatagtgaggtatattgtactttgaaataaagaatattaaataaattagaaattaatagcatttgtaaactgcatttcctctgtttttagttcttatgcaggcatatttttgttcattcatttgatatctaccttgaacaaattttgcctagcaagtagtgcaagttacaaatttcattcatttaccttatttgagtttgtatgtagattaggtgcaaagaagcttctggggctggcagatttttccaagatagcacctttttttttttttttttttttttggagacagagtctagctctgtcacccaggctggagtacagtggtgcaatcttagctcactgcaaaccccgcctcctgggttcacgccattcccctgcctcagcctcccgagtagctgggactacaggcgcccaccaccatgcctggctaattttttgtattttcagtagagacagggtttcaccgtgttagccaggatggtcttgatctcctgacctcgtgatcggccaggtagcaccttttaagcactcttttattgcatattaattccccaaaatccattgacagatttattttagtcttagcaagcattcaggttaccttttagaagatccagtacatgagcgatcaggaatgcttatttattctctcatgtagcggaaattatatccagagtaagaatagtaagtcaatgtttgcataaagagaacatagctgctgttgacctctttggttcatctctatgcagccagtttttgtgagtcaaaatttctatcttaataatggtctagcccgggaaaggtggctcatgcctgtgatcccagcactttgggaggctgcggtgggtggatcacctgaggtcaggagttnnnnnnnnnnnnnnnnnnnnnnnnnnnnnnnnnnnnnnnnnnnnnnnnnnnnnnnnnnnnnnnnnnnnnnnnnnnnnnnnnnnnnnnnnnnnnnnnnnnnnnnnnnnnnnnnnnnnnnnnnnnnnnnnnnnnnnnnnnnnnnnnnnnnnnnnnnnnaaaaaaaagtctaacctagggctacagagcataccttctctttttcattttcttttatcttcgtttcttttttgagacagggtttctctctgttgccaggctggagtacagtggcatgaatatggcccgctgtagcctcagcctcctgggctcaagagatcttcccacctcagcctcccaggtagctgggactacaggtgtgcaccactacaccagctgggttttttttaggggtagaaacggggtctctccatgttgcccaggctggtctcaaactcctcggttcaagagatcctctcgcctcagcctcctaaagtgccgggattacaggcatgagccactgtatccggcctcactttttctgtaaaggatcagatccgtagctatttacacatcgtgggctatccagtctctgtgcaactactcagatctgtcactgtaacgagaaagcaattatagacagtacataaatgagtgaatgcggccgttttctggtaaaactttattcataaaaacaggtagcaggctggatttggtctgcagtttgtagtttgttaacccctgctccaactcattgaatgacagtagtacaccggaagagacatagtgagcctgggagccttaatgagagagctagctgtcttctaaggatttttgtatgacatctgtgtatttggttcacccatttgccaaataagtactatcatttctctcttcttgatcaagaaataacaggtttcacatgatgctttagaaaagaatatagttgtgcatatatgagttgtataaaaaaaattaagagtaaaaagaaaaagcttttttgaagggaaaagcagaagaatttcttctaaatgagctgtctgatgacaggaagatttggttccagtttcatgtaaccactggtatgttcaattcctcttaaataccagattttacaagattgcaaccattttgaggaataaataacttatggattaagtttagatgtcatgtgtaggatgaacaggtctaaagatctaaggtaccactgttgtaaaattacaatggattagggatttttgttaagtagatttttagctgttcttatttttaaaaagtaactatgtaagatgataaacatgttaatttgctttactatagtataaccattttgttatctgtatgtatactataacaacatattgtaagcctcaattatgcacaataaaatttatttctaaaaagcttaggccaggtgcagtggctcgcacctgtattcccagcactttgggaggccaaggcaggaggatcacttgaggccgggagttcaagaccataccagcctgggcaacctagtgggaccccgtctctacgaaaaaaattttttaattagccaggtgtagtggcatgctcctgtagtcccagctactcaggtggaggttgaggccaaggttggaaaatcacttgagcccagggaggttatgatcgcgccactgcactctagcctgggcgacagaatgagaccctgtctcaagaaaaaaaaaaaagtttagatgttgtacacaattaggagaagtgatggggttatttcattagccaccttgtaattatttcccactaatagaaatatgattcataattctgtaattaaccaggttaacaaaaacaggaactttggtacttgattatgagaaatgtattctggacatgctccttatatgcatgtacattatgattcatcaagttacaagacaaaaagatgattaaagaaccatttgtaaactgtatgtaacattaaggatttataaagcctgttcttaatagcaaaggagtccatgggctacaatttactctcctatataatgtgatgtatgtacaatttttgacactaggtggagcagtttcctggcaaaagacttcacaaagccccatatccctttcagttaagcccagcttctagacaaagaactgtaaagagaagaaaaacgatcgacaatcattttataatttaaaaacatacccaaatatttagctataagtagaaggctgaatatattttacaatttttctgtttgccatatattttaaccattggattttctcatgtttaaagtgttagttttactttctagaagcagtttggaagtagaaaagttgggaactattcagttacattgtagaatagatcaggttttattagaagctgtaacatcaaggtgttatcctttgaatgatatctgtgagccattttgtttcatatgaccatttttatagaaaaaaagtactttttgttataaattagatacaaagaaaattgtgagatacgtgcccctgtgtaagattcagagcctgtttctgctttaaagtttgggattatttcattattaaaatatgtgttaaaaattgtacatttaccctgaagtacaggtcaattgatgactaaaaagaaaacaaaaaaaattatacatttaaaaaatctgacatcttaattgctttttcatatttatgacctcctctgtatatggcaccctaaggaggaagtactgtatagtattctgcactttttaaaagctgttttttccttagtatagacatttctgatactttttgactcttggctattgctaaaagtaaatattatttggaaaactgcattcatatgggttgaaataaaatagtgaaatagtttcagtaagtgaaatattgtagtagttaataccataaagtggaatcattctttttttaaaaaattgttagccagcttcttccctatcaattcagcttgacttctgactattgctttattgctcatttgtctatcctccttttaagacaaaaaagaaattaccaaaagttaaggctgtggtgtgacttgataccagatgcttataactatggctataagcatgcagtgactcagtgctgtttcaggaagaccaacagacccttcttagaaaaaaatctatttgccttttgtttgatgaaggcatgaaagctcttctccctgtctttccctaaggaatgactcatatattaactctgctgagcatcaccacatcaaaagaagaaaccaaggtcttcaggacatcaggctgggtttttgccaaggaaaaggggtatgcacagactgggtaacttcctgcccttaagtttattaatgtatgcttaaatgaaagccaagaaaatttagtttagcttaaatttgttgttgagcatacattttaaacaatttatactagccccccccccgcccttttttaacagctctcataaatatgtagttcatttctctggaatacttaagtcaactgtatgatcaaaagttgcttgggtctagagaacaaaggtgaaacatgccttctttttctttttctttttcttttttttttagacggagactcactctgtctcccaggctggagtgcaatggcgcgatcttggctcacggcaaactccatctcccacgttcaagcgattctcctgcctcaccctcccgaatagttgggactacaagcatgcgccaccacacccggctaattttttgtatttttagtagagacaggagtttcacaatgttggccaggctggtctcgaactcctgacctcaagtgatctgcccgcctcagcctcccaaactgctgggattacaggcgtgagccaccacacctggccaaacatgccttttaatatggattaattcaatataataaaaatagcttcaaagacagtaccttataacttggagcatgaactaatactatagagttcatatttcttttgttttggccagcaattttatatttgcacttttatagtataatctcatatttctaccctgtgacctaggtaacaagcattattaggctttttgttaaacaaaggaagagatagaagttaccaacagtaatttaccaacagatttagaaaactgaaatccacattaatgcatgccccggttactgctttttgacagtttgtttctttgttttttgttttggtttttggttttttttttttttgagacagggtcttgctctgtcgctcaggctggagtgcagtggcatgatcatagctcactgcaaccttgaactcctgggctcgagtggtcctcccatctcagcctcccaagtagctgggactacaggcatatgccaccacactgggctaatattttttcttagtagagacggaatctcactgtgttgtccgagctagtctcgaactcctgggctcaagtgatcctgctgcctcggcctctcaaagtgttaggatttcaagcatgagacactgttcccagcctgtactgcattttgtagagaccagaggcataacttgggaccttcttcacaaaaagaatataaacactggttaaacttgtcagtgcccattgggaatcgatattttacactctagccttctagaattatttgctgtagaccataaccttgttttctgactctaatgagaaaaacaatgattaaaaaaattctgaagagaattcctgtgtttgcaaaagggtttctgaagtcccctgaaagaaaacaaaggttttgcaagtcatacaaacaaccatttttcatctttttttgtttatttatcacccagatattcctaatgaatcacattccagactaaccactgactgcttttgttccttagtgaagaagtatggcaaataaatgttttcccagtgaatcagcacaggattcttgattttattacctttgccctaaactttccagacaaaactaattggaaattttgcctttgggatctcacttgacttctgtgtatagatgatggattaggctatgaattgacattacagatgttgtccaaacaactccagtctttaggaatgttttatcagttctgagggagccgtctagagtggaagaatgtctgtctgtctgttttgtctgcttgccttccttaaaaatactcatacacacacaacacacattctgcactcttaatgtgatgttgtagtcttcatctcggttgataagtatacttgcctgaattaggctaataattaatatgaacattttaggtctttcgtttttaaaagatatctctgtaagacaggaccctaaagtaaacccaacagtattctgtctctggtcttttggatggtatactgtttttcttgatgaaacatagacatgagtataaccttttcagtcctttaaatgctacaaagtgtgtgaagaaggtacaattatagtaaatcatgagccgctgtagtataaatccagaaaacttgaaaagttcaaaatccagaaaatgttttacttaatattaagcagcagtgtacatactgatttatcattttactaatatgattttttcacaaattcaagtatgaatatattcacccctttcttactatgaccctaattagtgtttgtggcacaaggatttctttctctgggcttaacatagatactatattattatcagaaaactacttaaaactcttcactaccagattaggatggagatagatagatagatagatagatagatagatagatagatagatagatagatgtggttttgtataattttacccttctaggacaattttttttgaattctaagtttctcttaattagaagaactagtagtgtattgttattcttaaagctagagtaaaaattgattacatagaattagtttggtttttttctaatcactaaaacttttctaatcactaaaactcatgaaagaatgtaaatcatggaaatgtaactttttaaacttatgtaaaaagagtttttaaaagataaaatatctttttccacagacaagtacctacatctgctcttactagaaatcttaccctttcatctaagtatagtttgctctcacccagacatactcctgcctggccaagcactacatcttttatcctggacaaggcaaaattattccattaccaatctttggaaaatataatgtaatacagctcatgagactagatatatggaactctgaaatgaagcaaatccagatgtccaatatgttgcaaataaccaagctatcttgttgatttaacttcgtctagaataactatactgagttaccaaaaataaaacagacctttatttgccactttttttttttttttttttttttttaagacagggtctcattctgtcacagtggcgtgatctcagctcacagcaaccttgaactcccaggctcaagcaatccttccacttcactgggactacaggtgcacaccaccatacccagctaattttttgttttgttttgagagagagggtctctccatgttacccaggctggtctcaaaactcctgggctccagtgagtgtcccgcctcagcctcccaaagtgctgagaatacagacatgagccaccctgccttgcctatttgccactttaagatgtactccctgtattgatctttaccttgccacatgtcacatccttttaaatgtgttcacactcattttatagcacagcagatggtctgtcttggcaaatattccatgtgtacttgaaaataatatatatttggctcttgctgggtggtattttctatgttattcaaatcttctgtgtccatacaattatcagtgtagttgttctatcaattaatgaaatatagatgttgacgttttcaactatgtatgtgccaggcatggtggctcacctctaatcccagtactttgggaggccaaggcaggaggatcccttgaactgagtttgagaccagcctggacaacataggcagaccctgtctctacaaaaaatagaaaaattagatggggccaggtgtggtggctcacaccagtaatcccagcactttgggaggccttgttgggagaatctcttgagcccaggagtttgagactagcctgggcaacatagggggacccatctctaaaaataacaaaaaaaaaattatctgggccaggtgcgccggctcacacctgtaatgccagcactttgggaggtgttggtaggaggatcccctgagcctaggagtttaagcaacacagggagacctgtctacaaataatgaaaaaaaattagctgggctgggcactctggcttacacctgtaatcccagcactttgagagactgaggtgggtagatcacttgagcccaagagttagagaccagcctgggcaacaggcaaaaccccacctctacaaaaaattagccaggcgtggtggtgtacacctgtagtcccagctacccaggaggctgaggtgggaagatcaccagaactctagaggttgaggctgcagtgagccaagatcttgccactgcactccagtttgggtgatggaatgagagaccctgtctcaacaacaacaacaacaaaattagttggttgtggtatcttgcgccagcagtcccagttgggtggatcacctgaggtcaggagttcaaaaccagcctgaccaacatggtgaaaccacatctctaccaaaaatacaaaaattagctgggtgtggtggcgggtgcctgtaaccccagctacttgggaggctgaggcaggagaattgcttgaaccccagaggcgaaggttgcagtgagccaggatcgtgccattgcactccagcctgggcaacagagtgagactctgtctcaaaaaaaataaaataaagaaatttctagctataattggggatttgttcatttctgtgttctgtcagtttttgctttatgtattttcacactctgttattggttgtatacacatttagaattggtctgacttcctgagaattagaccttttatcatttgttcctatgaatctctgttaatattctttgtcattaaatctactttgtctaatatcaatttagctactttatcttttttatggattttttaaatggtttttcttttcccatttctttactctttcttttctgggttcttaatatttaaagtgggtttcttatagacagcgtgtactaatccagtgtgacagtgtctgcctgaatttatacatttggtccatttgcaattaatgtagttatcaatatgattgggtttaagtctaccctcaaactgtttgtcatatctaatttttcattcctttttcttttttctctgccttcttttggactgaggatttttttgttttgttttgttttgttttgttttttggtgtttttgtttttttttttttttggtattgaatttatttgcttgtttgttctacttcttttaaaatttttagtggtatagctaggtgtagtgatgcatgcctgtggtcccagctactcgggaggctgaggtagaatctcatgagcctgggcagtcaagactccactgagctgtgatcacactactgccctccagcctgggcaacagggtaggaccctttctcaaaaaaaaaaaagaaaaaaaaaattagtggttgtcctaaggtttgcaatatgctccattaacttacagggtgaacaatgaagtattgttttctcattttgtataaaatataacaaccttataatagtgttcttcatttcctcctcccataatttataatttatgctttagttgtcatacattttacttcttgtatattttacttcctcatatgtcgtaaatccacagtactgttttgaaatatatttttttgaaatatattttccctagctcccagattcacaggtatttttttctttgacattttaaagaagtaattctgatgtcctgtggtttgcattatttctgatgaaaagtctgacctatttttccctgtagatgttttatttttatctactctattgtttttaagacttttcctcttgtcattgaattatagcaatttcattatgacatgattgtgatgatttttagcagtttgattatgttttattttctattttcttttttctttttttgagatggcatcttgctctgacgtcaggctggagtgcagtggcgcaatctcggctcactgcaatctccgcctcccggattcaagccattcccctgcctcagcctcccgagtagctgggattacaggtgcgcaccaccatacccagctaatttttgtatttttagtagggatggggtttcaccatgttagccaggatggtctcaatctcctgacctcatgatccacccaccttggcctcccaaagcgctgggattacaggcgtgagccaccatgcccggcctatatgttttcttttcttttcttttttgtgctggcatgcagtgttgagatctcagctcaccgcaccctctgcctcctgggttcaagcgattctcctgccccagcctccccagtagctgggattataggcacttgccaccatgcccggctaattttttgtatttttagtagagacaggtttcaccatgttggccaggctagtctcgaactcctgacctcatgatccacccaccttggcctcccaaagtgctgggattacaggcgtgagccaccgcacccagcccatgtgttttattttctttgtgtcgatcctgactggatttgttcagtttcttaagtctgtggattgatacttttcatcaaatctgggtctgtttctattgagcaatatttcttttggttatgagttataatttgctgcttcgcatatctagtaatattatattgagtgctagtaatttttaattgaatgctagatatgtagtattaaattgttgattgtatggattttgtcttccactatagaacattgatgtggggggagggtgaaggggacaattaagttacctgtggatcagcttgatctttttaagacttgttttaaaccctgttagggtcagactagagtagctttcaccttaggaccagaaggaaaggtcgtacctacccaggcatgacctttctgggttgaatgctgagtctctctactctagctggttgatcacaaatgtttcccaggcctgtgtgaactctgggaattggtcagtttacaaatccccagtaattattcttttcccagtagttcttgtagttctttgcctggacttgtggtctcaccttagcatgcaatgcagctttgtgtgccagagtctgaaggggacccctgtgcagatttctagagttccttctctctgtgtagctttctcttttctggtatactgcctcataaattctgactgcctcagccttcttgaatcctgaactcgtgaaccccaatctcattctcaactcggcaggagcaacatgctttgtttgggctcttgctcttttgaccatggaatttttggcaggcatggaatgtgtctacagacaagaagccagagtcaatgtatggtttcttcatttttatcccttctcttagtaatcaaagccctgtactgcctgtagtacaatgtctaaaaagaattgtcccatatattttgtccagttttctaattgtttgctatagaaatgaaagtctagtatccgttacttcatccgccgtgagacagaaaaccttcagccatagaccaggatccctaacccatgctcccacaagagttggaacctgctgctcagtaaatatataaattttatatcctgtggcaggttttatccagttaggcttttcaattaatactatagctgtttgggtctttaccctcttgtttctttgtttagtatggttaaaaatgtgactcatatttgctacattgtagtgagacttgtagtttttagaaaatatactttaaaagtagtttgaattatgtgtaacttttaaaacttttaatcaaaaatttttttatttgaatttttcatataaacatattttttcattcaaatcggttatatttaaaaaccattaagctaaaatgttgaatagaacttgtgaggtttcctatcacttaatatagtttaaactatgaacaaaggacaagaaactgagttgttaatgttcattttgtctgggaaccaccacatctgcctcaaaggctgagtaatcatgacttactagtgtggttatggaaaatatatgtcagtttagttgagtgaatgaacagacttctttagaagaaagaattctcaaatcagagacttgaaaaaacattctcaaatcagattgttgaaaatttcccttttcagaataactaaaaatgaaaactataaagaacttttattttattggataatgtgtttaatctgttaggatacattttttatatttctggaatgcaaatatagctttttctttcctatctatcccagaaatctcattattttagctcccagagcaatttatttttgttcacttgaaattcatttctaactttagctgtagactacctgtagccaaagaggacagtaacatggggacagcatggacaaactcttaaattttcttctttttcacttattggcattcatatgtctcttttgtgttttctaatagtaaaggtggaagttacagctgatttcttcttttttttttaattatgtctgatagctataattgtatgaggagaaatgtttcacaaactatgcagttattctgaatatcacaaactttggggtttttttgtagtatcacaaaataattcttttttcccccaagtgtgaaatctcttgtgtgcacctggcatttaaagaaatgattgtagatttcatggttaatcataagttttcaaaaacctaagtagtcaaagtattttcaaaatcttatataattattttaatactttaatatttctgcatttccaagaattaaaagtccccaaaaagaggaacaaaggctaaaacttcacatcgatttttttgatccagaaaaaactaataattaactgattcagttccaaggatttcattttttaggtattattttaacagaaaatgccgattctatttagagataaatatcacatatgtgtgaacaactttgtatattaacatcaaacaaaattttattatcttgatagtagaatgtcttagttttatttttatcactagattttatgtactttgaaccacagattctttcatcaagtgatcttaaaatactttcttatacacagagcccacttacttttctgtgggactgtctcatttatgaaaaatcattggagaaatctttaatagaaaccttcagattcagaaatacttgcacaatataattagtaataaaatctcgtgtatatatatgtaaataattttattctacaaataaagtatttatcttcataatagctgatggctgctagttactgtatgctagaggacatctatcaacctatgcttaagggacccaggaatttatattttaaccaactccctagtatgcagacacctcatcttgtgcttttaggaaccattgtgtaaaactcattgatactggtttcacagttacatttttgctttatgatctcactgggaaaggttacatgaggtggtagatcaccagctgtttttaagtaaggacgtaaagtgatattctcaaattgtgcctaaaagaacagtggctcaggaagttttttttaataaaaggaattatctaacaaatgagaaatatagataaataaaataaaagtcaagcaaggaattagatcagtggttgccggggactaggacttgagggagggaattggccacagaggaacacaagggatttttttttataagggatggggccttgttccgttgtccagactggagtgcagtggcacaatcatagcccactacagcctccaacacctgggctcaagcaatgcctcctacctcctgagtagctgggactacaggcacatgccacaatgcatggctaattttttaaatttttgtagagatgaggtcttgctttgtagcccaggctggtcttgaactcctggcttcaagcagtcatcctggctcagccgcccaaagtggtgggaatacaggcatgagctgctgtgcctggccaagggatcatttttgcagtaatggaaatgttctgtatcttgattggtgtggttatatggctgaatatgttcgtcaaagctaattgaaatgtagacctcaaataagtgactcattatgtgtaaattttacctcaataaatctgatttttttttaagtcaaccaggaagagattctgggaaggattattttcttcatattactaactgcatcttgaaattatttagaattatttttgttctttgaaagctaagatttttcttacacagtaattaatatatttttaaaataatgtgtattgataattttttaatagttcttatcagaagtttcttgtatttgttttatagggtccacatatagcctcagttacattagctgcttatgaatgcaattcagttaattttcccgaaccaccctatcctgatcagattatttgtccagatgaagagggcactgaaggaaccatttctttgtggagtatcatctcaaaagttaggattgaagcctgcatgtgggtaagatatgcattttcatatttgtttaaaactaacctcaccatcttgatagtgtgtgtaccttattgaaatggaatctaaacatattccttgtcagtaaatgattcagtcagtaaccagctacctacttccaaggcaaaagaaaccttttagagcatctcctattcatgaatggcattgagaagaaaggcatgaaccatatgtatcacaaagcaactgaggccaagtagactccagcagggcaagggagtacagatgatggaactacagttgagccttgaaccatgtgtgggttaggggtgccaaccccctgtgcagtaggaaatccacatataacttttgactccccaaaaacttaactgctaatagcctactgttgaacggaagccttaatgataaatagtagattaacacatattttgtatgtgttaatacagtattgtataccatattacaaagaaaattataagggaaaggaaatatatttattattaattaagtggaaacggatcatcatttccactccattttcatgttgaagaggctgaggctgaggaggaggcggagggaaagaaggggttggtcttgctgtcttaggggtggcacaggcaaaggaggtggaggaggtagatggggagccatgagaggcacacccattatcacttgtactggcacagttcaaatccatgttgttcaagggtcaactgtatactacattataaaatttgttctagtatttctatacctgataaacttttagaatttatctaagagttatataaaatatatataaatattagattggtaatatatagttatatataaatattagattggtaaatgtcatatgtcttactttttttaatttaaaattttacttttatttatttggcaaataaaaattgtgtgtgtgtatatgtatgtatgcatttatttatttatatatttatttactgagacagggccttgctctgttgcccaggctggagtgcaatggcgccatctcggctcattgcagcttcaacctcctgggctcaagtgatcctcccgtatgtcttacttttagattaaaatactgtgctctggctgggcctggtggccatccctgtaatctcagcactttgggcggccaaggcaggcagatcacttgaggccaggagttcgagatcagcctggtcaacatggtgaaaccctgcctctactaaaaatacacagattagccgggcgtggtggcgcatacctgtcatctcagctactggggatgctgaggcatgagaattgcttgaacccaggaagtaggggttgcagtgaaccgagacccgccaccgctctccagcctgggctacagagcgagactacatctcaacaacaacaagaaaatattatgttcttagagaactcatttcattttctgagttattataatgctaactaaagtaaggtcagacatttcttaatataaaccaagccttattatagtgaacgtatcaggctgtatgatcgtatatggcaattttactttcagttgttccagttattctttttgtggtttgcttaagtttattttacaaaattctttggacagcatgttaagtggcagatggattctaatccacacaattttttttgtgtgcctaaatttttttttttgctttttttttgagacagtcttgctctgtcgcccgggctaaagtgtggtagcgcgatctcggctcactgcaacctctgtctcccaggttcaagcaattctcctgcctcagcctccccagtagctgggattacaggcacccgccaccacgctcggctgatttttttgtatttttagtagagacgggatttctccatgttgggcaggctggtctcgaactcctgacttcaggtgatccaccaggcgtgagccacctcacccagccctgtatgcctaaatttattcaggcatccgtaggaataattcatgggttaaagatttcttttaccatttgaggtttttttttttttaactcattgggatttgttatgttcctgtaattttttcccactaacaatttcttaggaaattaaagattatggaacagatcacttacaaatcttaactcattaaaatgagcatgaataccataccctcaggagaagcagagttttgaaacacagttaagtgttagcaattgtgttctgctttaaaagaattataaaggaaataccatcatgttgaatttgttgaatatgaaagacaggaaaaattgtcatgtttcctgttgctcttttataaacactggaaacaaatttattatactagttgcatatgctttataaatttgatgacattagtcttttgatgaaaaaaatgttagaataacagaagatacttggaacatgctagaaaagggactttgtatgtaaatttgtctttttttcttaatattatacttttgttcttcaaaaattatttacattgctggattaaccttaaggccaacaaatgaaaaccactatctcggctggctgtgataactgcctcctccaaatttctgtagtatatattgtctgtagtgcttattaggcctggctttacacatgctttaaattagttaatttggctggtatggtggctttcttccccaaataatatttaggatcctaaaaaatattaaatataccttaaaagtattagcatcatagtaatcagcattaagttttgcacatagggctgggcatggtggctcactcctataatcctagcactatgggaggccgaggtaggtggatttgagaccagcctggccaacatggtgaaaccccatctctactaaaaatacaaaaaattagctgggcatggtggctcacacctgtattctcagtgacttgggaggctgaggtaggagaatcacttcaacccgggaggcagaggttgcagtgagccaagattgcacctctgcacttcagcctgtgcaacacagcgagactccatctcaaaaaaaaaattaattaatttttttgaaaaagttttccatgtagtataggaatgtcaataaatactgattaataggtcaaatgtttgctcttctttccttctttgtaactgtctcgttatattaaaaatacagcacacactaagttatgtttaaatttgttaatattgttctcaacatttacaaggacagtcttcaacaaatggtgctggggactgggtgtagtggctcacacctgtaatcccagcactttgggaggccaaggcaggtggatcacctgaggtcaggagttcgagaccagccggaccaacatggtgaaaccccatctctactgaaaatataaaacttagctgggcatggtggtgggtgcctgtagtcactgctactcgggatgctgaggcaggagaatcgcttgaacccaggaggtggaggttgcagtgagctgagatcacaccattgcactccagcctgggcgacagagcaactctccatctcaaagaaaaaaaaacaagggggatgctgtaaaaactgaatatccacatgcaaaagaatgaagttggacccttaccttacaccatatataagaattaattcaccgggcgcggtggctcacgcctgtaatctcagcactttgggaggccaaggcaggcagagcatgaggtcagaagttcaagaccagcctggccaagatagtgaaatgctgtctgtactaaaaatacaaaaaaaaaattagctgggcatgatgacaggcccctgtagtcccagctacttgggagcctgaggcaggcggctcacttgaggtcaggtgttcaagaccagcctggccaacgtggtgaaagttcatctctaccaaaaatacaaaaattatccgggtgtagtggcgcaggtctgtaatcccagctactcaggacgctgaggtgggagaattgcttgaacccgggaggcagaggttgcagtgagccaagattgtgccactgcacttcagcctgggcaacagggtgagactctgtctccaaaaaaatataaataaataaataaaatgaaaactttttttttttgaggtttctttgaaacccaagtgagaggctgacaacatgtgtgtttacccaaaacctatcaannnnnnnnnnnnnnnnnnnnaaaaaactctcccagcccttgtggcccttcaaaaaaatcagtgcccctgtacccgtgagtgcttcagatgctgctctcagcacactgtgcagcctcgtgtctcattttgtctctcctgctggtcccttgtgcattgagggcaaagaccatgactcactcggctctccagcctcagtctctggcacacaatgcttcatgcatctttgtggaactggatcaaaatgaatggcatcttggtcacacttcagccacagaggtacaggccaagatttattataagaaattgactcacacagtgctggggctgcttgagtagctaggattacaggcatgcgccaccatgcccagctaatttttttgtatttttagtagagacagggtttcttggtgaaaaagatagatttttttaattcctgctctccagatttttatcattaaacttacatttcttaatataaaagcaccttgctgcagatttgcttgtgagttcacttgacaaaatgttttttccctacctcacctgacaaaactttttaaaagtacaaattcagaatttttgtctttgaataaatctttgaatgaatctttgaataaaattagcactccaagaagatgctgtgttatcagttggtttgcatattttgtgcatattaaactcttctctagtttaagaaggatttaagggtaataaatttgtatgtagtagatggtttggaggagagctttctgaattattgcttgactgtacataccacttattttgcagtaaggaagccagtcattctctctccttaattaaacttaggctgacagttttcagtgttccacaatttatgttttgttttgaatataaacaaatgtaaagaattttgtatcttatacaaatatatatttgaattttatagagaatcataaaattgtaaggattatgaaatgatgagacttcagtatctaatttgagataaataaatgtctgtgtctagggtataatgtgttttgggacacctgcctggatgactaaattcccttgttatttatttgcataataagagagtactgactcatgattcccattgtttcttgctaatatgggaaaacactaggagaattaaactaaaatataacagtaaatatagtcaactacgtataagacagtatacagcccttgatttcatttcagtccattatgttacttccttcttaacttttaggaaatttgtcatgagcttcaatcacatgattgctttaagaactgttgaacatttgacttaacatttgaacttaggagaagttcatgttttgagtaagatgttacactttctgtcctacttttttctatggaagattttccaaaggtgcagagaattataaaatgaatttaatatactctcactcaagttcagctagtattaactaatagtttatattgttgtatctataccctttctcattctcttctcaattatcttgaagctgatcccagatatcataatacacatcatctgtaaatatatcagccttggggcctaaaatgcattatcacacctaaaagaaactgtagtagtctcttaaaattcattatccaattagtgttcaaatttttctgattacgtttatttctttttttttttttctgaggtgggatcttgcactgtcacccaggctggagtgcaatggcacaatctcatttcactgcaacctcctctcgtattcccacaattctcctgcctcagcctcccgagtagctgggattataggcgcacaccaccatacccggctaattttttgtatttttagtagacatggggtttcacaatgttggtcagactggtctcaaactccttacctagtgatcctcctgcctcagtctcccaaagtgctgggattttatttcttttcacatttatgctgaagaaactgttaaataatttcccatggtctgaattttactgactaaattctaattagtataatttaagcatgttgctctgttccttgtgtttcctttgagttgataaattgtgttttttttttttgtaaataggaatacactccatagccttgtgtatttctatcacgagatacaatgtctgtttgtccttcctttttgtgatattagcaccatggatgattttttattatatatgtccattattttattagaggttataaaatattagtatcccagttacattacaccttttttttttttgaattattaactggagacagggtctcactctgtcaccaggctggagtgcagtggcacaatcacagctcactgcagccttgacctcccaggcttaaacaatcctcccacctcagcctcctgaatagctgggactaaaggcacaagctaccatgccaagctaattttttgtagaggcagggttttgctgtgttgcccaggccggttttaaactgctgggattacaggcatgagccactgtactgggtctgaaataatactttgatgaaggaaaacttttccttgtcactaatttagttaccccgagatatagtttatatcagaaaaagataaatacttgatctttattataccagtttttaaaataataagttggttctctagcatcctccaaagttggccaacattacagtgttttttggtttttttggtttttttttttttttttttgagacagagtctcacctgtcacccaagctggagtgtagtagcatgatcacagctcatggcagccttgacctcctgggcccaggtgatcctcctacctcagcctcccaagtaactgggaccacaagtgcataattttttgtagagacagcctcattatgttgcccaggctgttcttgagctcatgtacataagcaatacacctgcctcagcctcccaaagttctgggatgataggtgcgagccatgacgtctgaccaacttttcttatttagcaatatatatgatttggtttttgcctatatccatgtatatatgtctctcctgccttctctgtctgttttttgactaaatgtaggcttaatcttttggcagttaagtattctttttctcttttttctttttttttggagatagagtctcgctttgtcacccataagcttgctgcaacctctacctcccaggttcaagcagttctcatgcctcagcctcccaggtagctgggactacagtcacgcaccaccatgcccagctaattttttgtattttagtagagttggggtttcgccatgttgccgaggctggtctcaaactcctgagctcaggcagttcacccacctcggcctcccaaagtgctgggattccaggcgtgagccactgtgcctggactctttttcaaaattcttgtttcaagtatggataatgtagttacacgtggaaattgttggttccacccattgtgaatacaaaatatttgaatttgatttggtcccttgggaattcttttcagagcatttggaggcagaaccataagacagagcaaactgaaatgcttaacattgctttttaagaactagcagagcttggctgggcgtggtggctcacacctgtaatcccagcactttgggaggccgaggcgggtgaatcacctaaagtcaggagttcgagaccagcctggccaacatagtgaaactctgactctactaaaaatacaaaaattagccagacgtggtggcacacacctgtagtcccagctagtagggaggctgaggcaggagaattgcttgaacttgggaggcagaggttgtggtgagccgagatcgtgccattgcactccagccttcgtgacagagtgagacttcatctcaaaaaaaaaaagaaaaagaaaacttattcatcctaatgtttagttttcaaagggctttctgactacaatttgttaaaagttttaactcaacagaagaaaagttgtatttaaattaaagcaatttctgaagttccagaggatttcctagagaatttttatctaacacatatactggtgaattcttttttttttttttttttttttttttttttttgagacagagtcttgctctgttgccaggctggagtgtagtggtgcgatctcagctccctgcaacctccgcctcccaggttcaagcaattttcctgcctcagcctccagagtatctgggactgcaagtgcgtgccaccacactcagctaatttttgtatttttagtagagatggggtttcaccctattggccaggatggtctcgatctcttgacctcgggatccgcccgcctcgccctcccaaagtgctgggattacaggcgtgagccaccatgcccagccactggtgaattcttattaccagatcatttagatatcagaagcggtgggggggggcaaatgataaaaataacagagtctaagtagagattctagagaactaaaatttacttagtgtctacaatgagccaggtgttgtctcaagatttttttttttttcatagacaggaatctcagaatgttgcccaggctggcctcaaactcctgggctcaggtgatcttcctgcctcagcatcctgagtagctatggctacaggtgcgtgcccactgtgcctggcttgtcttaagggttttatgtgatgcttgccaagcatcagataggtcagaattagagccaggattcaaacttttattattttgattatgtagcatatgctttcccccaatatattgcatctcaaaatgcttctggtgatatagaagagtatgggtttgatctattaagtgtcactgttgataacagaacctcattgtaagtattttggtttttcacctagggtatcggtacagcaatcggagagctgcctccatatttcatggccagagcagctcgcctctcaggtgctgaaccagatgatgaagagtatcaggaatttgaagagatgctggaacatgcagagtctgcacaagtaagaacagtggggatagaaaatagaacactttacttcttcctaaagaggctattaaggtaaaattgttagtagttactctgaagaagaaaactgctaaagtaaaaaaaaaaaaaagaaagaaaaatattgcttgagatagaatatttagaaaggtcaaaatataaaagataatcttgatcttagaatagaaaaatgcaataagacaactcttaatacactaaaacaccttgtcagaaaccagggtaaattaatgttgccaatgatgttaaggagctgaaacttactttctccattatttgtttagaggtattaccaagcagactgctgctctgagtccaaaataatagaacttctgaattaattgttaaacataacatcaaaggacagatgtggtggctcactcctgtaatcccagcactttgagaacccgaggcaggaggattgcataagcgcaggagtttgaggctgcaagtgagctatgatcatcccactgtactctggcctaagcaacaggccctctctctaaaaaaaaaaagaaagaaagaaagaaagaaatcttattttatggctatatctatagtggccctttcctcccttgaaagcagcttcattctgtattccacatagtgtgcagagctgctgaaatgtttgctagggaaatacatgaattatatcaaattcttaagtagttactaaaactttaaactagtaagcaatatgtagtagtatatatgacaatagtaatagtagaactttttctttctttgcttctttcttccttttctttgttttgttttgttagtttgtttttgatttagggtctcactctgtcactcaggctggagtgcagtgatagaaacatagcttactgcagcttcaaactcttatataaacatagcttactgcagcttcaaactcttaggctccagccgggggtggtagctcatgcctgtaatcccagcactttgagaggctgaggtgggcagatcacttgaacctaggagtttgagatcagcctgggcaatagtgagaccttgtctctacaaaaaaaattttttttttttttttttgagatggagtctcgctctgtcgccaaggctggcgtgcagtggcctgatctcggctcactacaagctccaccttctgggttcacgccattgtcctgcctcagcctcccgagtagctgggactacaggcgcctgccaccacgcctggctaacattttgtattttgtttagtagagacggggtttcaccatgttagccaggatggtcttgatctcctgacctcgcaatccacccgccttggcctcccaaagtgctgggattacaggcgtgagccaccacgcccggcctacaaaaaattttttaaaaagcttagctgggcctagtggcgtatgcttgtagtcctagctacttgggaggctgagttgggaggatcacttgagcctgggaggcaaagattgcagtgagccctgattgtgccactgcactccagcctgggtgacagaatgggagtatctcaaaaaacacaaagttattccccagcctcaatctctcaagtagctgggactacaggtatataccactatggccagctaatttttatttgttgtagagacagggtcccactatgttgcccaggctggcctcaaactcctgggctcaagtgatcctcccaccctggcctcccaaaatgctgggattataggcgtgagccaccacacctggcctgaactttctttttgaataatatttaacagttcaaactattcagcagttcagacttgcctttgcctcagtcagattaatgaatgccctggagtattctagacagtgtcctcaagatgagcaaggtaaactttcaaaacagaaaaatattaaatgctaggcctaggcaagcagtaacataattggttgaggctttttgacctaatcacaatctgtgtatcagcctctatctcagttatctcaacagagtgttttgttttcaggaaaattcctaaaaaccttgttgaaagattgaatctccatcttcaagtcagataggctttttaaaaatgcattattaccgagaactttgggaggctgaaacaggaggattgcttgaggccagaaattcaagaccggcctgggcaacatggcaagatctcatctctacaaaaaatgaaaaattagctgtatagggtggtgcattcctgtagtccctgctacttgggaggctaaaacaggagcattgcttgagcccagaaggtggaggctgcagtgagctgcatttgcactactgtactctaccctgggcaacagagcaagaccccacctaaaaaaaaacaagaagcattatgaaataaaattcaaccaagtatggttatagtttttaattaaatacaaaactttcaaatatgaatttagaatagccaaatataaaccaaatgaaataaagagccatgaacatctgctctttgtggaaagagcaaattgccctggtatctgctttgccttatctgccaaccaaatattatgcctctcatgacatcataatgcttatattaatgctaataattattacaaatataaacttttaaaattatttttaacattttaaaaatccagtatttaatatgacccttgtgttaactctgagggagtttggaaaggtaccattcttctaactttatagaaaacagtagatttagttgttacttcccaaatttcacatacttataggtagaacaaaaactcagaatgccagcattactggtatattccgattactgaaaccagtctgtccacagaagcagatgggtgagacttgtgacaactgatagttctttgagttatggcactaactaatgtatgtcatttaacatctctaaaattctttttttatctatatgaaatcagcaagttgaagtggaataaatataaggtggcttgcagctatacatttttttgctatgacttggattccaaatgggtatgagagttgttctctcataagtcaactaatgtactatgattatttctccttttgtttttaaacctttttttcttagaattaacattttcaaatttgcatagtctttacatctctggcttgccttctctcccctccaacagccctgtaaaaacatctcatgataccactttccactcggtaacacaaataaaattatatcaattccattttttttcatgaagtcatctctctggagccctccatgctcccactccattctggacttgctgttcagttgcccttctgcacagttgcttctgtcttggtttagatttcttgtcttcctctttcttaatttacaccttcgttttgcttgaacatattctgctgtagctttctgtgaaagggtgagtaaatggaaaatgtgataccatacattctaaactagcatgttcttcattcacaattaattaactgaatataggattgtgggttgaaaatcactttttatacttagaatttggaaggcattgttcaattgtcttcaagtttctgtaattggtatccagaggaccgatgcccttctgagtcctctttataagcagtctactttttttttttttcctctctagaagcttttaggttcattatctgaggtacagtctttttaaaatgtattctgagcttggcacagtggctcacgcctgtaatcccagcactttgggaggccgaggtgggtggatcacctacggtcaggagttcaagaccagcctggccaacatggtgaaaccccatctctactaaaaatataaacaaattagctgggtgtggtcgtatgcgcctgtagtcccagctgcttgggaggctgagacaggagaatcgcgtgaaccctggaggcagaggttgcggtgagccaagatcatgccactgcactccagcctgggcgacacagcaagactccgtctcaaaacaaaacaaaacaaaacaaaacaaaacaaaacaaaacaaaaaaacaaataaagtgtactctgataggtgctcagaaaacttgttccttagtttggggaaatgttcttgtattttttatgtgagttttccctctttagtctctgttcttgcttcctggaattctagttgcttcaatgttaggcctcctatgcccatccttttaattttttaaacctttttgcttctaatatttatctcattttactatctatgagatttcccaagtttatcttctaagtcttatatcgaaatgtttttctgctgttaacatatttattttcaaaaagcaatttgtatgtatttttcaggcatcgtcttttctgtttgttcaatttggagttcgaggctttcctcaaagcctgataatccttatttgtatgtttatataagaataaggcacttaaggccgggcgcagtggctcagcctgtaatcccagcactttgggaggcagaggcaggcggatcatgaggtcaggagattgagaccatcctggctaacacagtgaaaccccatctctactaaaaatacaaaaaaaaattagctgggcatggtagcgggcgcctgtagtcccagctacttgggaggctgaggcaggagaatggtgtgaacctgggaggtggagcttgcagtgagccgagatcgcaccactgcactccagcctgggtgagagcgagactctgtctcaaaaaaaaaaaaaaaagaataaggcacttaaaagctaagtggaagctatgtgcgtacaggccaggtgtagtgatggtgaggcttccctattgtacagtcaagtggcatccaggcttaatatttactgagaacctccatgtatcagtgtctattgatcttttcttggggatagttcagtttctccatgatggatccttcaatttcttgcctaggcaatgcagacagtccctaacttacagtggtttgacttatgattgttcacctttacaatggtatgaaattgatacacattcagtacaaaccataggtcgaattttggattttgatcttttccccagccagcgatatgtggtaccatactctcacacaatgccaagtagcagcagtgagccacagctcccagtcagccaggtgatcatgagggtaaacgtccatactctgcagtgtactgtaattttgcccaactatgggctaatgtaagtcttctgagcatgtctaagggaggctaggctaagctatgatgtttggtaggttagatgtattcaatgcatttttgatttacgatatattcagtacgaaggggttaagacacgtcacccgttgtaagtcaaggaacatctgtatcagccttgctgctgacacactaaagctagactggggaagagtggttagagatctccatttagtatgtggactgttgctcaactcactttctgttctatctgtgaatacctacacaaacacaagcacaagtatgtcctgagcccagaacattcacttttgtctagagactatgtctcccactgatatgggagagagacttgcctggctgtgctgagtagggatgggacctgggagtcttttgcattctccttgttttcagacctatgccagcctcttctggcagttctgctgaagagctcttttggagttttgtggggcaaagtattttgcttctcttacatatccctcacctgtacgctctcaggtataatcttttcttctgtttgtcctgtcctcatttattaatgctaacttcatcaaagattgagttctcatttctgttttctatgttttggggttatttttagaacaaagagtattccagttgtgtattactgagtaacaaatcaccccaacatttagtggtttaaactaagaaaagtcattcgtattgctcacagagtgcagtgagtgccttgtttctgtgtgatatctctcaaggatcccatccatagcacaccctacattggctagaatatcagagtagaagacttatttcattctttgcagggttttgattttggaattttaaagaatgaatttcataagcttattgccatctaaaagctcagttcctaaaactaagatcttctagaatttgatgaagaattctttattttatccatgtaatttgagctcttgaagactttgaccatttcttttctcagtctttatctatctactgttggggtaataatctttttctttcatctcttatgtccctgattagttactttttgaggggatcttctctgataccactttttctttgagtcgtggaaaccagaatgcacacaatacttctgttggttatgaggtttggctattttcatcctgtaaagccaataattaaaatcactattttaagataaactgtacatttctcagtacctaatttcatatttgcttatttatattgaaaaatcaagtgagcaaaatgtacacacatactgtttcatgttctttgttagaaatcatatactgttgcctgctgcagtggctcacgcctgtaattccagcactttgggagaccaaggtgggcggatcacttgaggtcaggagttcgagaccagcctggccaatgtggtgaaaccgcatctctaccaaaaatacagaaaattagctgggcatggtagtagtacggtgcttaccatatcatactgtagcaatattttcatccaggttaatgcaataaaaagtgaagaactagttttttcctcctatattggatttttcgtgttgtttgtttttgtttttgttttttgttttttgttttttttgagacagagtttcactcttgttgcccaggctggaatgtagtggcgccatctcagctgactgcaacctctgcctcctgggttaaagcaactctcttgcctcagcctcacaagtagctgggattataggcgtccaccaccacgcctggctaattttttgtattttcagtagagatgggatttcaccatgttggccaggctggtctcgaactactgacctcaggtgatccacccgcctgggcctcccagagtgctgggattacaggtgtgagcccctgtgcccagcctgatttttcttttcttcattccttttcatgattttttcaccagtttccatcaattttgtggcttatgatagatttcagtggatgtggatataattttccttacatactttttcccagtttcagataaggtgtataagatttttaatttttatttgtttatagttgttttgcagttgaaggggtgagggagaacaagtggaaagagactgttgccggttttccatgttataaattatctgagagagtactaatgttttaattcttgttcaaaggagagtttcttgctatggcttggcaaagagaagatttttaatgctttcaatcatgaatttgttttaggccctttgcttattttatgttttacagatctgcatattttttaattatacaagtaattttagtaataagattcttacattccaaaagtattataaagtaaaaagtgaaagctcacacaccttctccccagtgtagggtaataatcactgtattccagactgctttctttgcatacataactttttataaaaattagaatcataccataaattttagtcacaagttcctttttcacagtatcatagacatgtgataccaatgttattataaaattattttttattacgaagtgatacatctcattgtagaaaattggtgagtgccctttagtcttttctctataaatatttatatacctaagagtgaaatcatattgtttgttgttttgtgacttgatttgaatctaaaaacgtgaacatttttccacgccatcaaatattttcacatctttgctataacgggtttttttcttactacaaagtaagtttattataatgaaatgctgaaaatacaaataaagaagaaatagaatgttcatctaacaggtgcatatatcttttttatgatatatttttcattttcttactggtttacatatttaagaagatgctctttgtcatatgctgccagtattattccttattcccagtagtttttccatgtcatttactgggtatgttttgttacatgttactttttttagacagagtctcgctctgtcgcctatgctggagtgcagtggtgtgatcttggctcactgcaacctctgcctcccgggttcaagtggttctcctaactcagcctcccaagtagctaggattacaggcacatgtcaccacgcccagctaatttttgtatttttagtagagatggggtttcaccatgttggccaggctagtctcgagctcccgacctcaagtgatctgccagccttggcctcccaaagttctggaattacaggcatgagccaccgcacctggcctgtattttcttttagtacttttatggttttattcttttaagtctttaatctatgaaaatatttttacatatgatatgatgtaggaatctaacttttttctttcttaggtaattaactaattgtatattgttccaacactattttccaagtgattttaatatgttagttttgtcttatattttgttgttctaatttgcatcttttttcctattatatttttataaatgttagaaatggtatattaaaaagatactgggttcttatttgctaagctataactttactgacatctttctagtcacatcttattggttatgatttacaaattcttatagtaatcagtttagcaaagattcaaagtttatctgactttgttgctgggatctgctcgtagataacatgtatttggtaaaacctccaatttgatagaagcaataaaatacggaaaagttgaatcaactgtagctaaaacggcaaattaagtaaaatcaatccgtaactatgagtggaaatttaaattttaagattgcatgagaatgagttagaaaatatgggtttttatttttgaaggtaaagccctgtagtagagtaagtttatcagccaaaaaagtaaaaacaaacaaacaaaaaaaaccacttggctttcattgctttgccatgtgctttccaactaggttaaatggtgtatgtgattttactaagaaattgttgtggccgggcgcgatggctcacacctgtaatcccaacacgcccaaggcaggcggatcacgaggtcaggacatcgagaccatcctggctgacatggtgaaaccccgtctccactaaaaaatacaaaaagttagccgggcgtggtggcgggcgcctctagtcccagctactccggaggctgaggcaggagaatggcatgaacctgggaggtggagctagcagtgagtcaagatcgcgccactgcaatccagcctgggcgacagagcgagactctgtctcaaaaaaacaaaaagaaattgttgttatgaaacaattttatttacttaaattccattcttgactaatggttggatgtcgtactatagatgttttaagggggaaaaaagatgattaaagcatttatttgtattctgatttattatgatacctgctgtatttttgtgagtacaatgttgagattaggcagtatttttccactaagctgacttccttttgctcttggctttctatcgtgtttccactagatgtctgtgagaggtacacatgaatgaatgtagcttcctctgaccttgagcaattttagcatcattaataaaagttaggtctagatagctgtttatgtgctttgtggactgttttatgcaaggtttaattattctctttatgatcttcttttccttctttgttcctgtgttctgttaatgctatcaccatcctaacaatcgctttgggtcaaaatctgagtcatctgactccctcctttcctcccatccccagtaattaattctttaaggcctgttgattctatctccatagtatcttacatgccctctcttctcccttcccgctactgtttcaggcctttatcaacccttacctaaatattgccagcagcttgctagtaggtctactctttactagttttttatcccaatcttttcccacacaaagtaacaaaaataattttctgaaaaatatctctacttatgaaacattgctgctcaaaaatctgtgatgcctcccactgtgtatagagtgaaatctaaactatttaacccagttttcttcattacttggccccaacctacgactacttctgatttccctttaacagttttttatcctctgtattgatggttttcaagttgaactttaaaaaactgccagaatacccatcaaaaagagtgtgtgtgtgtgtgtgtgtgtgtgtgtgtgtgtgtgtgtgtgagagagagagagagattggagggaggaagggagagggagagagatttcttttaattaaagaactctgaagtttttaagtttaaaaattactagcctgatcatttggaataatttaactttttcctccaccactatgcggtattgttctttttcgtaactttgcctagtgtgtcatttcttcccatctgcatgtctactttttcagttttcttacctttcaatttatgtgctgctggcttctttgtgaactattttatgattcccttcctacccctacctcacccccttcactcctctcaaattgtctctgaattcctatctcagcccagctatgtctttcttgtgtcacttatcacattctaccttcttttaaaactatttatagacttttcttatctctccaggagtctaaactccttaagaagggggcttaaaaatgtttgtattttcaacaatgcctgcctactgttacacatactactcatgcagtggatactttgaatagatgatgaaataacagtaagaaaaagtgtagcattacatgaaacatgtccattaatattcagtcttattttgctgtaaaatgtaattgaacaacagtaattttacaaagaaaggaagatttaactgtattgcatctttgagtttaatagtcatctgagagcaattgtcatctgaagataatataaaagacaccaagttaaatgacttgcaaatttttttactttttaaaatttttttatttttttagacttgcaaattttaattcacattgagtaaaacaacttttgtaaaattatatactttagaaacaaatgaagattcttgtgacttgtttattctataagctgtataaccaaaaagaaaaattaaagatactttaggaataaaataatttgaaaaataaaagaacttatttgcatgatgtatcctgaaaaattagggcagccagtattactgaaataatggaggagtccgggagtggttgtggtatttttgtatttaaagcttacacaatagagtagaaacgttgtggtacatatttacttacaagaatatgttttgaataagtttactttcctaaatgccatctgttttaatgacctgctacttggattctttctcacagtgttaggttgctgactatgtgaaatttcctacttcttattattgctatcagaataggaaatttaaaattaaatcagaaatgtaaaagtcttaaaacttcaccttttcaaagaatatcggggcctggcatgatgactcatgcctgtaatcccagcactttgggaggccaaggcaggtggatcatttgaggtcaggggctaaagaccagcctgaccaacatggtgaaaccttgtaaaaatacaaaattttttgtactaaaaatacaaaaattagctgggcatgatggcaggcatgtgtaatcccagctacttgggaggctgaggaacgagaatcgcttgaacccgagaggcagaggttgcagtgagctgagatcacaccactgcactccagcctaggtgacagagtgagattccatctcaaaaaaaaaaaaaaaaaagataaaaaagaatatcagtttttttcctctattttcatatcaattagcttgtctttctgttgagtatcgttcatgagtctgccgaccattttaggttgaatatttcctcaaaggctattttatagtttctgaatttaatctttttttaagggaacatttttaggttctatttaggactatagtaattaatgtaattaataatcaataattgctacctactctgtatgttgaagctaaatccccaaattaagttttaatactagtatcttttaccttactaatttctattaaatttaaggctgaaaaaaatcttattttttagcttaataggatctttgtcctattcagaagttttgagttatttacattattttactagtgaaaatataaaaccaaaaaacagtttattagttgtaatggtagttctcattcttatggccaatgccttttttttaatgcagtaaaacaaaatagacatttatctagcgaacatcccttttcaaactatagggtcaaagtgaaggattcttttgataatgatagaatatgtgtttgatcatttgagtttaaagactatgggaaaggaattgataagattatttaaatactcacgaaagtgctttggcattccactaatgctattctcttttaagcacattttcctatgaagtgtgtgcggttgcagttgcctacaccatgtcaatgcctgctggtttttcctgctgtgaagtttttcctttacatacacagattcatgaaagagtttatggtgtagatgatctgaaactaaacaggacacattttcatacactttagtaccatttgaagactctgggtgtcagttgttgctgggacctgtttttgactctgatgaacctttactggttgtggtttgtctggccatcacatgacttctctgaaaattccccctccccttcatttccagtaaactgtttgagcaggagtgagtcacagtgaaaccagcttccctgtaaccacagggcttgttaaagaatttgtcagcgtggactctagagggtttgcattaagctttgcagtaactgttatggtttgtgttgcgtcaggagttccacagaaaagcttcctgcttgcaggatctcttgcttgtttgcaaagagttaaactgatcaactttaccatagtgaacatgagagacacatgttaaacacacttctttatcattaaaggcgttgtcaaaactaccaagaattagtgtagtttctcttttcataatcaaccaaccacacccaataatgtttagtttttgaaaaggcgggcctggtagatagtctttcacagttggctcatgattttatcacaaagtaccatcaaaattaagcaattttaagtggtcttgatggattctgttacaggatattttgactattcgcacagttaggtgtcggtaccaaaggtcacttacttgcactttgttcatcaagaaaaggtagcacttagagtaattctggagttgtgatgtctaagcacacttagcatgatttatagtggaattcttcgtgcccccttttacttgctttctctagaagcatttactttattttgaactcttttgccacctcactcgcagactttaatctttctcccttttaatttcttctatttctttaactcattcccatattatcaacaaggaaagatagttgcaatgtgatgcaagctgttaaatgaatggccagtgggaaacttgtcttctcaacatacattcccaagtgcatttctttttacatgcgcatttctgtatttagccttgtcacctttagctagacttacttatctaaaaaataaatttaggctgggcacaatggctcacgactgtaatcccagcattttgggaggctgaggcgggtggatcacctgaggtcaggagtttgagaccagcttggccaacatggtgaaaccccatctctactaaaaatacaaaaattagtggggcatggtggcaggtgcctgtaatcctgctactcaggaggctgaggcaagagaattgcttgaaccagggaggcagaggatgcagtgagccgagatcgtgccactacactccagcctgggtgacagagtgaactttgtctcaaaaataattaattaattagttaattaattaatttagtgaaaacttttaaactcgacctcctaaaaatttcttttattcggcttacacttttgtaacaaaataagaaaaacattctaaaaaatgtggaagctagttattcctcacaggaaaaaatatacaataatgaagtttgaaattgtttatgttttagccatgctgtcagtcatcaaactaaatttaaaaaaattatttgttttgatgacaaagcaattatcattgaaacaagatgattttcaaatgaaaatacgaggttaatgcagtccagtcattagcagggaaaaaaagaataaatatttaaggtttttcttgttaggttgctttgcacattggagtagaaaatagttttgggcttggcgcgttggctcaggcctgtaatcccagcactttgggaggctgagggggacggatcacaaagtcaggagctctagaccagcctggccaagatggtgaaacaccgtctctactaaaaatacaaaaattactcaggcatgttggagagctccggtagtcccagctactcaggaggctgaggcaggagaatcgcttgaacccgggaggcgtacattttagtgagccgagatcccaccactgcactccagcctgggtgatggagagagactcagtctccaaaaaaaaaagaagaaaaaagaaaatagttttgtggctgggcatggtggctcacgcctgtaatcccagcactttgggaggccgaggtgagcggatcacctgaggtcggaagttccagaccagcctggccaataatggcgaaaccccgtctctactaaaactacaaaaaaattagctgggtgtgctggcgggtgcttctagtcccagctgcttgggaggctgaggtaggagaactgcttgaacccagaggcagaagttgcagtgagctgagatcacaccactgcactccagcctgggcaacagagctagactccatctaaaaaaaaaaaaaaagaaagaaagaaaataattttgtgttatgtctgcttgttcttttcacttccacacctgtttgcagatatggcggtggaaaaagcactgggtaagcattaggttacctttgttaaactaaagtctttttttttttttcaggtttgtgtttcaaacaccttttataaaatgcctttagaaaggccccttttgggccgggcgccatggctcatgcctgtaatcctagcgctctgggaggccgaggcgggtggatcacgaggtcaggagatcaagaccatcctggctaacacggtgaaatcccgtctctactaaaaatacaaaaaattagcctggcgtggtggcacgcacctgtagtcccagctactctggaggctgaggcaggagaatcccttgaacctgggaagcagagattgcagtgagagaaaaaaaaaaaagataaaagaaaaaaaggccccttttggctgggcgcagtggtttacgcctataatcccagcactttgggaggccgaggcgggcggaaccagtctggccaatatggtgaaaccccatctctactaaaaatacaaaaattagcccggcgtggtggctcgcacctgtagtcccaattactcgggagactgaggcaggagaatcgcttgaacccggaaggcggaggttgcagtgagccaaaatcgctccactgcactccagcgtgggtgacaaagcaagtctcaaaaaaaaaaaggccctgtattgaaacttggaccaacagactacttacgcttcgtttttgcttatgagtctgtaaatcagtaacatgctaaatacaaacccaccctttgttataagtgctgagtgctttgaggggtacatcagagtttaatggaagacctggacagcagaatagctattatgttcatttcctattgcaaaggtgcctttatttctaattagccaagatattttgtttgtcatgatcaatctgcagttctttctctttcttttctttctttcttccttccttcctttctttctttccctttttttttttttttttttttttgagacggagtctccctctgtcacccagactggagtgcagtggtgtgatctcagctcactgcaacctccacctcccgggttcaagcgattctcctgccccagcctcccaagtagctgggactacaagcacacgccaccatgcccggctgtttttttgtatttctagtagagacagggcttcaccatattggccaggctggtccggaacacttgacctcaggtgatccgcccacctcagcctcccaaagtgcagggattacagacatgagccaccgtgtttggctccaatctgcagttctttcttgcttattatttaaggagatttctctcaatagagtctccttcccatttttgctatctcaggtcttacaacttcaaaatatgactatcatgcttttaaactaaggccctatgaagagatctaaagaaatgggcatgataattcattcagtgctcccctcaaaagtagggatatattttagatttttttgccccattccctgacatgggtctgcatcaattaacttatccaaatttctaaaactttgtatttttactacttgtagtaaagactcagtaagtttatagcccatcatataaagcagtgcttccattttgttttaaatttacctctctgaaggtataaagtttggccaggcgtggtggctcatgcctgtaattccagcactttgggaggccgaggcaggtggatcacttgaggtcaggagtttgagactagcctggccaacatggtgaaactccatctctactaaaaatacaaaaattagccgggcagtagtggcatgtgcctgtaatcccagctaccggggaggctgaggcaggagaatcacttgaacccagggggcagaggctgcagtgagccatgatcacgccactgcactccagtctgggtgacagggcaagctccatctcgaaaaaaaagaaagttttaaagtttacactcaaattattctgatattgtaaaatttgtcaaatacttctcatttcctctcatatttttcatagctttatagatttcacttagcttcctcttcaagcctttctagagaatgtaattattcactttttatatccaacagcccccaaatctcaattgttttttccatggatctttatctaatccttttatatctctcctagcatgaaatcataacttcgcatgatgaaagtcacaactgcacatgattttccagaggcaattgccacataactgtactcatttttcatatttctaaaatcatgggcctgtttagcaatgcattttgctgacatttttaataaacaatttaagactgctcccagttcccttttttttttttttttttttaagatggagtcccgctcttgttgcccaggctggagtgcaatggcacaatctcggctgactgcaagctccacctcccaggttcaaacgattctcctgcctcagcctccagagtagctgggattacaggtgcctgccaccgcgctcagctaatttttttatatttttagtagagacggggttttagtatgttggccaggctggtcttgaactcctgacctcaggcgatccacccacctcagcctcccaaagtgctgggattataggcgtgagccaccgtgcccggctcttttttttttttttttttgagacagagtctcactctgtcacccaagctggagtgctcactcctctgcctccctggttcaagtgattctcctgcctcagcctccctagtaactgggattacaggccaccacgcccggctaattttgtatttttagtagagacagggtttcaccatgttggccaggctggtcttgaactcccgacctcaaatgatctgcccaccttggcctcccaaaatgctgggattacaggcatgagccaccatgcctggccccattgttttatatttaaataaattttccccaaacattttatcttgccgttgtctgtattgaagatgacctgccacttgcttgctgaagtgtgcaaaatctttcagtttactgtcatgaatttagcatctcctagtttagatataatttcaactgtagatttggaacttaaactctgcatttctttttccagggccatttataaatttgttaagattggttctattggccgggtgccatggctcatgcttgtaatcccagcattttgggatactgaggtaggaggatcacttgagccaaggagttcaaggccaacctaggaaacatagtgaaaccccatctctaaaaacaaaaaagttaaaaaattaatcatacatggtggcatgcaactgtagtcccagttacttggaaggctgaggcaggaggattgcttgagcccgagaggtcatgattgtaatgaactatgatggcaccactgcactccagctagacggcagagcaaaagtctgtctcaaaatcaaaaaaagattggttctacctcagaaaagaatgtcactgttgacatttcccataatagagaagttcccatttatctttttcctttgttttcagtctcttaagtttcctgtctctgacagttttgtgaattccatacagacttagttttcatagctttgcttgcttaagtcaagttacctcactattttgacttttttctttttttcttcacagactagtattattgttatgttttatacatagcagattgtcatctactgattttttttatttcagtttgatctaaataattatcagatgaggctgggcacggtggctcatgcctgtaatcctagcactttgggaggccgaggcgggcggatcacctgaggtcaagagttcgagaccagcctgaccaacatggaggtctgtactaaaaatacaaaattagccgggcacatgcctgtaatcccagctactcaggaggctgaggcaggagaatcgcttgaacccaggaggcggaggttgcagtgagccgagatcacgccattgcactccagcctgggcaacatgagcaaaaacgccatctcaaaaaataataataataataataataataataataataattatcagatgagtggctgggcatggtggcttatgcctgtaattccagcactttgggaggctgaggtggaaggatcacttggagcccaggagttcaagaccagtctgggccaaatagtaacacctccatctcttttttttttgaggcgagttttgctcttgttgcccagactggagtgcaatggcacaatcttggcttaccacaacctctgcctcccgagttcaagcaattctcctgcctcggccttccaacgtgctaggattacaggcatgtgccaccacacccagctaattttctaattttttttttagtagagatggggtttctccatgttggccaggctggtcttgaactcccgacctcagttgatctacctgcctcagcctcccaaagtgctgggattgtaggcgtgagccaccatgcccagcctctattaatttttttaaaaagaattttcaaaaattgtcatatgaggagttactggcttcagacaggaaaaagaaaaaggaaattacttgtgtaatatatccgtttacttatttctatgcagtaataaatcttgcatactcagatattttccctgagtgtctagagcacttgtccttcttgggctacagagtccgttcttatttctagtaggagttaggcaggcacccacctgagtttgagtggatgccagctgcctaagaattaccatgtttgtgcgtgtgtgcacgcgtgcgcatgtgtgtgtgtgtttatttatttattttttttgagatggagtcttgctctgtcgcccaggctgaagtgcagtggcgtgatattgtctcactgcggcctccacctcccgagttcaagcaattctcctgcctcagcctcctgagtagctgaaattacaggcgagcaccaccatgcccgtttaatttttgtgtttttagtagagacagggtttcaccttgttagtcaggctggtctcaaactcctgacctcgtgatccgcctgcctcggcctctcaaagtgctgggattacaggcgtgagccaccgcatttgccctttttttgtttttcaagacagagtcttgctctgttgcccaggctggagtgcagtggcacaatctcggttcactgcaagctccgcctcccaggttcatgccattctcctgccccagcctcccgagtagctgggactacaagcacctgccaccacgcctggctaattttttgtatttttagtagagacagggtttcaccgtgttagccaggatggtctcaatctcctgaccttgtgatctgcctgcctcagcctcccaaagtgctgggattacaggtgtgagtcaccgcacccggcctttttttttttttttttttgagacagagtctcactctgttgcccaggctttagtgcagtggcaagatctcagctcactgcaacctctgcctcccgggttcaagcagttctgccttagcctcgtgagtagctgggattacaagcgcacgccaccacgcctggctaatttttgtatttttagtagagacggggtttcaccatgttggtcaggctggtcttgaactcctaacctcatgatctgcccgcctcggcctcccaaagtgctgggattacaggtgtgagcccccgcgccctgcatttttttttttttttttttttttttttaacgaaaatctaagtagggagagagacagagggaaaggaagctgcagatactggccaatcttaatgctggtaactgggctggaataagaaaaggagggcgagagagcactgtatgtttgtgtgaacttctaagaataatttacttactttatatctgaacatggtaataaatactggagtcagcccccgagaaagcctcctgaaaccgtatttcttccatctcatctttcttcctagactatacaagaaatgttttatgtctagtaggttgtttgtgagttttaagattagtaatcatagtgaaataatcattacaggtgtaaataactgaacaatttcctcctaaagaacaagcattcaggagaagtaatagcacccatttctaccttcttgtgttgaaggatttggtaaactaatcgttggcactaaaaggcagatttgatcttttttttttttttttttttttgagacggagtttcgcccttgtcgctcaagctggaatgtaatggcgtgatcttggctcaccacaaccttctcctgcctcagtctcccaagtagctgcgattacaggcatgcgccaccacgcccagctaatttcgtatttttagtagagacggggtttctccatgttggtccggctggtctggaactcccgacctcaggtgatctgcccacctcagcctcccaaagtgctgggattacaggcatgtgccaccatgctcggctgagttttgtatttttagtagagatggggtatggggtttcaccgtgttggtcaggctggtctcgaactcctgacttcaagtgatccatccgcctcagcctcccaaagtgctgggattacaggcgtgaaccactgtgcctggccgataattttttgatttttgatatattttccttctttctctcccttccattttacagcccccttacatctttgatatgaacatgtttcttttgttttttaaaattaaaaacaatggtcgggcatggtggctcatgcctgtaatcctagcactttgggaggcctcccaaaggatcagctgagctcaggagttcaagaccagcctgggcaacatggtgaaatcctctctctaccatttaaaaattataaaaataaaaaataataataaaatttaaaacaaaacaaaaatctcttattttcgttgtaagattgcagtagtaattgtgcttatcataaggtctgattgagtagataaaataaatcaggcaagatattttacttcattgggtatcaggtgttttttgtctcttgacatttactaagcagtataacttcaatttaaacaattttgtctcatactcagttttgtttatggtggtagacattattatcatcattttacagaaaagatgaacaaactgcgattcagagaacctaaaagatttagtgttatcaatgctgtgtcattttaatatcattaaaaaccatagaattgctggtgtttgtattgtttctctctatagcactttttatctttcttgtttttgctctctcttgctttgtaggtttcatccatccttctttcatcttcccttttacttactgcaccctctgcttccatacacataccctaaattaggtatctcccaagggaaaaaactcgccagaactctcttctcatagattgtcagcatgacctactctctcacctccttgagaattttgatgttttggatcaccttttctctgaagcctttcctgactgtcctatttagttttcatctcctcccactagaatataaactccatgaggttccagattgttatcagtgtgatttagcgttgtgttctcaacttctacaatatttggcatgtagtaaacactttttaaacatatacggaatgaatgtatgaacgaatcactatgttctcatctttggattctttattaccttgcacatagtagttatcaggtttattcagttaaatgtaattgcttttaaataagaattctgatttctgaaaaaggtttcaattttgtcttcccaaattgagtgtgcacaaaaagtacatttttttctaagcaattatctctgttttcctaaggaaattggaagtaactttcaaaatgttataagttgtttttctaaaacttagcatttaaaatatttaaagctattcattcctcgttttcttgctttaacttactcaatcctcatgctaattctgacaaacacattctttagaaccatctgtacaaaaggaaaatcatttagatttttttcaattgacagttattatcagttggcaaaatggaagcaatattaagaataatttgattgacagtcacttttggaaactggcactgtctactacagttaaacatacacatactgtatgatccagcaattccatttgtaaatctatactcaccagaaggatatgccagaagacatgtacaagaatgttcatagcagcattatttatagtaactcaaaatttccttcctgtaggagatagcttaaaaaggaaaaataaggcctggcactgttgctcaagcctgtaatcctaccactttgggagagcaaggcaggcgggtcacaaggtcaggagttccagaccagcctggccagcatggtgaaaccccccccccgtctctactaaaaatacaaaaattagccaggcattgtggcacacgcctgtagtccgagctactggggaggctgaggcaggagaattgattgaacccgggagcagaggttgcagtgagccgagatcacgccatgccactgcactccagcctggcgacatagcaagactctgtctcaaaaaaaaaaaaaaaagaaaaagaaaaagactttttaaataatagttcaaaagcggaagcaaccctaatgtccaccaacaatagaataaattgtgatatacctatacaatggaataatatgtagcatctgcaacaaattgattactgctacatgcaacagcatggatgaatcacctggacataatataatgttaagccaaagaagccagacataaaagaggacatactgtataattccatttatataaagttcaggccaggcacagtggctcacgcctgtaatcccagcactttgagaggccaaggcaggcagatcacctgaggtcaggagtttgagaccagcctgaccaatgtggtgaaaccctgtcgttactaaaaacatacaaaaattagctgggtgtggtggcatgggcctgtagtcccagctattcaggaggctgaggcaggagaatcacttgaacccgggagtaggaggttgcagtgagctaagatcgcaccattgcagcctgggcaacaagagcaaaacaccatctcaaaaaagtaaaataaactatgataaaataaatttttaaaacgaagttcaaaaataggaaaagctaaatctgtggtaatggaagccaatgttagtggttattttgcagggagtaattactaggagtgccaccagcagggtttctggagttccggtaatgttctgtatctggatctcagtagtggttacatgggtgtgttgtaaatttccattaagaggtatattttagatttgtatgctttactgtatacgttatgccttagtttaaaaaactactcatactgttttctcctgcaacctgcccatgtaaatttggtaacggaaatacatctatacatcgagaaatccacttaatcctgatcttgacccagaaatagttgatagctccctatttttggcacaacactctgaaatgtgtggtgttcacagtggattatgtatttcctgtgtgtatacatgaaaaaaatttgtgttgatcagttctcacgtaacttttgaaaagtgtaatttggataaagcatcatgagacctactacagtcacagctgcctctagatcaatgacttttttacttctttttttaaactgtagccaacaatacaaaatacattgtacttagcaacccagagccaatttgtgtgtaactagaataaatgtttcgtgaaatagtatttacttccattgcttgtgaggtctcaccattttattctgttcattaaaacacaagatgtaaggccgggcacggtggctcacgcctgtaatcccagcactctgggaggccaaggcaggcggatcacctgaggtcgggagttccagaccagcctgaccaacatggagaaaccccgtctccactaaaaatacaaaattagccaggtgtggtggcgcatgcctgtaatcccagctactcgggaggctgaggcaggagaattgcttgaacccaggaggcagaggttgcagtgagccgagattgtgccattacactccagcctgagcaacaagagcgaaactccgtctcaaaagaaaaaaataaaaagaaaaagcaagatgtaatttgttaccaactaaattttcacaccgcattttaatttaatgaaactgccctagataatataaatatgagtataaacagaaacccaaactgaattttgttttcagatttctagttacatctagtttttgagtacttaataaatttagctagttgccaaaataaatgtttcttactgtttcagagaatagtcagatccttctttgcttctggtagtttttagttatgcctgcattgattttgatagatatgagaacttatgtttatattgcatgttttacatataatctcttcttaaaacttctaaatctctaagttactttcagaataaaatatccttgcttttatgaaatgtgttcatgtgatgtattctgcttgcagtattatagagttttaccctaatttctaatatatatagaaataccagtgaccatctctgattttacagttggctttatctaaccgtgtaagccatcagctggatgttaaaacgtttcattttcaggaatagttacacaactcagttctcatcactttttgttcttaaatgggtttgcattttgttatccaacatcttatagctagtaatttaaaatttattaactattttctttgttttacaatcactttatttcaacaatatccctacttttttggtaattctagaatttatttcctaaccacagtctttatcccgtgaccttattatgttataattcaataacaataaataatgtgtgacttaaaaatatgcttcacttggccgggcgcagtggctcacgcctgaaatcccagcattttgggaggccaaggcgggaggatcacctgaggtcaggagtttgagaccagcctggccaacatggtaaaaccccatctctactaaagatacaaaaattagccaggtgtggtggcaggcccctgtagtcccagctactcgggaggctgaggcaggagaatcacttgaacccgggaggcggaggttacagtgagctgagatcctgggggataagagtgagacttcctctcaaaaaaaaaaaaaaaaggcttatttaaagaggacctactcaaatatgcaaaattaaaatataagcaattactttagtgatattgttgaggaagtcaacagtaagaatattttgttcactttgaattcaattaatgctctatatttttaaaataactcaaagagccctgataatgggtagaaaatagttattaaggcactttttactttgtgttcaagaaagatttgaagttataactgcattacagaaagttttacattgcagtttctataaagataatagttaattgtataatgtatttcattttagaaaatatttaatgatacgttattagggtcttaataacaagttattgtttcagactcattgtctactatgctgaaaaaacttaaattattaagtcatcatgacaagtcattccatttctgcttaatagagttttcattgcttggcgtgcatatttgactagcacgcagaaaccagcaagtaatttttaggtggcacaagagcttcacaaatagactatattttaacataaatttccattacacatgaggaatcagtattgaaacagttgctctgaggcttttaatattggctgtgaaatcacttcagctccaaatccaaaagaaagcattattagctcagtagttttaatatatacagtcatatgccacataacagcctttcagccagtgatgaactgcatgtctgacagttcataatggggctgaaaaattcccatcacctagtgacatggtaatgtagcacaacacattactcacatgtttgtggcgatgctggtgtaaacaaacctattacgctgccagtcatataaaactatagcacatacaggctgtgcgcagtggctcatgcctgtagtcccagcacgttaggagcctgaggtgggcagatcacgaggtcaggagttcgagaccagcctggccagcatggtgaaaccccatcttaactaaaaatacaaaaattatctgggcctggtagcgcgtgcctgtaatcccagctactcaggagggtgaggcaggagaattgcttgaatccaggaggcagaggttacagtgagccaagatcgtgccattgcaccccatcctgggcgacagagcaagactccatctcgaaaaaaaaaaaaaatatatatatatatatatatgtgtgtgtgtgtgtgtgtgtgtgtgtgtgtgtgtatggcacatacagttatatatagtacataatacttgatagtaaatgaaatgtgtcattggtttatatatttactatactatagttttatcttttgtgtgtgtgtatgttgaagggggagatcatcttgctctgttgcccaggctggagtgcaggggtgtgatcaccgcccactgtagcctcaacttcctgggctctggcaatcctcctgcctcagtatcccgagtaactgggaacacagacttgcatcaccacacccagctaattgtttttttttttaattagttatagagacttggtctccttatgttacccaggctgctctggaagtcctaggctcgagtgatcctcccatctcggcttcccaaattgttgggattataggcatgagccactgtgcctggcccaaaatatcttatataccatattgtatttgtaccttttttatatttaaaaacatatttaggccggatgaggtggctcatgcctataatcccagcactttaggaggccgaggcagccggatcacctgaggttaggagttcaagaccagcctggctaatgtggtgaaaccccatctctactacaaatacaaaaattagccagatgtggtggcaggtgcctgtaatcccagttcaggcaggagaattgcttgaacctaggaggcagaggttgcagtgagccaagattgcgtctttgcactctagcctgggtaacaggagctaaactccatctcaaaaacaaaacaaaacaaaacaaaaaacatatttaggccaggtgtagtgactcacgcctgtaatcccagcactttgggaggccaaggtgggcagatcacttgaggtcaggagttcgagaccagtctggccaacatcgcgaaaccccatctctactaaaaatacaaaaattagctgggcatggtggcacgcacctgtagtcctaggtactctggagtttgaggtgtgagaatcgcttgaacccaggaggtggaggttgcattgagccaagtcacgccactgcactccagcctgggcgacagagcgagaccctgtctcaaaataaaataaataaaacaaaataaaataaaaacatgtttagatacacgtatacttacattgtgttacaattgcctacagcatttagtacagtaacaggttgtgtaggtttgtagcctaggagtggtagctatactagatagcctaagtgtgtagtaggctatataacatctaggtttgtataaatacactgcatgatgttcacacgacaatgaaatcgcctaacaactcatttctcagaatatatgccagttgttaagccacacatgactggaatgggttataaaggcaggtaatttaaacttccataacatattaaccaagtatacatttatcttcggtaacattgcattggttttacatgtttagggattttctgttgcttttatttcatttttttatgtcgcccaggctgtagtgcagtggcacgatctctgctcactgcaacctccgcctcccgggttcaagcgattctcttgcctaggcctcctgagtagctaggattacaggcgccagccaccacgcctagctaattttctgggtttgctttgtttgtttggttttgagaaagagtttagctcttgttgcccaggctggagtgcaatggcacgatctcggctcaccacaacctctgcctgccgtgttcaagcaattctcccacctcagcctcccaagtagctgggattacaggcatgcgccaccatgcccggctaattttgtatttttagtagagatgacgtttcttcatgttggtcagcctggtctggaactcctgacctctggtgatccacccgccttggcctccaaagtgctgggattacaggcatgagccaccgcatatggccttctgttgcttttaaagagatcttttcatatggcttcctcgtgaaaatgaaaatgtttactgttactgtttgaagataaaagttacttcgtatatttacattcatgttgacatcattagattcaaagatcaatattttgcagactgttattagccttgtagtttctcttctctctcaatcataaatatctttcttaagaaaaagaaatgtgaagcaacaatggtacaggcatattcatagtttaaggctttgtctttctgtatttaatcttgaaattcagtgataaggaattgctgtgacttttttttattagtcttgtagtgcttgggaaaatgtttcttgcgtctcctgtttcagaagcgtgattggtttacatatataatcactatgggttgtggtaggaaaggtaatttatttacctataattggttttatttttgtgaaaaaagaaaagtagaaaatgatttgtaattgctaattgtaaatgcatgcttcatatttaagtagacttagagaatgaaactatcatctcaggcacttaagttgtgaaataggtaaaagttgtgaaatgtaaatacagagaaatggaactaataaaaggtgtttgtttttagtttatggatttttgaaaaagtgaaaaatgacatgtgaggaagtaatcaaattggtcatgctacattgttccccacaatactccaaaactattcaaatgaaatattaatttttttaacttttaatgggaacattgaatacctaacatacaatttgtttgtaatcttttatttagtttttcttaaaaatattgtttattattggtgtgtatttgtactcagcttttttattttacttggactaaaaagaacagcaaaatttgtttaaaattttttttaattttataaaagggattttttttgttttggtttagctttttggtggtgttaggtgtgtgagtaatagagtcaagtttattaacaatatacgtagaataaaattctcattataaaggcaaatgagaatatatatattttagttcataaacaatattattctaaaatcacaataagagccgccaaattatacaaataattaaaaaatatactgaagttgtttttagaaaaacaaagaacttttaaaactacagagcaacaaggaaagcaaaattgcacgtaacatatagaacattttgaacaataaaagaataatgttttcaataaaattattacataaagctgttaaaactatataactaagttttatacatgtggctttgaaagtaaaataaatttgggcctggcgcaccggctcaagccagtaatcccagcactttgggaggctgaggcgggtggatcgcctaagctcaggagtttgacaccagcctgggcaacacggtgaaactctatctctactaaaaatacaaaaaatcatccgggcgttgcggtgtgtgcctgtagtcccagctactcaggaggctgaggcaggagaatcacttgaacccgggaggcagatgttgcagtgagccaagatcgcaccacttcactcactgcagcctgggcgacagtgagactccagctaaaaaaaaaaaaaaaaaaaaaagtgaaataaatttaaaataagaaacaataaaatatgttcgtgtttatcaaatctaaacattaaactttagttattttactattttaaaataccaatgcagtgctttcctggttttgttttcattacactggcaaggaaaaaaatcaagaaaatactgtccatcaaactgcatattatgctaatgtttattttcttgaaataaaaacaactgtgcagacttcatattaatataatttcagtaaatgtttgtagattatttgatatataatgtaatttaaattctgagaatattgtgaaagacctggaaaaaattatgggaactgaaagtagcatggtcactgtgtatgttaaatacataataaaatttgtgaaatcctttttcagtagatgactttcactctttttaaaaagtaaagctctccattaaaaaggcactttacttgttttccttataatacatgccagcttcaaatttaaaaattaaaaaaggtaaaaggaggtttcagcttcacgtgttcggatagattaactctttgtgctcaaaaaaaagattgttgaagctcccttaaggataactaatgaggagcacccaggcatctgaaagaacgagaagtctgtttttcgttcttgcctaattgccgttaagcaaagatactcttccctaaaagggaaaaatggctccttacgtgttattcctctttgttagtaatgatcactgtgttttgacctcttttcaggatgttttttaaaccatgttttctggttcttctgtagtcttaagtatgtttgatattgttaggtgatctgcataatgtttaatcatttttttctttatataaaccagttggtataattatacctcttttcctatttaagtttgtatgtgtatatgtgattctatagagtagaaaaatgccatcagtttgaaatgatggcacaatcttagtcacttggtttaaataaatagaaaattctaaagccttaaaattaagataatgctctttggcaaactcaaaataaaagcaaaaaaaaaaaaaggaaattaatataaaagaaagcaggacaccagaccttctaaatacaatacttgttgatcttgtctataccatttaatgtagaaaaactaattttctataattgtgtctattaaaggtgacattaatgctgatagaaaaatattcccacatatatctgacttggaaaacttataaaaattgtgctgtctttaaaataaaatttgtatgctttttttgttgtttactttaccttttcttggcaattgaatacaatcttccctctcttaaaagtggatttgctatgaaaattttaagggctgtaaaggaaggcattttcctgattttatatatttaattcttgtgctatagtaattaaaatttcataactagtttttaatttaatagtatctgttgatactttagacaattaaaacattttttaccagtttttatttagtgcttcaaatggattataaacttagtaatttggggactaattgtataaattgttaaaaataaatggattttgcagaaggataggattagtgaaaaggagcagtaaataataaaatgtaatagaaatagaaatgtaatttgtttttaaaataagctatataggaaaactgattgattatatattcttatatggttttaaatcaataaaactcagtatttcacatttaatgcaatagatgctaagaaaaaaattaaccttcagctagaaatctaaataaaaatagaaaataccctttgctgcagtagttcagttgtttaaaaatattaaatctgaggcctggggtggtggctcaatgcctgtaatcctagcactttgggaggccgaggtgggaggtcaggagttcgagaccagcctgacaatatgatgaaaccccctctctattaaaaatacaaaaattagccaggcatgatggcgggcgcctgtaatcccagctgctcaggaggctgagacaagagaatcgcttgaacccgggaggcagagtttgcagtgagccaagatcataccattgcactccaacctaggcaacaagagtgaaagtttgtctcaaaaaaaaaaaaaaaaattaaatctgatataactgatttagtgaaaaagtaagtctaatcccaaaaagaaaaattaataattatctctttggaaataaattataaaattgctaaattttgttgtagagtttagctaatgattaactttgagagcctatgtatttggacttgaaagtgtttatattgactgatcatatttttttttaatatagtttattggtttggtttctttgactttctcatcatcttcaacaagtagagttaggttttttgtttctttgctttaatttcagtattaactactgtggtaatttggtaggtctattctacacaatattatttgtcaaaatgtttttgtaagtggggatacacagattctgtgccaattagagaactatatttttcaactagtttgcttttctggctttaaactttgtttctcctctctatgatagatctgtccagcttcttttttgtttttttgtttttttttttttttgagacggagtctcgctcttgttgcccaggctggagtgcagtggtgcgatttcagctcactgcaaactctgcctcccgggtttgcaccattctcctgcctcagcctcccgagtagctgggactacaggcgcctgccagcacgcccggctaattttttgtatttttnnnnnnnnnnnnnnnnnnnnaaaaaaaagaaagttggactaaagagagtggaagaggttctatgatatgaagacttattaataaagcatttacacacattcaaaaaataaagcatttacacattagctcattttttgtcttatgaactattttcattggaatttggatttgaatatatgccatttcaaaaccagaaaataattaaagtcaaatatttgtagcatcaacatgccgaaagaactagccagccgaatgcatgtttcagcatgggaggaggtaacagagtgaagtaaaaagcactgatttcacagtctgaatattgaatcatgtcctatctttgtccctaactgacattatgatcttgatcacttaccctttctgggctgcagttttgtggtctatagattggttataataatatccactatacctacataccagaatcgaaggctcaaataaaatcatggtgagaatgttttacaaaactagcacaagctgtgcaaatgtaggatgttcttttgcttctgggataatgaatgcttacttattgccacataactgttttttccatcttctggctagtgatcggcagagatgtattcatgaagtctggcaaattatagaagaaaggaaaaggtagatgttgtaggccagtgtttccaaaataataaattggttcatggttagtttacagtattttgttaatccctagaatatccagagagaatactaaatttaaatttacagtgttttggtttattcttaaaatgtggtaagagcttaactttaaggatgtaatagtctatcattattttacttgtgtttcagtgaacaacctactgtaatttttttcatcattcatcttattaatcagtgtcatcagattgggagatctttaataaactctagaaagaaccatctttccttcttttcctacttctcattaatgtttctaaatttgcctttttacaggactttgcctcccgggccaaactggcagttcaaaaactagtacagaaagttggattttttggaattttggcctgtgcttcagtaagtgaattgtattaaaacagaacttttactaagtggtagtgttatattttgatccatatatactcctgaattaacaaaagtgctatcacttttattgggtatgtaattttgtgaatcattcacctttttttttttttaagacggagtctccctcttgtcacccaggctggagtgcagtggcatgatctcggctcactgcaacctccatctcctgggctcaagcaattctcctgtctcagcctccctagtagctgggactacaggcatgcacccccacgcctggctaatttttatatttttagtagaggcaggatctcatgttgcccaggctagtctcaaactcctgggcccaagtgatccacctgcctcggcctcccaaagtgctgggattacaggcatgagccactacacctggcccattcaacttttttttttttttttttttttttttttgagacaagagtttcacttttgtggcccaggctggagtgcaatggcacaatttcggctcactgcaacctccacctcccgggttcaaacgattttcctgcctcagcctcccaaagtagctgggatttcaggcgactgcccccccccccaggtaaatttttttttttttttttttttttttttttttttttttttgagacggagtctcgctctgtcgcccaggcggtagtgcagtggcgggatctcggctcactgcaagctccgcctcccgggttcacgccattctcctgcctcagcctcccaagtagctgggactacaggcgcccgccactacgcccggctaattttttgtatttttagtagagacggggtttcaccgttttagccgggatggtctcgatctcctgacctcgtgatccgcccgcctcggcctcccaaagtactgggattacaggtgtgagctactgcacccagcccaattcaacttattaaatgagctgttttctgttgaataggttcacatcttgtttattggcttttaagtatttcatcatgtagtgatgacttcagacctaaatggcttaaatcagtaagaataaaagagacaaaatccattcttccaatgaagaatatactacatttaaccaaattaaactacatttaaccaaataaggatgacttcattctttcctcaaatttatagataagaagtctttttccaaagtttcaagtattagttacaaggaagaatttatataaaacctgtttaaagcgatgttagctcagggctactctgatttacgtatcttaaatcctttttttgtgtttgtttttctttttttgagacagagtctccctctgtcacccaggctggagtgcagtggcgagatcttggctcacggcaacctccacctcccaggttcaagcgattctcctgcctcaggctacccagtagctgggattacaatcatgcaccactacacccagctaatttttgtatttttagtagagacaaggtttcaccatgttggccaggctggtctcgaactcctgacctcaagtgatctacccacctcggcctcccaaagtgctgggattataggcataagacactgcgcccagcctacatatcttaaatactttaaattcattttcatttcaacatgagttggaaccttatgataaaggaaaaaaaagttataactcatagaattatgagagtcacatgagcaaatataacaaatagcaggtgtgatgctgtgtaaatgatattattatatggttgtaagagatgaaataatcctaaagcatttgaatttggatgagaaaaacaaaaatgagtcattgaatccaagtgttactaacaaaggaatacttgaattctaatttagtcatgtcttttttaaagatcatatgtgacaagtattttttaaataactaggcttttctttcaaagttcaaaaatgaaattatataaattaattggcttattaatggttcagccaacagccacaaggtcagagtactttcataggagaagaagggatgaagtgctcaaaaacagcttgtggcttctttgcatttttacatgaaatgtcttttagcattcttaaaatgtgggaatgtttgggaaaggtatttgttgtgaattacttctttgtctgggactgagtattcaaaacatctgaatctgtgtgatctcatatttccacacttgatcttctttataaattgtgtcacatagccctcagacttggtctctcgtaaaataaaatacaaattattaatattttatgttgagaataacagcacatccacccataaatgtatttgagaatttattaaaatatttgctaatgatatgagtgctttccagataatattcacatttcaagctaaagattttagaaccctaactgctgaaacaatcttaaggctctttcttcactcatacctcaccttagaaaacagccaccaaatatccaggaatcaactgaacgggattaaattcctgcaggtccacttactttatccagttctcatgtgatgggcacacacacaaacacacacacagtgccttagccatgagtaatataagcaaaaggacaccttggtttgctgtgagcagattgaacacctaaggtgaatatgagacccagcttctagacacattaggatgtttgcctaacctccttttgaacaatccagtagtgatcaaggaacccatatattgctttgcagtgtaagcaggctgaaagcagaataccacatatcaatgggtgataaaattaaattgttctttggattataatatggaagtccttctttttctctctatagattccaaatcctttatttgatctggctggaataacgtgtggacactttctggtacctttttggaccttctttggtgcaaccctaattggaaaagcaataataaaaatgcatatccaggtaattataccccctgattcactgcctaatgatgatgaacccattacaagacaatgaaacatgctcattcctaagtgaattatttagttattctttctgcttttttggttggtagcttacttaggtaataccacatagaatgtcatttggaattagtgatctccttgttttctttcttttcttctttcttcctccctccttccctttcttccttctttccttcctttctctctttctttctttattttttgtcctgtttaactatttatccaggactttcaccaaacaaaaatagtgtttgtgtgcagaaagatgcacatcatttttatatacacagcccaaaaaatgtagttttttgtttgttttgttttgttttaccaaccacaagctgagagaatattgccattcactaattcttactttctttcacatactctatatatatagagtgtgtaaagcagttcctcccatgttaccaatatcctttaccgaaaaacagccagatgttagtgtgggaggagaatggggaagaagagggtctctgaagaggcgaggagatgtgggttgtggtcagagaagtgagaatctgctagtcctcaaagccactcttaacaaaatctttaggatggagggtgtgtgcatgtgtatgtgtgtgtgcacacatatatgaatagagaggagagaaaaggttaacaatttaaacgaagggaaaatggatatgtgcttctagaactgtgatatgaattacttccttctaagggcagatctcaatagaataaaataaaaattaacctggaaagaatttgttttatatcagtatggtttgtaacaaagaacgttattaaccaaaagaaaggaaagaacaaccaagcgtggtggctcacgcctgtaatcccagcactttgggaggctgaagtgggcagatcatgaggtcaggagatcgagaccatcctggccaacatggtgaaaccctgtctctactgaaaacgcaaaaattagctgggcgtggtggcgcacgcttgtaatcccagctacttgggaggctgacgcaggagagtctcttgaacctgggaggtggaggttgcagtgagccaagatcacgccactgcactccagcctggcaacagagcaagactctgtctcaaaaaaagaaaggaaagaacagtgaagttctctgcccttgtatgattccatgataattacaagtgtgtctatccccaaagtttctatgttaatacctctctacttccagttcttagaagggaagaatgaaacaggaaaacttcggctgcttctacttatccagtttataatcttagattttggcatttgggtcaagtttattgcgtctgtcctctattttcctgccataatcactcagaatttcatgatgtttttcctacttcaaagaatatatttcctcccatttaaattaagtattttgttcaatcaacgaacacaggttttttaatattacagtgctagttactatggttaagatttaatactggccagatgcggtggctcacacctgtaatcccagcactttgggaggccgaggcgggtggatcacctgaggtcggaagttccagaccagcctgaccaacatggagaaaccctgtctctactaaaaatacaaaattagccgagcgtggtggcgcatgcctgtaatcccagctactcaggagcctgaggcaggagaatcacttgaacctgagaggtggaggttgcggtgagccgagatcgtgccattgcactccagcctgggcaacaagagtttgtctcaaaaaaaaaaaaaaagatttaataccatacaggattttttcaaataataaaatatggtgaataataaattattttcaatgtatctgaaaataggtttttctttaatctttagagttgtttctagaagagagctgtcatttagcttcttgcagtccttaatacctaaggaaaaataacagattattttatttcataacaagaacttctctagtaatccataagttttatgtgtcctgctttatacctcttgaatgcagtgcctttctataaattatagtaaaacgtattatgccataagtaccctatctgtagtggtaagatatgcaacttatcagacctttcatttcagaaagatttaaaactagtatatatttaaacatactcagattttttcaatttatgatgattgattgattgattgattgattgatttttgagatggagtctctctctgtcacccaggctagagtgtggtggcgtgatttcagctcactgcaacctccgcctcccaggttcaaacgattcttttgtttcagcctccagagtaagtgggactacaggcgcatgccaccacacccagctaattctgtatttttagtagagatagggttcaccatattggccaggctggtctcgaactcctgacctcatgatctgcccgccttggcctcccaaagtgctgggattacaggcatgatccactgcgcctggccgatgagtgatttttttatggaacttcacactttaaagcacttatctatatgatttaattcttataatcctgggatagaggaattactatacccattttgtaattctcagaggtagggaggttaataagtaatagttgcttaagagagtaagtaacagctggaatttgaacccaagtcttttgacttcaagttcagtgttctttccattcttttgcattgccttcttaactttaatgtattgatatgattaaggaaactgaattgtttaatgcctgctattgatcaggacctgtgcaaggtaatttgcagtagttatctcatggcagacaatcttgagaggttgttattaaccacatttcatagatgagggaactgtgttagagaaggtaaaatacttgcctaaggccctagaatccaaccaagctctgtaaagataaagctctttccctgtatctatgtggaagcaaaaaagaaaaagaaagctaaaatccatttatgtttctgaaaggaaagaatctgagttccttcactaaactaagaccgtgggatatgtttgctgtgttccatcgtatcatagtgacatgctttgtaaaggcatgtcacttgatgtacatccagatgtagcttagggtaacaaacatttctcattctgtgggtaaacaatattagtaatataaacattttaaccattctgaaataatagtgggaaagccacacacacaccgatttttttctaccctaatagtaaacctgtctccttgtctgcttttctttcttccctttttcctcagcttaaaattagacaaccttctttaataaatattgctatttttattgatgtcttcctcttaaccttcccctaaaagattcaaatcaatctacctataatgttagatcagatttccccttccactgcacagagtcaagtactctgtctgtagaagtatccttagataggaaaaggcatgagaagagtatctttttagaaaaaattttttaagaagtagtatccttagagacattacctttgtcccaaataattaagaaaagcaacatactcattcatgttatttcatgtaccatttaacttacttattgtacccttaaaatacatcactgttctttatctctctaccttcacactcaccagcacacacacagtattataaactcccaggagggcagagatttttgtctgttggttcactgatgtattataatgcctagaatagcatccaggagatagtaggcactcaatatttaataactgaatctgtcttaagattcttctttctggccgggtgcggtggctcacgcctgtaatcccagcactttgggaggccgaggcaggtggatcacaaggtcaggagatcgagaccatcctggctaacacggtgaaaccccgtctctactaaaaaaaatacaaaaaaattagctgggcatggtggcgggcgcctgtagtcccagctactcaggaggctgaggcaggagaatgacgtgaaccaggaggcggaggttgcagtgagcccagattgagccactgcattccagcctgggcaacagagcgagactccgtctcaaaaaaaaaaaaaaaaaaaaagattcttctttccaatgaaggacttcttttacagatggttccatctttgttcattctagcacaattagtttctccctcccatgtcttttttcctcctcctctaccctttcctttgtttcttctatgcatgtggttaagagggctcttccgtggtctgtgccttttatttattttgtagaattcccactcagacctcctgcctgaaagactaagacatatgttcttaaatgtgtgacacattttttgtctaacccagaacagtgacttttcaagctgctacatacaaaaagaaaatcttgttttgctgttttgcattgaaattgtgcaattatttaggcattggcttattttgattgttaagaaatgatagtagggaaagttcatggtgatgaaatcactggaaggcaagaactactagctctgttgattaataaaagatttatagctctaaataactggtttttggtatagaccccctgcttttcttcacaaattatctgtaataatagccttgctagcttcataatattcacataccaattgtatacctttgccttattagtcttcttgccagaaataatgtacgttagtctaacctgtccaggttcctgagattcatagtgagtggataaaaagaagactactgttggctgggcacagtggctgacgcctgtaatcccgcactttgggaggctgaggtgggcagatcacgaggtcaggagatcgagaccatcctggctaacacagtgaaaccccatctctactaaaaatacaaaaaattagccgggcatggtggcgggcgcctgtagtcccagcactttgggaggctgaggcaggtggatcaccaggtcaggagttcgagaccatcctggcctcctggccagcatggtgaaaccccatctatacaaaaaacacaaaaatttgctaggcgtggtgtcgtgcgcctgtaatcccagctacttgagaggctgaggtaggagaatggcttgaccctgggaggcggaggttgtagtgagccaagatggcgccactgcactccagcctgggcaacagaaggagactccgtctcaaaaaaaaaaaaagaaaaaagaaagaaagaaaaaaaaaaagggccgggcgcaatggctcatgcctgtaatcccagcactttgggaggctgaggcagatggatcacttgagatcaggagttcaagaccagcctgaccaacatggagaaacaccgtctctactaaaaatacaaaaaaaaattagctgggcatggtagcgcatccctgtaatcccaggtactttgggaggctgaggcaggagaatcgcttgaacccgggaggcggaggttgcggtgagttgagatcacgccatggcactccagcctgggcaataagagtgaaactctgtctcaaaaaaaaaaaaaaaaaaaaggaatacaaagttgataacatttgaattaaatgttatcttttattttattttattttattttatttttgatatggagtctcctcactctgtcatcaggctggagtgcagtggtgcaatcttggctcactgccacctccgcctcctgggttcaagcaattctcctgcctcagcctcccaagtagctgggactacaggcacatgtcaccacccccagctaatttttgtatttttagtagagacggggtttcaccatgttggacaggatggaaatgttatattttatttttaaagaaatttaaaaattgcaattaggggcacaatcttacctctttagactattaccagaattgtgaatttatgttggttttttgatgactaaataatttattttaactggtgttttctttacagaaaatttttgttataataacattcagcaagcacatagtggagcaaatggtggctttcattgggtaagtaattcttcaaggactaatattaatataattactctttaaatgggagtaaatgtgtacaagactgaattgaaatagaatttttgacatagttctttattttttgaggagcaaaaataacttgctgttattagtaaatgaagaatactttcttgttctatagtagggaaagataaagcttacattatccctgtttaattgtaaaccaaacatctatcaagtcatataattctgggtttaaaagaagctttggggtttgaatctgtagccccaccaaagaaataagaaattgtctttatataaaagatatgtgtatatcattgcagtttaatggtgctttagtacaatgctgtgatttttggccaaactagatgccagatacacagctgcatttaatgtaaatgtaaatcttacataaaattttagtattttatataaaacctagccggccgtggtggcgggcacctatagtcccagctgctcaggaggctgaggcaggagaatcgcttgaacctgggaggcagaggttgcagtgagccaagatcatgccattgcactccagcctgggtgacagagcaagactctatctcaaaaaaaagaaaatttagtatttaattaagtaagtcatgttagatggcataatattaacaaaatttgtcaggtctctattacttcactagagaaaaattaggttattttaaaaggctaaactggccaggcacggtggctgatgcctgtaatcccagcactttgggaggccagggcaggcggatcgcctgaggttgggagttcaagaccagcctgaccaacatggagaaatcccatctctactaaaaatacaaaattagccgggcgtggtggcacatgcctgtaatcccagctactagggaggcggaggttgcggtgagctgagagcgcgtcattgcactccagcctgggcaagaagagcgaaactccatcccaaaaaaaaaaattaattaaaataaattgcaataaaaccaaaagttgttaggtttttaaatcattattataggggagaggttttcttttcattcagtagtacagctgccccacgggggaaaagtgtcaagtttaagtgccctttgtttagttttaatgtaaatctttatcttaaaagccacttacagagcaaacatttatggaaatttttgctatttaaaaaaagaatgccacttgatgttgagtttgtgactattgatttttttggtcatatatatgttcattcttttctatgtattgtaataaaatagtttttaatatttgctagttcagctttaataaggaaaaaatatattcttgagattgtactcagtggagccagtcattagtttcattaattcctgagcttatcagtgtggattataacttgtacactaaaatttacatttaaaattaaaattaaatttactctagttttttgctgcctgaatccttacaaataaagtattttatatgtgaccatatatcacataaagacaaaaaatattcttgtcccttattttttatttatttatttattcatttttgtagagacggggtctcgctttgctgcccaggctggtgtcaaactcctggtttcaagtagtcctcccacctcagccttccaaagtgttggaattactggcatgagccaccatgcctggcttcccttatgtttttggttttttttgttgttgtttttgagacagagtctcgctccaggctggagtgcagtggtgcaatctcagctcactacaacctccgcctcccaggttaaagcaattcttctgcatcagcctcctgagtagctgggattacaggtgtacgccaccacacccagctaatttttgtatttttagtagagttagggtttcaccacattggtcaggctggtctcaaactcctgacctggtgatccgcccatctcgggcttccaaagtgctgggattacaggcatgagcctccgctcccaaccccttattttttaaatgtaaggaaaacatttcatttattcttagagactactactctaccttgagactgcagagcgcagtgcatataacaccatgcattatttgttcttttcttatactgaacatttatagaaagaagtttttcagctactcctgcatcctcaccatgagtaccttctgtttccccagcctttggagtttctaggaagttacattacttagctacttgtttcatctaccgatatatccagtttcactctcttccaatctgttcaccatattgcagtcagtaacctttttgaaattttaatctgagcatatcatcaccactgtcttcactccctttctcctcctcttcttgaaacccttcacttacttgtttttcccttcattctttagataaagccaaaactccttaccagggtttataagccctctctgtgttatctgtcccctctagtttcctctgctcaaactactttgtccatatttgagtctcccaccactggtctttgcttgtgcttttctctttgcctagttcaagatttctcagccttggcactattgactttttaaagaccagataattacttgttatggggaactgtcctgtgcattataagagatgtagcatcatcttcctcctctactcactgcatgctactagtacctcccaatcatgacaatcacaaatgtctcagacattgccaaatgtcacatggggaacagaccaccaccctcattgagaatcactggcctaaacagtgtcctttagattttagccattgcattctcagaaagcattccctgacttgatctaataccatctttaccaggggcctttcttcacagcaacgtatactacatgcacttatagttatattgttacacttatgtttgtaggagtgtgtgatttactgtctttttactgttaacctgtaagcttctcaaaggcaaagattgtgtctatttttgtttactgttatgtccactggtcctggcgtcttgactgacatatagcagacacttggtaaatctgctgaataagtgaacacatgaccagtacaaattagaaaatcattggtatagcccagattcttctatttccgcaggctttagagtttttatgaaattatattatttatctatggtaaatagaaatgcctttaagcttaggccaatgtggttaagtcagaatatcttatgtctttctttcttttttttgttttttttttttttgtgacggagtctcactgtgtcgcccaggctggagtgcagtggcgcgatcttggctcactggaagctccgcctcctgggtccatgccattctcctgcctcagccccccgagtagctgggactacaggcgcccgcctccatgcctggctaattttttgtattgttaatagagacagggtttcacggtgttagccaggatggtctcgatctcctgacctcatgatccgcctgcctaagcctcccaaagtgctgggattacaggtgtgagccactgcacctgacctatcttacgtctttcaaagtcagtaatttattttaaaccccactggcatggcccctcaaaaaattccagtgatcctttactcttaaagataagatggttttgaatatagttatgctaaaatattcaagacctactggattcagatttgtattgaattaaatgagttgtgtcgtatttgaaaaattatttttaggagacagatgttggaatgtcctgatgtccttatcattttcctagcactgtctacagggattacctcagctacttttctttttttttttttttttttttttgaggcggagtttcactctcgttgcccaggctggagtgcaatggtgcgatctcagatctcgactcaccgaaacctccgcctcctgggttcaagcaattctcctgactcagcctcccgagcagctgggattataggcatgtgccatcatgcccggctaattttttatttttagtagggacagggtttctccatgttggtcaggtcacctgaactcctgacctcaggtgatccacctgcctgggactcccaaagtgctgggattacaggcgtgagccactgcacctggcctttttttttttgagatggagttttgctttgtcgcccaggctggggtacagtggcacaatcttggctcactgcaacctccgcctcctggattcaagtgattttcctgcctcagcctcccaagtaactgggattacaggcgtgcaccaccatgcctggctaatttttatatttttagtagagatgggcttccaccatttggccaggctgatctcaagctcctgacctcaggtggtccgcccacctcagccttccaaagtgctgcgattacaagagtgagccactgtgcccggccattcttttctagataatatattaaacagtataaataattagactcagcagatgctagtaaagctttattatcagatcccaaagggtatccttttagtctttgtcattaataacattatcttttaatcagattctccaattgagcatgacatgattggtttttttatgttttgaagtaggaaatacttttttttttttttttttttctgagacagagtcttgctgtgtcgcccaggctggagtgcagtggtgtgatctcagcttactccaatctccgcctcccgggttcaagcaattctcctgcttcagccttctgagtagctgggattacaggtgtgcaccaccacacctggctaatttttgtatttttagtagagatggggtttcaccatgtcacgctggtcttgaactcctgacctcaagtgatccacctgcctcggcccaccaaagtgctgggattacaggtgtgagccaccatgcccagccagaaatgcttttaaatacaagtgttcaattgaaaattaataagtagcctcaccaaacctaaaatggagattaagttcaataaagagaacaaatttttagtagacccaaatatatgatttcatatcataattaatagagtagtactttatttcagaaaagaggaggtgaacagctggatttcctcactagatacactgtctctaacctgctgtagaaacattctcctttagatcatttgaagctaggaattcaggactagcctggaaacatagtaagactctgtctgtctctacaaaaaaacgcactaacaaattagttgggcatggtggtacccgcctgtagtccctgctacccaagaggctgagatggaaaaattgtttgaggcaggaggttgaggctgcagtgaaccatgatcatactactgcactccatcctaggcgacagagtgagaccctgattcttgaaaaaaagaaaggaagaaagaaaataaacattctcctttaattgttagttctctccttcacactgttaaaaccctgaatgggccaggcatggtggctgacgcctgcaatcccagcactttgggaggccaaggcgggtagatcatttgaggtcaggagtttgagaccaggctggccaacatggtaagacccccatctctactaaaaatacaaaaattagctgggcatggtgccgcatgcctgtaatctcagctatttgggaggctgaggtaggagaatttctcgaacctgggaggcggaggttgcagtgagccgagatcacaccactgcactccagcctggatgacagtgagatatgtctcaaaaaaaaaaaaaaaatcgggccgggggcagtggctcatacctgtaatcccagcactttgggaggctgaggtgggcggatcacaaggtcaggagatcaagaccatcctggctaacatggtgaaacccagtctctactaaaaatacaaaaaaaaattagccgggtgtggtggacggcacctgtatctcagctacttgggaggctaaggcaggagaatgacgtgaacccgggaggcggatcatgcagtgagctgagatcacgccactgcactccaacctgggtgacagagcgagactctgcctcaaaaaaaaaaaatcgctgaatggtatagcaaatcatcaaactaaattagtaaacttcagaatgcagtcttttgaaggatatttaaaaccttgcagtcacaaataaaggagagataacttgtcatggtagagaacaaaatcaaaagacaagcaagaaaaaagccagcagcagttgaaatttaaaataaaattatgagataataaggcaaggaagaatgaaaaatgaatcccgggccgggcgcagaggctcacgcctgtaatcccggcactttgggcagatcacctgaggtcaggaattcgagaccatgctggccaacatggtgaaaccttgtctccactaaacatacaaaaattagccgggcatggtggcaggcacctgtcgtcccagctactcaggaggctgaggcaggagaatcacttgaacccaggaggcagagcttgcagtgagctgagatcacaccactgcactccagcctgggcgacacagcgagactctgtctccaaaaaaaaaaaaaagggtatcaaaaatcttttggctgggaccgggcatgatggctcacatctataaccccagcactttgggaggccaaggcaggtgtatcacctgaggtcaggagttcaagaccagcctgggcgacctgatgaaacctcatctctactaaaaatacaaaaaattagccgggcgtgggggtgggcgtctataatcccagctactcgggaggctgagacaggagaatcacttgaacccgggaggtggagaatgcagtgagccaagatcgtgccagtgcactccagcctcagtgacagagggagactccttctaaaaaaaaaaaaaaaaaaggaccaggcgcagtggcccacgcctgtaatcccagcactttgggaggccgaggtgggcggatcacctgaggtcaggagttcaagaccagcctggccaacatggtgaaaccccatctctactaaaaatacaaaaattagccaagcgtggtgatgggtgcctgtagtcccagctactcaagaggctgaggtgggagaatctcttgaacccaggaggtggaaattgtagtgagccgagattgcgccactgcactccagcctgggtgacagagcaagactccgtctcaaaaaaaaaaaaaaaaaaaaaattggctaggcatggtggctcacgcctgtaatcccagcactttgggaggccgaggcagatggattggttgaattctcaggaatttgagtccagcctggtctcgaacatggcgagacccaaagtcaggtgatagaaccaaagaactagggaacttctagctcaaaaggcattatgttagttgtgattttttttttttttttttttttttgagacagagttttgttctattgcccaggctggagcgctgtggtgcaatctcgacccactgcaacctctgcctcctgtgttcaagcgattctcccgagtagctgggattacaggcacctgccaccatgcctggctaatttttgtgtctttagtagagacaggatttcacgatgttggctaggctggtctcaaactcctgacctcatgatccacccgccttggcatcccaaagtgctgggattacaggcataagccaccgtgcccagccctttttgtttttttaattacgatttaatactaatttttatttaattttagactttctccagtgggagagacctgtgcatatttcttaaagagcataaccaaatctaacttttaaagttatgattaaaatgacatgttcccatattctcaccaaataggggatgtgaattcccagaaaataacattaagcatatgactcgcagcaaaccatatgcagaacattggctcattgtcatgttgccagggtcttattggaagacaaagtccccagttttaccacacaagaaaagtttccataactcaatcattgaacttgagggctgggggatggtgttggctggaacagggactttttaccagatacagaatgttccatgctcttctttgctgtctcctatttctgagctaacttgatgcttgacctcagagtcaggcttgcctgtggcaagagagatcattttaaccagtgagtaataaagtgcttgaatccgaatgttgtttcttatccctcactctatggaaagtggtcagaatgagctacgtgggcctggactttttcttctacagaaagaaaatctgtcctttcattttagaggataaaatggtccatgtatttgattctctttgactttgatcattgaaaataatcagaaaaagttatggaagtgtggaaccccagcatttgtattatctgatgaaaggatagaatttaaggcttaacacagggtttaaaccccagctgccgagactcagttatacagtctaacataacctctttctgcagcttgggaaaacccctttctcttcttgtccgtggtagtttatatatccttctcttttgacagttaacctttctatatgtttgttatggatattgggagaccacataaaggttaaaacaggagttctggagttagactgttagatgagaaatgggtacattgtatttggaagttaccgttgaccatttaatggagcattttagtagcatgatgaaaattaaaacccaaatatattggattacatggaattgtgggctagaggaaaggtcaagcgaaagtcatgtctgacacattttaattgttttgtaaatatttgttgaccagatgaattaattcattcattaaataggagggaccagtgtgtattttaggctgagggaaaaactctagtaaaatgctagagatagaaaatataaatgaagaaagggaaggatgtgggaaggaaattaacattcagtaagcacccactgtgccagatgctttacataaatattcatttcatatccataacaaaacctgttaggtactattacagagaagttaaattcatataaatgataagagatgattgagataggatcaattctggagtggattgattatcctcatgaaccagttctttcttgaaaactggagtgaagactccaagatgttttgaggcagagaagggggacactcctgagggagcactctggaagccagtgaagtcatttgctggaagttggaaatttagactagagcaccagtttcaaacagctgctgtgtgaatttggtagggatgcagcatgaattctgtctattctcctgtgcacacgtgcatccacctgtgtgcagctgtagctagttactactgtggttactttcaatgaaaaacctactggtttctgtagtgtacatttaagtgcattttttcccctctcccagcatccttctagatagagttccttgaggacagagatcataacttttttttaagtgagattgaatttcaatcaatactgtcactttttttttcttttttgagacagggtctcgctgtgttgcccaggctgatcttgaactcctgtgctcaagtgatcctcctgcctcagcctccccaaatgctgggattacaggcatgagccactgtgtcctgccaatactatcacttttttggtttttttgtttgtctgtttgttttttgagaccaagtcttgctctgtcgcccagcctggagtgcagtggcgtgatctcagctcactgcaacctctgcctcctgggttcaagcaattcttctgcctcagcctcccaagcagctaagactacaggcgtgcaccaccacccccagctaatttttgtatttttactagagtcggggtttcaccatattggccaggctggtctcaaactcctgacctcaggaggcctcggcctcccaaagtgctgggattacaggcatgagccgctgtgctggcctgatttttaagttttagaactcagtgagtcttcaaaccagtgcagatctgtcactataaaaagctgccaccaggcccactcacacctgtaatcttagaactttgggaggctgaggcgggattgcttgagcccagaagtttgagaccagcctggacaacatggtgagaccccatctcttgaaaaaaatttaaaaattagctactgtggccccagctactcggaaggttgaggcaggaagattgcttgagcccgggaggtcaaggctgcagtgagtcgtgtttgtgccattgcactcttgagtgggcaacagagcaagatcctgttcccaaaaaaaagctgccactggggccaggtgcagtgccactcgcctgtagttccagctacttgggaggctgaggcaagagacacaacctctttaaaaaaaaaaaaaaaagctgccaccagtctgtcattttctataaatgcaatcagttgatttttaacagagttttgttttggcaaccaatcagttttacctagtccttatagaccactcctttagctctggccacattcatcagcacaaatgcctgcttttctcctgctgctcaagtctgccttctgaaatgaggttttgttctctagagcttctctttaatgttagcttatttcaaagagtagctgctaatgataaggaagtctaacctccaatctgattcttacagaaaataatgctaaatctccaaaagctagggcaattgcagattattttgtgataaaatatgctgtaaggcagtagaaacaatgtacctgataaaatacacctggagaaagcatggtcttccttctacacagccagaaagaaacccatggtgtcatgtgttcataataccactctgcgtacaatggactaacttaagtacaaaagaagttttaatcatttgaaagggcacagatgtgaatgaaattcaagatgttttaatcccagatcctggggtcaaatcacaacgaattttagaaggtgccagggactgtcagtccaaacttgtatatatgagaaagccctagattttctagtatagtgtgtgattttcatcctgaatttattttatgttggggtgccattccaagatcctggatgtaaagaaacatgattagggggctaccacatttcagatccaaagcaagtagaatacatcagttaccagttttttcttatagtatcagcttcaaagattcatatactgagccaggcacagaggcttatgcctgtaatcccagcattttgggaggtcaaggcaggcggatcacttaaggtcaggagtttgagaccagcctgagcaacatggtgaaaccctgtctctactaaaaatacaaaaactagcagggtgtagtggtgcctacctgtaatcccagctactcagggggttgaggcaggagaatcgcttgaagccgggaggtgaaggttgcagtgagccgagattgcgccactgcactccatcgtgggtgatagagccagactccgtctccaaaaacaaaacaaaacaaaacaaaaagattcatgtgttctattcagttaaatggtaaagataataacactttcattccagtcacacaggataactagatccttttttactaggttaaatatgtgtttattttcagttagcacctgttcatttacttattctggattaataaagggctgaaaggctgtagatattaatgagtcagcatgatggcctttggcttcttcagaaagattgcatgataaactcccccacccttttccgagcagtctaccttactaggaaaggcagtttcatgtggagggcaatctgtcatttttgaataagggcaagagtctgaggtccattctgagtcactatgaatagagctctagtattggttggtccccagggaaactggtggttaaatactgtgagaatctttatcagacaggaaatgacaactcattaaaatactagccgttaagcctgtttagatcactgcctagggggtaggaaggaaaatttaactctataatgtttgactaaaatgtgcacatttctgaagatggagaattatttacaagactgttaccgagaaagggaattgctaggctgtcttgttgctgatcttctcccacaccctcttttcctcttttgtacatataacagatcagcttgtaatgggagtaggatagggaagggctttaatttcattcctgaaagtgtatcctactattgccttaaatgtaaaattcagtctcttcagcagaagaggcggttgttggcttcagttagaacaggatcattttctatataggagtctactcctgtgctcctgggccaaatctcaattgatagaactctctggggtcagaggataaatttgatgtattgatttacatacagtggtcctcattcaatcaagaaaattctaaagatcctgatattcatttagaacataattaaattttataactctgggcacaggttttcagtctcctgaagttgggctatccagatttggtgggggcggggacaggggctagctctgttgcccaggctggagcaacatctgcctcccaggcccaagtgatcctcccacctcctgtcgcatgccagcatgctcagccaatttttaaattttttgtagagaggaggtctcactatattgcccaggctggtcttgaactcataggctcaagtgatcctcccaccttggcctcccaaagtgctgggattacagtgagccaccaagctgagcactcttttctttttataagtaccctgacctgaatcttctcctgaaaaaatttttttttcatttataagctttcagggatctgacttatgacaccctgagattctttagactttgtgattaatcatcagagggaatactaacccagcacaaacaatgaaataaaggtaaaaaactgttgtgcccagacttttttctaagacaaaaggcttattactctttgtaaagaggctatcgcctccttactagaatttatgtcagaatgtttttcaggagggtaaatataacctatatgctcacattaatgctgagatcctcaaaaaagtatttgagaaaggagcagagcctatattaaataaaaaatttactttattaatgctggtaaaatattcttaggcttagagacttcaactgcttagactttaagtatacactctgtaaatagggctaaacaaggtgaatcaatcttttttgttggtgttttaagaaacaggttctccctctgtagcccaggctggagtgtagtggtgtgattttagatcactacagcctcaacctcctaggagggctcaagcagtcctccccactcagcctcttgagtaactaggactacaggtgtgcaccacacctggttaattttctgtgtgggtgtagagacaggagtcttactgtgttgcccaagctgatcttgaactcttagactcaagcagtcctcccacctcagcctcccaaagtgctcggattactggcatgagccaccctatcctgcctggccagatttcagatcttacttatttattatctatctatctaatctattgatttattgagagagagacagggtcttgctctttcaccaagggtggagtgcagtggttcaatcctagcttactttaaccttgaactcctaggctcacaggatcctcccatctcagcctcttgaatagctaggactacaggcacttgccatcacacccagctacttttttaaacttttgtagagacagggttctcactatgttgcccaggctgatctcaaactcttggcctcaagtcctcctgcctcagtctcccaaagtgctgggattacaagcatgacccatcacacccagcctaaaatacagatttcttgtcacataagtgatttccagaagcagagtaacatatatattaaaaaccatagaaaaataatagattttgtttgcaatttggcaagggctcttggcagaattttgcccaaatgttattttgaatggattttttttttttttttttttacaatatttaagcttgccaagaagtttgtcttaggtctgtttaacagattctaggtatgtaagcatgggaaaatattgttcccatgaaaccaattttgagctctgagtaggtttcaagtctgtgtttttttctttaaataaaaaaaaaaattttatttgcattcctgagtttttttttttaacagaagttaacaataacaaaagtgtaaaaattgccactagcatcatttgttggaaatgtgtttgtttgtttcggagacaggatctcactattttacccaggctggaatgcagtggctattcacaggcgtgattatagctcactaagcctccatcccaactcctgggctcaagagagcctcctgctcagcctccagattagctgggactacaggcatgcgccaccatgcctggtggaaaaattttttttaatcttacatttgctgttatgtttgtgccaggaataaaaatatgaagatactactacccactaagatttttctacccactgtgttcaaggttcacagcaaggaaaagcaaatgagatcaacttttttttttttttttttttttttgtcacctagactggagtgcaatctcagctcattgcagcctccactacccaggttcaagcaattctcatgcctcagcctcccgagtagctgggactacaggcacgtgccatcacacctggctaatttttttatatttttagtagagacaggatttcgccatgttgcccaggctggtctcgaactcctgagccatggtgcccaacctacttctttttttgtttttctaaggctttctcacctagagcaagtacctacttacatagctagtttaggtatattttagtcctgcagttgactgaaaaaatagttctatgtccatttgttctccttctactttatgttcttctatgtcacaaaattgtagttatttgttttgttttgttttgttttgttttgttttgagacagagtctcgctctgtcgcccaggctggagtgcagtggcacaatctcggctcactgcacccttcgcctcccgggttcaagcgattctccttcctcagcctcccgagtagctgggattatgggcgcccaccaccgtgcctggcaatattttttttttttttttttttttgtatttttagtagagacagggtttcaccatgttggctaggctggtctcgaactcctgacctcaggtgatctgcccacctcggcctcccaaagtgctgtgattacaggcatgaaccaccacgcccggccgaaatggtaattctttgaatttaatcagagcttaagggcaaattggaggacttccccaacttaactatgggatgagattagcatctttagcaaggtgcacagggttgcaagaatgtaatggcttagggagaatggcatttagggtatttcctaaaccaactatagaaagcctttgaactgtgttgcaaattattactcccaccgtgtgtgcactttaaattaatcttaagtgtcagaatggactcttgcttctggtctgctgcttgagaataacttgacacatgagatttagagctggcattattgtttgccttaaatgcatgttaagagtgagagctgtaatttctatttttatctagtccgttactaaaatagctttagtgataattaagcaaactatagtataagagtactttgttgaagctgaggcatcagtagcctaagtcattgtagaggtagagaaatgaaaaacagaagtaactaaaattttgatgacagtttgggaaaccaaggtgggaggatcttttgaggccaggaatttgagacccacctgggcaacatagtgagactccatctctacaaaatataaaaagaaacataataataataataaataaaacttttaacctcttgtctgttttcaactgttttcctagtctttcatggaaacctccatagagacacataacaaattggtatattaatctcagcattatcctcaagataagttatacatcatgtgaatacacatcatatgatgtactctatcagctaaaatgtatctatcagctaaagtgtatctctttttaaaattattatgggtacataaagtgtatctcttaatggacttacaatggtaaattatttaccttttcaaattattttgaagggaatctagaattattatttccagtcccttcctcatttccctaaacaacaaaaacatactctttgtaacgtttgggtcttggttcttaattttctcttaaataatggcttgactatggctatccctggtagatttaaatgacaatttacagtactgttttttatttttgtttttgttttgttttgagacggagtttccctctttttccccaggctggaggacaatggcgcactgcaacctccacctcccaggttcaagcgattctcctgcctcagccccccgagtagctgggattacaggcgcccgccaccaaacctggcttattttttgtatttttagtagagacggggtttcaccatgttggccaggctggtctcgaactcctgacctcaagtgatccgcctgccttagcctcccaaaatgctgggattacaggcatgaaccaccgcacccagccttgtttttgtttttgtttttgtttgagatggagtctcactctgttgcccagggtagagtgcaatggcatgatctcagctcactgcaacctccgcctcccaggttcaagcggatcctcctgcctcagcccccactagtagctgagattacaggcatgtgccaccgtgcctggctacttttgttttttgggggggttttttgtttttttggtttttttattttgagacggagtctagcttagctgcccaggctggagtggagtggtgcgatctaggctcactgcaaccaccatctcccgggttcaagcgattgtcccatctcagcctcccaagtagctgagattacagacacctgccaccatgcccagctaatttttttttttttttttgagacggagtcttgctgagctgcccaggctggagtggagtggtgcgatctgggctcactgcaaccaccatctcctgggttcaagtgattctcccatctcagcctcttgagtagctgggattgcaggcactctccatcatgcccggctaatttttgtattttagtagagatggagtttcaccatgttggccaggctggtcttgaactcctgacctcaggtgatccacctgcctcggcctcccaaagtgctaggattacaggtgtgaaccaccgaggctggtctaatttttgtctttttggtagagacagggtttcgccatgttggccaggctggtcttgaactcctgacctcaggtgatccacctgcctcggcctcccaaagtgctaggattacaggcgtgaaccaccatggctggcctaatttttgtctttttggtagagacagggtttcaccatgttggccaggctgttttgtttttttgcttttttgtttgtttttttttttgagacggagtctcactctgtcgcccaggctggagtgcaatggcgtggtctcagctcactgcaacctccacttcctgggttcaagcgattcttcggcctcagcctcccgagtagctgggattacaggcgtgtgccaccacacccagctaatttttgtatttttagtagagacagggtttcactgtgttggccaggctggtctcgaactcctgacctcgtgatctgcccacctcagcctcccctggtgctgggatcacaggtgtgagccactgcacctggccagagtactgttaaagtgaaaacattgatttatgagaaggaaagttcttataaatatgcagttttttgttttttttttttttgagacagagtttcactctcgttgcccaggctggagtgcaatggcatgatctcggctcactgcaacctctgcctcccaggttcaagcgattctcctgcctcagcctcactagtagtggggattctgtgcatgtgccaccacgcctggctaattttgtatttttagtagagacgggttttctccatattggtcaggctggtctcgaactcccgacctcaggtgatccgcccgcctcggcctcccaaagtgctgggattacaggcatgagccactgctcccggccacataaatttgcagttttcaaagtcaacctttttgtgcatatatttatatacacaaaaatacatatatttaattatatatatttaatatattaaatatttaaaatattttatatatttgttatattcatgtcatttatttctagtctaaatggatgagctatttgcattcccacctgtaatatataaggaaagattactagtctgcctccctaatataagtctgcttaaaagtcagggccaggagcggtggctcagtgagaggctagtctgaaggtaatgagttttctcgattgttcacagcatcttttatgtctgtcacaggtcttctagtctgatcagtgcagtattcacatttattatatatgtctgttcaggccttttgtacctccttcagtattcattaaagaatcttttttttatttttttatttttatttttatttatttatttatttttttgaggcagggtctctgtcaccgaggctggagtacagtgcagccctgagcttcctgggctctcactgtagcctcctgagtagcagggactacaggcacatgccaccattctcagctcatttttgtattttttgtagagacagggtttcaccatgtttcccaggatggtattgaactcctgggctcaagccatcctcccatcttggcctcccaaagtgctgggattacaagcgtgagccaccacacatggcctagaggacctttttaacaacttcacccctcactgatctctcttttctccctccaattccttcggtatatatcttctgtaccaaaaactttaatattgaattgtaaattattttgttcacagatcagttcgtgtgtgtgtgtgcgcacacatgtgtgcgcatctgcctatgttttgaatccaaatccccataaatgattttaagttccttgtgggcagtttggtttttttttttttttggcttttttcccagcaaaaggaatcaattaagtatttggtgactgatagataaaaaggattaaagaaaagaatcagccagaagttagggatatgttagcatctgataaaatataatagcaaaaactcttctattcctgctttttgttataaaaagcagcaaggaattgttctagaaaagaagtgaaggccagtcgcggtggctcacacctgtaatcccagcactttgggaggccgaggaagggggatcacgaggtcaggagttcaagaccagcctggcaaagatggtgaaaccccatctctactaaaaatacaaaaaaaaatagccaggcatggtgacaagcgcctgtaatcccagctacttgggaggctgaggcaggagaatcacttgaaccctggaggtagaggttgcagtgagccgagatcaggccattgcactccagcctgggggacagagtgagactctgtctcaaaaaaaaaaaagtgaagtgaagtgaatttgagtcagtgtacttaataggacaagcattaggcagtgttgcaagtacatatcggaatctctttggctggctctaagaaagagtttgaacttatttacctccttagccctatgtaacaggtaagaaactaaaaggtacagaaaatagagatgtttgatttttctaagttgccccaagctaccgtttttaaaaacgcctgcaagcatgtctaaaacaggagcctgttagctacagttgccaaaccggtttaacagcactgcctccatgtattctgggtaagaaggagctccgagtacataaatttatcaaagatcactatcccaatcatctcagaacaagctgttactaatgtactggagtttctgtgcaaactgtctaccataaaccatgaaaggattcaaagttcatagttccttctttgttcctttgttaatcactgacttctgactagtgggaggtgcctcccaagtttgctaatgcattctttttggataaggatgacgcacagattgtcctaataaggacttagattgagaaagaccgccccctctgagaagaggggacaagtcagagagagggcgggcagtttcttttttaactagggatgacacaagcataagtcatttccttattaattggttcaaaccagttcttacaggaactagtggtgataaatgtgggacttctgagaagtcattcattttattctttgtgccataccagagtacagtatcagctgagctgaccttactctgaggactaactcttttgctggaagcggtttctgatttacagctcttggtttctcccagacatgttggtgggagagattttggtttttaaggggttgttagatggagtaaattttctttttttttttttttttttttaactaaaaaggggtcacagaatttcagcagttctctgatttttatattttattcctcttcctatccaatccctgccttttgagtccaggtggtaagtacattttctttaacgtttttcctgcttttcttcccaaatgtgtctttttctttgggctactgtaccctgcttccagtgctgtccccggcataggtccatctctgcagaagccatttcaggagtacctggaggctcaacggcagaagcttcaccacaaaagcgaaatgggcacaccacaggtaagactttaatccggtttcttctcccctctgggaagtttcgggctgaaattacattcacagctctcactcacatttttaggcaaataagtgaagttggtttgccagtgttccttgacagaagttgagcgtctgtgtatgctctactgggaaatttgtctttgtcttagactagaaagtgtaacttctgtacatcttctcctaaaaacaagggtagagccaatggaaagtaatggttctgttacatagaatgagttgttgccttgatcttaaatgatgtattggtagatatacttcccaagtggattaaaaagttaaaacttacagcataacaaagtattagacttactgaggtgacttgaatatctccttttgattttcactctatttttcttttcacccatgggaaaatgataattttttaataaaccaaggctcttaccatagctgaactttaaaacttagactgtcttttctgtaaacgattctgaggcaaagggaaatgactagaagaggatgagtaaacaataacctgaaatgggaaactcgagggaagcacaggttttttttgttttgttttgtttggttcgttttttgttctttggggtttttttgagacagaatttcgctctcgttgcccaagttggagtgcaatggcgcgatcttggctcactgcaacctccgcctcccgggttcaagcgattctcctgcctcagcctcccaagtagctgtgattccaggcacgtgccaccacaccagctaattttttgtattttaatagaaacagggtttcaccgtgttagccaggctggtctcaaactgacctcagatgatccgcccgccttggcctcccaaagtgctgggattacagatgtgagccaccgcgcccggccagagcactgttttttttaatggccttgcactcttcttatggacctttgctgccctcagttgaccaaacatgacatcagaaacagatacatttgtgtgttttaaaaacagctcctaatactggaacaaaaatatttaactgtcttgacaatactcatgagtatctgcatggcgacttcagagttgagtttaatcaaagagtttattcttaggtcctagtagaagagctaacctcacactcatcccattctaaactatgtgattcaacactgattttacatccaacaaagtgaaatcttgatagttgggtgtaaaaaggagagtaatggagatttcagagtagttggggttgcttacttttcatttttaattctttaggttttgtaagttacacacttcaagcattatagatgatcctctttttactactgaactaatgaagcctttttcattgcattgttctgcatttatttctacagggagaaaactggttgtcctggatgtttgaaaagttggtcgttgtcatggtgtgttacttcatcctatctatcattaactccatggcacaaagttatgccaaacgaatccagcagcggttgaactcagaggagaaaactaaataagtagagaaagttttaaactgcagaaattggagtggatgggttctgccttaaattgggaggactccaagccgggaaggaaaattcccttttccaacctgtatcaatttttacaacttttttcctgaaagcagtttagtccatactttgcactgacatactttttccttctgtgctaaggtaaggtatccaccctcgatgcaatccaccttgtgttttcttagggtggaatgtgatgttcagcagcaaacttgcaacagactggccttctgtttgttactttcaaaaggcccacatgatacaattagagaattcccaccgcacaaaaaaagttcctaagtatgttaaatatgtcaagctttttaggcttgtcacaaatgattgctttgttttcctaagtcatcaaaatgtatataaattatctagattggataacagtcttgcatgtttatcatgttacaatttaatattccatcctgcccaacccttcctctcccatcctcaaaaaagggccattttatgatgcattgcacaccctctggggaaattgatctttaaattttgagacagtataaggaaaatctggttggtgtcttacaagtgagctgacaccattttttattctgtgtatttagaatgaagtcttgaaaaaaactttataaagacatctttaatcattccaaaattgtgtccgttttcttgagcgttttgattttttacttttagcttataccagctgaatggcagccttgcctaatccacctacaacaagaatttcttaagctttcttttatttgcatgagagagccactaccaaggcatgttttgttatgctgaaactgggctgctgcatactgctaaatggcacctctgggattggcctacctggggatttcttggtttgtgaaaacaggagaggagaaatatctcatacaagtgaaaggatactggagagagaaattacccatttctaaaaaaaaaccacactctgtcgtatctgtgttaatgttttctagcatgtactctggtttcaacagacacaaatttatatgttaacccagttttcttgccgttctgtaagtgttttattcttagtgtgatttttttccattgggatgtttttgattgaacttgttcattttgttttgcttgggaggaaaataaacaattttacttttttcctttaggagcattatgagcattatgtcagaatagaatagaattggggttcgatcttaacaggccagaaatgcctgggtttttttggtttgtttttgtttttgtttttttatcaaatcctgcctgactgtctgcttgttttgcctaccatcgtgacatctccatggctgtaccaccttgtcgggtagcttatcagactgatgttgactgttgaatctcatggcaacaccagtcgatgggctgtctgacattttggtatctttcatctgaccatccatatccaatgttctcatttaaacattacccagcatcattgtttataatcagaaactctggtccttctgtctggtggcacttagagtcttttgtgccataatgcagcagtatggagggaggattttatggagaaatggggatagtcttcatgaccacaaataaataaaggaaaactaagctgcattgtgggttttgaaaaggttattatacttcttaacaattctttttttcagggacttttctagctgtatgactgttacttgaccttctttgaaaagcattcccaaaatgctctattttagatagattaacattaaccaacataattttttttagatcgagtcagcataaatttctaagtcagcctctagtcgtggttcatctctttcacctgcattttatttggtgtttgtctgaagaaaggaaagaggaaagcaaatacgaattgtactatttgtaccaaatctttgggattcattggcaaataatttcagtgtggtgtattattaaatagaaaaaaaaaattttgtttcctaggttgaaggtctaattgatacgtttgacttatgatgaccatttatgcactttcaaatgaatttgctttcaaaataaatgaagagcagctgtccttctttcctcttttaagtgttcagctgtggcatgctcagaggttcctgctggattccagctggagcggtgtgatacccttctttttcagctgttcgtgccttcctttcttgtatccaccaaagtggagacaaatacatgatctcaaagatacacagtacctacttaattccagctgatgggagaccaaagaatttgcaagtggatggtttggtatcactgtaaataaaaagagggcctgggaattcttgcgattccatctctactttgtataagtctcattttgtgccttacacatctgcagtatttatcatgttccaacttggtgactgtcaggcagtgcaatacatcagcagtttatcaccgaagagctgaggaatacctcccttaaaacagacaatgtcggccgggcgcggtggctcacacctgtaatcccagcactttgggaggccaaggcgggcagatcacctgaggtcaggagtttgagaccagcctggccaacatggcgaaaccccatctctactaaaaatataaaaaattagccgggcgtggtggtgcacgcctgtaatcccagctattcaggaggctgaggcaggagaatcccttgaacgcaggaagcagagtttgcagtgagccgagatggcgccactgcactccagcctgggtgacagagcaagacaaaaaaaataacagatgatgtcatatgaaaatgtgcaatgtccagttttcccatagttttctgtattctctgtgtgcataatctggagtatgagtctgggaagaaaaaggtttttagtttcatttggatagtggccacctctccattccctacgaatgctagaatgaagttactttttttttttttttttttttttttgagacagagtcttgctccgtcgcccaggctagagtgcaatggtacaatctcggctcactgccacttccgcctcccaggttcaagcgattgtcctgcctcagcctctggagtagttgggattccaggcgcccaccaccacaccaggctagtttttgtatttttagtagagacggggtttggccatgttggtcaggctggtctcgaactcctgacctgaggtgatccacctgcctcggtctcccaaagttctgggttcacagacgtgagccaccatgcccacgtagaatgaagtttcttaaatacgctagttaattattgaaacatatgcagtattgagtgctcctacacaaacacgctcagcctctgcccccagtgtgctctgtgctatccacagccttagtagaacatgaggctttttgtcatttcaccagtcattcaataatgactcatttgagtatggatcatgcactagctaaataaccagttgcgctcatgtaccctgaagcaaattgtttagcctgacccatgtgtaagaagatcacagagattcccaacctttcagtgtcaaaaagcctttccatatatattactttaaaacccattttcccccatgtgtaatagtctatgttaatgacggttcgggtttcttctacattgtttgtgacctgagaaagtttaaaagagcctcagtttctttcatctataaaaataaaagagatagaaggacagtttacctaaggaataaatctggtaacatgtaaagtactgaaataggctgggtgcagtggctcatgcttataatcctaatactttgggaggccaaggcaggaggatcccttttaggccaagagttcaataaatagggccgggcatggtggctcacgcctgtaatcccagcactttgggaggccaaggtgggcagatcacctgagttcgagaccagcctaaccaacatggcgaaatcacatctctactaaaaatacaaaaatgtagcaggcacggtggcacatgcctgtaatcccagctactcgggaggctgaggcaggaatcgcttgaacccaggaggcagaggttgcagtgagccgagatcttgccattgcactccagcctgggcaacaagagtgaaactccgtctcaaaacaaacaaacaaaaaagagttcagtaaaagtacagcaataaaagttatccacctccaccaccccagctttttttttttttttttttttttttgagagtgaggttttactgtgtcacccaggctggagtgtggtggcacagtcatggctctttacagccttgacctcccaggctcaagaaattctcctacctcagcctccctggcaaggaccagcatgaaccaccatacctgggtaattttttaattttttgtaaagacagggtctcaatattttgcccaggccagtcttgaattcccaggctcgagcgatcctgccgtggcctcccaaagtgctgggatgacaggtgtgagccaccatgctgggcattcccaatgaaagactgaggccaggcacagtggctcacgcctgtcatcccagccttttgggaggccaagacaggatcacttgaggtcaggagttcaagaccagcctggccagcatggtgaaaccctatctctactaaaaatacaaaaattagccaggcgtggtggcgtatgcctgtaatctcagctactcgggaaacaggcaggagagtcacttgaacccggaaggcagacgttgcagtgacctgagatcgtgccactgcactccagcctgggcaacagagcaagacaccatctcgcaaaaaaaaaaaaaaaaaaaaaaaaaagtgagcatctgatacacatgcaagaatttcacaacattgcattcactcctccagaaacaaagatatattttaaaatgctttcttagcatatgtgctctggttttctagcagatactctgtcaaacttttgataagtgaaaaatttaccgaagaatttaaaaccaaaaacagttttttaactttcccacctgaaaatattgaccattttctaatttattttcattataaagaatattggttatcatggttgctcatgcctgtaattctagcactttggtaggccaaggcaggcaaatcactcctgagcccaggagttcgagaccagcctggacaacataatgagacctccctacaaaatatttaaaagttagccaagtgtgacagtatgtgcctatagtcccaggctgaggtggatcacctcattagtgagccgtgattgtgtcactgcactccagcctgagtgacacagaccctgcctcaaaaaatatatatataaatactaaaacatctggaaggaaagaggagaaaagggagtatcagcttttaatacttgttacaaggtcagtctagaaaatacagtgagatttgctgggtaaataggttttgaaccatgaaaaaattgatggcatgcaagatcttcctcaatagacctaagagtctcatttctattaaaaaatacaaacaactgcttcattttattcataaataattttttgaggtgctacaaaaaattaaaactaagcaggagtttaaagtttttgaaaagccaagtaacattttatctctaacatttattgaatcctctccagtatttacacaacgtaaatgagatactacacacaaaacccttgtgtctgaaggtaaatttatttattctcaaagacaacaagaagagaaagcacatcatgtattttaaactttagaagcaactgagtcattagtgtctggtggacaggagctagggatcctatcccttcccaacaaggccaagagttcacctgaggtaatgcatttgccttgggggcgaggccttgaattgcagcaaataacctgtgtgtatttgcatatttaaccagtactcttaagaaggattatacaaaaacctgttccagacagctgcttactcattgcctttaaaattgcgtggtgctgggattggcaggtgccaactgtttgctcattctctttgacccactagccttgcagtttgctgtgtgggtgttgatactcctaaattaaagcagggaaggggtggttttagatggcttttaacacctgctctccacccaagcaccctggattcatttgatatctggattctaattctgtagtcaggagactggcccaaactgtggcccagagagaagtgagtcagttgcaagtggctagctgactctatgggaacagaaataaaatgcagcttagagagtttgtcagccaaatccacaaatgtgtggctttttgaaacattggacatctgttcctcttaatttaaaataaactttttttttttttttttttaagcacaaagttgcttggctccttgtttctttgtgtcagcagcagttgctgctctaatttaggaaccctaggatctgatttaggacatttggaatctttaaggcacattcgatctagaaagtggaactgaattgctttgggaaggcaagaggatgattttacagtatagggtttgtgtggaaatccccttcagcagtaatcaacccaggtgtccaacctgtttgttaaccatttccaaatgactcagaggacctagagggagggcttgaacacactccagcactgtttctacaatttagcctttatttgcattggaaaccacattcctgaattcttgagggggcaggctctggcttattctgggcaactgacttcaagtgggacccctgagctacctatgtaagcaaagagtcagccatctctggagagttaccagggaggaggatctttctgtgaacttgctttgatgacctccacccaaagccctttgaggaacagttttgtttattcaaggagcccttggcaggtcactcctcccctaccacaaatctaatccaaatgcgacattttcctttgaggccatctatcccttttgggggacaaaacacatcagcttttcccttcagaccacttttgactgaagcagtgatcaacattgcttaattgtgttccagtctgtttccagcggggaaaaaatgctttaggggagtgaggcagttagggatttgaaaacagggatggtgccgcctgaaggtggggaatgacttagatcactgtcttcctttggctcctcaccatgttgtgtggaggaaacgaaaagcagctcaagttcactcctcttggcagtagtgcagaagcctggcttgccacggccctggagaaccatgtttttcccaacttttttttttttcttttgagacggagtttcactcttgttgccgaggctggagtgcagtggcgcaatctcggctcactgcagcctccgccttccaggttcaaagcgattctcctgcctcagcctctcaagtagctgggattacaggtgcatgccaccacactcggctaattttttgtatttttttcagtagatacggggtttcatcatgttggccaggctggtctcgaactcctaacctcaggtgatccacccgcctcggcctcccaaagtgctgggattacaagcatgaaccaccatgcccagccttttttttttttttttttttttttaatacagaacacaaatttgagtgtcattcttgtgcaggggccatgctaatcttctgtatattgttccaattttggtgtatgtgctgccaaagcaagcacccagcttcttttcattagttaagaagatgaaggccaagactaaggcagggaggcctttctctgcctttcactctttagtgcacctcacagtcagttgcacttgagtaaggactgctaaacctctctgagagctgccagatgttcctgcctagcctcaggttgttggttcttcagacacctcttcattctgcccattgcaccagccctttcccatctccatgttccctccatggtaatttctttgtacacaacaaccacacggagcaccagcaatcaagattagctcccgggaactctggcgtgccctgtaccaggaagcacagtggattactacaacttttgataatgattgtttgctttgtaccaggcattattttcagggctgtttcacatgtgttgtacttaacaaccccatgaggaaattaaggcagggtggttcagtaatttgtcaagggaaacaaggaagtagagcaggcagcagaggcgttctggctctgaactactctgttctgtagaaatcagtgcaaaagtccaagcttcagcatacttgtttcatcttgtgatcacaggtagttttttttgttttttttttgttgttgttgttgttgtttatttgtttgttttgagatggagtctcgctgtcgcccaggctggagtgcagtggggcgatctccgctcactgcaggctccgcctcccgggttcaagccattctcctgcctcagcctcccgagtagctgggactacaggcgcccgccacctcgcccagctaattttttgtatttttagtagagacggggtttcaccgtgttagccaggatggtctcaatcgcctgacctcgtgatccgcccgcctcggcctcccaaagtgctgagattacaggtgtgagccaccgcgcccggccctgatcacaggtagttgatggagaaaggaagataacagaaaatcaaggccacaacctcaaattttgctatttaaatagataagcagactttactcttccctgtatcacagggttggaaaagcaagctccattcttagccatccatgtgggcagattcccagagtggtgtttgctataattatgatttaaaagcaaggttttttgtttgtttgttttaaggagatggggtctcccatgttacccaggccgaactccaactcctgggctcaagtcatcctcccgcctcagcctcccgagtagctgggactacaggcactcaccaccacacttgggtaaaagtaatttctatttctacagcctttttttatttttcaaagtattttaatgtcttgagtttgggttttgttttgagacagggtttcactctgttgcccaagctgaagtacagtggcgcaatcacagccacagctgactgcaacctccacctcccaggctcaagcaatcctcccgccacagccgccccactccccaccagtagctgggactacagagctgcaccaccacacccagctaatttctgtagtttttttttttagtagagacagggtttcaccacgttgaccacgctggttttaaactcctgagctcaatcaatccacctgcctcggcctcccaaagtgctggaattacaggtgtgagccactgcactcggctaggaaacccttttctgatctttccttgtcagcaatgatctcttcacacttcctttcttacggccctcacctcactctgtattatagttatctgcatatatgaataaaatccctaagaagactgcagggtcctggagggaggagatctgtatcgacaactttgtctcttcttcacagcaccttacaccagtggggatttaaaaagtgaatacagggctgggcaccgtggcttatgcctataatcctagcactttaagaggatgaggtgggaggatcacctgtcgccaggagttcaagaccagcctggcccaacatggcaaaaccctgtctctactaaaaatacaaaagttcgctgggcgtagtgatgcatgtctgtaatcccagctacttgggaggctgaggcatgaggattgcttgaacccgggaggcagaggttgcagtgagccaaggttgcaccactgcactccagcctggttgaccaggtgacaaagtgagaccctgtctcaaaaaaacaaaacaaaagtttcctgaggggagtagtatttgaattgacaaggtagagggagtgaaacgaaaggtattctaaccagaaaaaaactcagacaccaggaaagaacaaataaggggctatgtgtagggtggggagaaagacagcatcaggttttccactcgagtcctctgtagctctgccttagctcgctgtttagtttccttaaagtaccgaccaaattcacaactagtttgtctattttcttgctagtgcttgcgacactagaacataagcccggtgaaaggaaaataaatcttgggaccccaaaatcactaagccaaagaaaagtcaagctgggaactgcttagggcaaacctgccccccattctattccttaaaaagatagctactaagatttttttttttaaaaaaactgcatactggggctgggcgcggtggctcatgcctgtaatcccagcactttgggaggccaagcaggcagatcacaaggtcaggagattgggaccatcctggctaatacggtgaaaccctgtctctactaaaaatgcaaaaacttagctgggtgcagtggcggatgcctgtagtcccagctactcaggaggatgaggccggagaatggcatgaacccaggaggcacaggttgcagtgagctgagatagtgccactgcagtccggcctgggcgaaagagcgagactccgtctcaaaaaaaaaaaaaacaactgcataccggccgggcgtggtggctcacgcctgtaatcccaacactggcaggcagagacgggcggatcacctgaggtcaggagtttgagaccagcctggccaacatggtgaaaacccgtctctactaaaaatacaaaaattagccaggggttgtggcgggtgcctgtagtcccagctactcgaggctgaggcaggcgaattgcttgaacctggcaggcagaggttgcagtgagccgagatagagccactgcactatagcctgggtgacagagggagactatctcccccccccaaaaaaaaaagaaagaaaagaaaaagaaaaaaatgagaaagagagagagagagagagaaaaaaaaagcattagaaaaacaatgggtgaccggggtggtagctcatgcctgtaatcctagcattttgggaggcagaggctggtggatcacctgaactcaggagttcaagaccagcctgaccaacatggtgaaaccccgactctactaaaaatacgaaaaattgggccgggtgcagtggctcacgcttgtaatcccagcacattgggagaccaagacgtgcagatcacctgaagtcaggagttcgagaccagcctgaccaacatggagaaaccccatctccactaaaaatacaaaattagccaggcatggtggcacatgcctgtaatcccagctacttgggaggctgaggcaggagaattgcttgaacctgggaggcagaggttgtggtgagccgagatcgtgccattgcaccgtagcctgggcaacaagagcgaaactctgtctcaaaaaaaataaaaataaaaaaatagctgggcaggttgaaactctactgtaggtccagctacttggggggttgagatgggaggatcatttgaaccccgggaggcagaggttgcagtgagccgagattgcg

SEQ ID NO: 2893 - DNA, 2782 bp, Homo sapiens
ggcccgcactaagagcctaactgaaatcccgcgaggatcaaccgagctcgccgaaaggagggaggaacgtatcccttctggaggctgtctcagggggcagagggaccggaccggaagtgacgtgagcgggttccggttgtctggagcccagcggcgggtgtgagagtccgtaaggagcagcttccaggatcctgagatccggagcagccggggtcggagcggctcctcaagagttactgatctatgaaatggcagagaatggaaaaaattgtgaccagagacgtgtagcaatgaacaaggaacatcataatggaaatttcacagacccctcttcagtgaatgaaaagaagaggagggagcgggaagaaaggcagaatattgtcctgtggagacagccgctcattaccttgcagtatttttctctggaaatccttgtaatcttgaaggaatggacctcaaatatgtgcaacgtatagagaaacagtttcttttgtatgcctactggataggcttaggaattttgtcttctgttgggcttggaacagggctgcacacctttctgctttatctgggtccacatatagcctcagttacattagctgcttatgaatgcaattcagttaattttcccgaaccaccctatcctgatcagattatttgtccagatgaagagggcactgaaggaaccatttctttgtggagtatcatctcaaaagttaggattgaagcctgcatgtggggtatcggtacagcaatcggagagctgcctccatatttcatggccagagcagctcgcctctcaggtgctgaaccagatgatgaagagtatcaggaatttgaagagatgctggaacatgcagagtctgcacaagactttgcctcccgggccaaactggcagttcaaaaactagtacagaaagttggattttttggaattttggcctgtgcttcaattccaaatcctttatttgatctggctggaataacgtgtggacactttctggtacctttttggaccttctttggtgcaaccctaattggaaaagcaataataaaaatgcatatccagaaaatttttgttataataacattcagcaagcacatagtggagcaaatggtggctttcattggtgctgtccccggcataggtccatctctgcagaagccatttcaggagtacctggaggctcaacggcagaagcttcaccacaaaagcgaaatgggcacaccacagggagaaaactggttgtcctggatgtttgaaaagttggtcgttgtcatggtgtgttacttcatcctatctatcattaactccatggcacaaagttatgccaaacgaatccagcagcggttgaactcagaggagaaaactaaataagtagagaaagttttaaactgcagaaattggagtggatgggttctgccttaaattgggaggactccaagccgggaaggaaaattcccttttccaacctgtatcaatttttacaacttttttcctgaaagcagtttagtccatactttgcactgacatactttttccttctgtgctaaggtaaggtatccaccctcgatgcaatccaccttgtgttttcttagggtggaatgtgatgttcagcagcaaacttgcaacagactggccttctgtttgttactttcaaaaggcccacatgatacaattagagaattcccaccgcacaaaaaaagttcctaagtatgttaaatatgtcaagctttttaggcttgtcacaaatgattgctttgttttcctaagtcatcaaaatgtatataaattatctagattggataacagtcttgcatgtttatcatgttacaatttaatattccatcctgcccaacccttcctctcccatcctcaaaaaagggccattttatgatgcattgcacaccctctggggaaattgatctttaaattttgagacagtataaggaaaatctggttggtgtcttacaagtgagctgacaccattttttattctgtgtatttagaatgaagtcttgaaaaaaactttataaagacatctttaatcattccaaaattgtgtccgttttcttgagcgttttgattttttacttttagcttataccagctgaatggcagccttgcctaatccacctacaacaagaatttcttaagctttcttttatttgcatgagagagccactaccaaggcatgttttgttatgctgaaactgggctgctgcatactgctaaatggcacctctgggattggcctacctggggatttcttggtttgtgaaaacaggagaggagaaatatctcatacaagtgaaaggatactggagagagaaattacccatttctaaaaaaaaaccacactctgtcgtatctgtgttaatgttttctagcatgtactctggtttcaacagacacaaatttatatgttaacccagttttcttgccgttctgtaagtgttttattcttagtgtgatttttttccattgggatgtttttgattgaacttgttcattttgttttgcttgggaggaaaataaacaattttacttttttcctttaggagcattatgagcattatgtcagaatagaatagaattggggttcgatcttaacaggccagaaatgcctgggtttttttggtttgtttttgtttttgtttttttatcaaatcctgcctgactgtctgcttgttttgcctaccatcgtgacatctccatggctgtaccaccttgtcgggtagcttatcagactgatgttgactgttgaatctcatggcaaca

SEQ ID NO: 2894 - protein, 309 aa, Homo sapiens
MDLKYVQRIEKQFLLYAYWIGLGILSSVGLGTGLHTFLLYLGPHIASVTLAAYECNSVNFPEPPYPDQIICPDEEGTEGTISLWSIISKVRIEACMWGIGTAIGELPPYFMARAARLSGAEPDDEEYQEFEEMLEHAESAQDFASRAKLAVQKLVQKVGFFGILACASIPNPLFDLAGITCGHFLVPFWTFFGATLIGKAIIKMHIQKIFVIITFSKHIVEQMVAFIGAVPGIGPSLQKPFQEYLEAQRQKLHHKSEMGTPQGENWLSWMFEKLVVVMVCYFILSIINSMAQSYAKRIQQRLNSEEKTK

SEQ ID NO: 2895 - DNA, 2873 bp, Homo sapiens
ggcccgcactaagagcctaactgaaatcccgcgaggatcaaccgagctcgccgaaaggagggaggaacgtatcccttctggaggctgtctcagggggcagagggaccggaccggaagtgacgtgagcgggttccggttgtctggagcccagcggcgggtgtgagagtccgtaaggagcagcttccaggatcctgagatccggagcagccggggtcggagcggctcctcaagagttactgatctatgaaatggcagagaatggaaaaaattgtgaccagagacgtgtagcaatgaacaaggaacatcataatggaaatttcacagacccctcttcagtgaatgaaaagaagaggagggagcgggaagaaaggcagaatattgtcctgtggagacagccgctcattaccttgcagtatttttctctggaaatccttgtaatcttgaaggaatggacctcaaaattatggcatcgtcaaagcattgtggtgtcttttttactgctgcttgctgtgcttatagctacgtattatgttgaaggagtgcatcaacagtatgtgcaacgtatagagaaacagtttcttttgtatgcctactggataggcttaggaattttgtcttctgttgggcttggaacagggctgcacacctttctgctttatctgggtccacatatagcctcagttacattagctgcttatgaatgcaattcagttaattttcccgaaccaccctatcctgatcagattatttgtccagatgaagagggcactgaaggaaccatttctttgtggagtatcatctcaaaagttaggattgaagcctgcatgtggggtatcggtacagcaatcggagagctgcctccatatttcatggccagagcagctcgcctctcaggtgctgaaccagatgatgaagagtatcaggaatttgaagagatgctggaacatgcagagtctgcacaagactttgcctcccgggccaaactggcagttcaaaaactagtacagaaagttggattttttggaattttggcctgtgcttcaattccaaatcctttatttgatctggctggaataacgtgtggacactttctggtacctttttggaccttctttggtgcaaccctaattggaaaagcaataataaaaatgcatatccagaaaatttttgttataataacattcagcaagcacatagtggagcaaatggtggctttcattggtgctgtccccggcataggtccatctctgcagaagccatttcaggagtacctggaggctcaacggcagaagcttcaccacaaaagcgaaatgggcacaccacagggagaaaactggttgtcctggatgtttgaaaagttggtcgttgtcatggtgtgttacttcatcctatctatcattaactccatggcacaaagttatgccaaacgaatccagcagcggttgaactcagaggagaaaactaaataagtagagaaagttttaaactgcagaaattggagtggatgggttctgccttaaattgggaggactccaagccgggaaggaaaattcccttttccaacctgtatcaatttttacaacttttttcctgaaagcagtttagtccatactttgcactgacatactttttccttctgtgctaaggtaaggtatccaccctcgatgcaatccaccttgtgttttcttagggtggaatgtgatgttcagcagcaaacttgcaacagactggccttctgtttgttactttcaaaaggcccacatgatacaattagagaattcccaccgcacaaaaaaagttcctaagtatgttaaatatgtcaagctttttaggcttgtcacaaatgattgctttgttttcctaagtcatcaaaatgtatataaattatctagattggataacagtcttgcatgtttatcatgttacaatttaatattccatcctgcccaacccttcctctcccatcctcaaaaaagggccattttatgatgcattgcacaccctctggggaaattgatctttaaattttgagacagtataaggaaaatctggttggtgtcttacaagtgagctgacaccattttttattctgtgtatttagaatgaagtcttgaaaaaaactttataaagacatctttaatcattccaaaattgtgtccgttttcttgagcgttttgattttttacttttagcttataccagctgaatggcagccttgcctaatccacctacaacaagaatttcttaagctttcttttatttgcatgagagagccactaccaaggcatgttttgttatgctgaaactgggctgctgcatactgctaaatggcacctctgggattggcctacctggggatttcttggtttgtgaaaacaggagaggagaaatatctcatacaagtgaaaggatactggagagagaaattacccatttctaaaaaaaaaccacactctgtcgtatctgtgttaatgttttctagcatgtactctggtttcaacagacacaaatttatatgttaacccagttttcttgccgttctgtaagtgttttattcttagtgtgatttttttccattgggatgtttttgattgaacttgttcattttgttttgcttgggaggaaaataaacaattttacttttttcctttaggagcattatgagcattatgtcagaatagaatagaattggggttcgatcttaacaggccagaaatgcctgggtttttttggtttgtttttgtttttgtttttttatcaaatcctgcctgactgtctgcttgttttgcctaccatcgtgacatctccatggctgtaccaccttgtcgggtagcttatcagactgatgttgactgttgaatctcatggcaaca

SEQ ID NO: 2896 - protein, 406 aa, Homo sapiens
MAENGKNCDQRRVAMNKEHHNGNFTDPSSVNEKKRREREERQNIVLWRQPLITLQYFSLEILVILKEWTSKLWHRQSIVVSFLLLLAVLIATYYVEGVHQQYVQRIEKQFLLYAYWIGLGILSSVGLGTGLHTFLLYLGPHIASVTLAAYECNSVNFPEPPYPDQIICPDEEGTEGTISLWSIISKVRIEACMWGIGTAIGELPPYFMARAARLSGAEPDDEEYQEFEEMLEHAESAQDFASRAKLAVQKLVQKVGFFGILACASIPNPLFDLAGITCGHFLVPFWTFFGATLIGKAIIKMHIQKIFVIITFSKHIVEQMVAFIGAVPGIGPSLQKPFQEYLEAQRQKLHHKSEMGTPQGENWLSWMFEKLVVVMVCYFILSIINSMAQSYAKRIQQRLNSEEKTK

SEQ ID NO: 2897 - DNA, 2771 bp, Homo sapiens
gcttccaggatcctgagatccggagcagccggggtcggagcggtttgtaatgtattgctggattttattttgctgtattagctcctcaagagttactgatctatgaaatggcagagaatggaaaaaattgtgaccagagacgtgtagcaatgaacaaggaacatcataatggaaatttcacagacccctcttcagtgaatgaaaagaagaggagggagcgggaagaaaggcagaatattgtcctgtggagacagccgctcattaccttgcagtatttttctctggaaatccttgtaatcttgaaggaatggacctcaaaattatggcatcgtcaaagcattgtggtgtcttttttactgctgcttgctgtgcttatagctacgtattatgttgaaggagtgcatcaacagtatgtgcaacgtatagagaaacagtttcttttgtatgcctactggataggcttaggaattttgtcttctgttgggcttggaacagggctgcacacctttctgctttatctgggtccacatatagcctcagttacattagctgcttatgaatgcaattcagttaattttcccgaaccaccctatcctgatcagattatttgtccagatgaagagggcactgaaggaaccatttctttgtggagtatcatctcaaaagttaggattgaagcctgcatgtggggtatcggtacagcaatcggagagctgcctccatatttcatggccagagcagctcgcctctcaggtgctgaaccagatgatgaagagtatcaggaatttgaagagatgctggaacatgcagagtctgcacaagactttgcctcccgggccaaactggcagttcaaaaactagtacagaaagttggattttttggaattttggcctgtgcttcaattccaaatcctttatttgatctggctggaataacgtgtggacactttctggtacctttttggaccttctttggtgcaaccctaattggaaaagcaataataaaaatgcatatccagaaaatttttgttataataacattcagcaagcacatagtggagcaaatggtggctttcattgggctggaggacaatggcgcactgcaacctccacctcccagtgctgtccccggcataggtccatctctgcagaagccatttcaggagtacctggaggctcaacggcagaagcttcaccacaaaagcgaaatgggcacaccacagggagaaaactggttgtcctggatgtttgaaaagttggtcgttgtcatggtgtgttacttcatcctatctatcattaactccatggcacaaagttatgccaaacgaatccagcagcggttgaactcagaggagaaaactaaataagtagagaaagttttaaactgcagaaattggagtggatgggttctgccttaaattgggaggactccaagccgggaaggaaaattcccttttccaacctgtatcaatttttacaacttttttcctgaaagcagtttagtccatactttgcactgacatactttttccttctgtgctaaggtaaggtatccaccctcgatgcaatccaccttgtgttttcttagggtggaatgtgatgttcagcagcaaacttgcaacagactggccttctgtttgttactttcaaaaggcccacatgatacaattagagaattcccaccgcacaaaaaaagttcctaagtatgttaaatatgtcaagctttttaggcttgtcacaaatgattgctttgttttcctaagtcatcaaaatgtatataaattatctagattggataacagtcttgcatgtttatcatgttacaatttaatattccatcctgcccaacccttcctctcccatcctcaaaaaagggccattttatgatgcattgcacaccctctggggaaattgatctttaaattttgagacagtataaggaaaatctggttggtgtcttacaagtgagctgacaccattttttattctgtgtatttagaatgaagtcttgaaaaaaactttataaagacatctttaatcattccaaaattgtgtccgttttcttgagcgttttgattttttacttttagcttataccagctgaatggcagccttgcctaatccacctacaacaagaatttcttaagctttcttttatttgcatgagagagccactaccaaggcatgttttgttatgctgaaactgggctgctgcatactgctaaatggcacctctgggattggcctacctggggatttcttggtttgtgaaaacaggagaggagaaatatctcatacaagtgaaaggatactggagagagaaattacccatttctaaaaaaaaaccacactctgtcgtatctgtgttaatgttttctagcatgtactctggtttcaacagacacaaatttatatgttaacccagttttcttgccgttctgtaagtgttttattcttagtgtgatttttttccattgggatgtttttgattgaacttgttcattttgttttgcttgggaggaaaataaacaattttacttttttcctttaggagcattatgagcattatgtcagaatagaatagaattggggttcgatcttaacaggccagaaatgcctgggtttttttggtttgtttttgtttttgtttttttatcaaatcctgcctgactgtctgcttgttttgcctaccatcgtgacatctccatggctgtaccaccttgtcgggtagcttatcagactgatgttgactgttgaatctcatggcaaca

SEQ ID NO: 2898 - protein, 419 aa, Homo sapiens
MAENGKNCDQRRVAMNKEHHNGNFTDPSSVNEKKRREREERQNIVLWRQPLITLQYFSLEILVILKEWTSKLWHRQSIVVSFLLLLAVLIATYYVEGVHQQYVQRIEKQFLLYAYWIGLGILSSVGLGTGLHTFLLYLGPHIASVTLAAYECNSVNFPEPPYPDQIICPDEEGTEGTISLWSIISKVRIEACMWGIGTAIGELPPYFMARAARLSGAEPDDEEYQEFEEMLEHAESAQDFASRAKLAVQKLVQKVGFFGILACASIPNPLFDLAGITCGHFLVPFWTFFGATLIGKAIIKMHIQKIFVIITFSKHIVEQMVAFIGLEDNGALQPPPPSAVPGIGPSLQKPFQEYLEAQRQKLHHKSEMGTPQGENWLSWMFEKLVVVMVCYFILSIINSMAQSYAKRIQQRLNSEEKTK

SEQ ID NO: 2899 - DNA, 2912 bp, Homo sapiens
ggcccgcactaagagcctaactgaaatcccgcgaggatcaaccgagctcgccgaaaggagggaggaacgtatcccttctggaggctgtctcagggggcagagggaccggaccggaagtgacgtgagcgggttccggttgtctggagcccagcggcgggtgtgagagtccgtaaggagcagcttccaggatcctgagatccggagcagccggggtcggagcggctcctcaagagttactgatctatgaaatggcagagaatggaaaaaattgtgaccagagacgtgtagcaatgaacaaggaacatcataatggaaatttcacagacccctcttcagtgaatgaaaagaagaggagggagcgggaagaaaggcagaatattgtcctgtggagacagccgctcattaccttgcagtatttttctctggaaatccttgtaatcttgaaggaatggacctcaaaattatggcatcgtcaaagcattgtggtgtcttttttactgctgcttgctgtgcttatagctacgtattatgttgaaggagtgcatcaacagtatgtgcaacgtatagagaaacagtttcttttgtatgcctactggataggcttaggaattttgtcttctgttgggcttggaacagggctgcacacctttctgctttatctgggtccacatatagcctcagttacattagctgcttatgaatgcaattcagttaattttcccgaaccaccctatcctgatcagattatttgtccagatgaagagggcactgaaggaaccatttctttgtggagtatcatctcaaaagttaggattgaagcctgcatgtggggtatcggtacagcaatcggagagctgcctccatatttcatggccagagcagctcgcctctcaggtgctgaaccagatgatgaagagtatcaggaatttgaagagatgctggaacatgcagagtctgcacaagactttgcctcccgggccaaactggcagttcaaaaactagtacagaaagttggattttttggaattttggcctgtgcttcaattccaaatcctttatttgatctggctggaataacgtgtggacactttctggtacctttttggaccttctttggtgcaaccctaattggaaaagcaataataaaaatgcatatccagaaaatttttgttataataacattcagcaagcacatagtggagcaaatggtggctttcattgggctggaggacaatggcgcactgcaacctccacctcccagtgctgtccccggcataggtccatctctgcagaagccatttcaggagtacctggaggctcaacggcagaagcttcaccacaaaagcgaaatgggcacaccacagggagaaaactggttgtcctggatgtttgaaaagttggtcgttgtcatggtgtgttacttcatcctatctatcattaactccatggcacaaagttatgccaaacgaatccagcagcggttgaactcagaggagaaaactaaataagtagagaaagttttaaactgcagaaattggagtggatgggttctgccttaaattgggaggactccaagccgggaaggaaaattcccttttccaacctgtatcaatttttacaacttttttcctgaaagcagtttagtccatactttgcactgacatactttttccttctgtgctaaggtaaggtatccaccctcgatgcaatccaccttgtgttttcttagggtggaatgtgatgttcagcagcaaacttgcaacagactggccttctgtttgttactttcaaaaggcccacatgatacaattagagaattcccaccgcacaaaaaaagttcctaagtatgttaaatatgtcaagctttttaggcttgtcacaaatgattgctttgttttcctaagtcatcaaaatgtatataaattatctagattggataacagtcttgcatgtttatcatgttacaatttaatattccatcctgcccaacccttcctctcccatcctcaaaaaagggccattttatgatgcattgcacaccctctggggaaattgatctttaaattttgagacagtataaggaaaatctggttggtgtcttacaagtgagctgacaccattttttattctgtgtatttagaatgaagtcttgaaaaaaactttataaagacatctttaatcattccaaaattgtgtccgttttcttgagcgttttgattttttacttttagcttataccagctgaatggcagccttgcctaatccacctacaacaagaatttcttaagctttcttttatttgcatgagagagccactaccaaggcatgttttgttatgctgaaactgggctgctgcatactgctaaatggcacctctgggattggcctacctggggatttcttggtttgtgaaaacaggagaggagaaatatctcatacaagtgaaaggatactggagagagaaattacccatttctaaaaaaaaaccacactctgtcgtatctgtgttaatgttttctagcatgtactctggtttcaacagacacaaatttatatgttaacccagttttcttgccgttctgtaagtgttttattcttagtgtgatttttttccattgggatgtttttgattgaacttgttcattttgttttgcttgggaggaaaataaacaattttacttttttcctttaggagcattatgagcattatgtcagaatagaatagaattggggttcgatcttaacaggccagaaatgcctgggtttttttggtttgtttttgtttttgtttttttatcaaatcctgcctgactgtctgcttgttttgcctaccatcgtgacatctccatggctgtaccaccttgtcgggtagcttatcagactgatgttgactgttgaatctcatggcaaca

SEQ ID NO: 2900 - protein, 419 aa, Homo sapiens; identical to SEQ ID NO: 2898
